United States Patent Application Publication US 2025/0297208 A1 - sequence listing, part 8

SEQ ID NO: 1338 - DNA, 11945 bp, Xanthophyllomyces dendrorhous
cacgactccatccggtcgaagcggaagttttggaagtttatcagattgccttctttcggccctagatcatttaggaagctcatcagtgctgccagagctgcaacttccttttttatggtgactggtgaccgaccaaacctcgtcaaggccaaaagggaactcaggtttctcgaggaacactacatgttatactttccggatattgccatccgtacgaactctttgggagacgcgttcagcacgtttggcaagaaaaaggtcgactccaaacgtttagtgcaaatcatggagactggcggagtagaagccatgattgcctacaggaaggatcttgatagtgggaacgatacgtccccggtggtcaagacggaggtgccgaccaaaacaaattcacctctcaacaaaaagagagcaaagagcccgaccgagtcgatcccgactcaacgggaaactgttggtgacaggagtcagaaaatgattgagcaggctaaagatggtgtgatggacgttgtgggtagagttcaggaaagtgtcagtcaagcaatcgaatcggtccctacatatacttctgcctcgtcggccgaggtttcgaaaaacatggttggagcctcgtccgataaagacacaccgacgtcaacaaaagagcagggcagtagtgaacagaccaagcagtctcggtcagacccatagacaccctcatgatgtatgatatttgagccttgacatattgatgtctcatcaagtctacctggatcaggccatcagttctagacgacgagtgtccctcaatgcttttattaggacagatggtggactggtatatttggcaacataatcaaaatatatacaaaagggatacatcgagagctgaatgaatgggataacaattgcaggaggagcagagatcgatgaataaaaggttcgagaaaaaaaaaacagaaatacggaacaacactatagtatgactgaacgtcaaaaatcaacaagagaaaacaggactactaagaggagagtttttggtagaaaggccttaacaacctgaagaagcaagaaagaaagtgaatgcaaggactaaagaagaacacagagcaccaatctgtgaatagcatgaggaatagagatgttgaatctatggacagacgacaaagaaagaaggtaagagtggagagttgagtaagaacaaaaatgatgcacataaacaaaaagagagggaattcaagaaccagaccaattttcattttgaatgcaaggtcgtgaatgaaagagtgaattcttcatctcgcaggtaatctccccagccacaccttacttcttgtttttggtcgccttcttgccttttgagttctttccgttctttttcttcttcttcttactgccggagcctgaccctgagcctgaaatagacccgttgggtgatggcgcttgtccggtcgcctcatgaagcgcaggcgaggtcaagccttggatcgattcatcttgtagcccaggcggaatgcggcccgtggatgacgcggaagatgatttcctagtcagtagagcaaaccgtttggcgatggggcttccaggagtgcttccgctaccagcctcctcaccttgagctgtatctgatccgctcagttcgatcgcatctagctcttggggaagggagaggggtgatctggatgggctcgcgttggctgatccgcccgggctggaaccagatttagtcttgttaatcaatgaaattcggcgaacaaatttgttggattcatttgaaacccggcggcctacgtcggcgagcatcgtgcctttcttcttagatttttccttgcctccgccattgggagagaaatcggttgaatcagtagagagctgaggagaatcttcgaactgttgtgatggtaagtcggatgagactggcgaggtagaagtgggaaactcaagatcagatttgacagatgggccaactgtggataccgaggtgaaattttggttagtctcagattcagaggaggtagcgagttcattcgattgggcgtagtgagcagccgcgtcagactcaccacttgaatccttgggtaaagatgaagccacagttgatttggatgcaaacctctcctgaggtgcagtagtgtctgtggtgtccattgaatcggacacattttcaatctcctcacccgcttgagggccaggtggagcaggatgggtcacggcttcggcgtatgagaacggtcgagacgaaggcgatgcagtagtttcctcgattgtagaggttgtttgagcggagtcgttggtcaccttggaggcaatcgattgtttcgatagggcttgctcgtcaatttcgacggcggttgatataggttgtgtagtcacattcgacttgtcgctctctgcgtctgtaccagcaaggtcgttggccgaagtttcagcagacttctttcgttcaaggtccaaagtagatctttgatcatgaacatcgaagaacaacgcccttagtaaagcaaaacgatacccagattggcgagcgtgataaacaagaccaaacttactcggactcaggaacatctgtaaatgttccgtacgaggttccttcttcctgtacaccccgctcctcaacgccgttgtgatcccttccttgatttagcagaggcgcattttcttcatttgaagcatgtgcagacacattcgttgtagaacgtctgacagcaggcacgaagtcttgagcggggttgtgcagagcccaaaggataagaattaagagtagtagtcgaacagaatagatggacaggagaaggaaaaagggtagcggaaacgttgtttgaggatctttggtgtcttggactgaaaaggaaatgttgacaaagtacaaggatcaatgtgtgctcgatgtaaaccggctttatttaatgaggatatccttcgcttggaaggtggcctcatccgacatatgatggactcctcagatttataattttccgattagaacttcaaaggaaggagacaagagagagtctacttaccaaactgggagattctctctgaccctataagaaccgtgcctataagaccaacccaacacaatgcctttgcccaaacaaactcgccagcggtcttgttctgcctgatccaaactaaactagcggccgtgccccaaacaacaagatttgatgatgaaaaccatacagccagcacaggaggttggccatggtagtagatcaagtaaagactcaaggagagaacaaaagtcaaggtgaggagggccaggagaacagaagtaagtctcgagcgaactcggaacactggaatgatgacaggaacctggatatgttccgttcgatattatagataggccaagggagcagcgagacaaaggcgaccagataagtttgagattaacgtgagtacaggaatgacaggccaagttcaggaaacacccacaatcccagttgattcgtcagaagatgaactgtttgccctgtcactccgttcgatgaaggccgagaggagaaggataagaagaaaggcgggaaacacagtctgaaggacaaccaggaactcttgagagaggtgggtcatgtttggcgtcaagcgtcgttctctttgactaagataatcagacagcaaggatcgactaaagattgagggacaaagaaatggaagagtgtactggaattgtggatgatgatggtcgaggatgggttggagagatggtcggacggtaggacgacttgaaatttctttcagcctcgttcgtcagcatacacacttccatctacgccgactcattctatactcatcacatctatctctgctatcgctttcactgtccttcggaaaattgggctattctcaacaaaaattcatatttcgactgtaagtatatcaatagcctcagcacctttgatcgctgtcatatcaaaatcgcatggatttgtcgtcatccacgccggttctacctccgccgatctggccatatccggtcaccattcaaaagcttctactgcaaccaggtgatgctgtcaaacgaggtgatgtacttgtccgtagtccatccttccttcctgactttgaagcctgggctcttgaaggattgacattgcgacttctcttggggtccgaacactccctacgtgtccttacgaccatccaccagcttcattacacctttccagatccggagatcacgacggacaaacggacgtcttcgttcatttctcctcacacaggtatcgtagctgcgtactctgttcgaccaggtgaagttctccatcgaggagaacgacccgacggtctcatctggattacagaaaattgcacccatcctgttcagctcggtggcctttgcgcggtgtgcggcttggaccttacaggcacggatcatctggtggatggtccgtcggatacgagtcgggccaatattcagatggagcactcaaccacatcgcttactgtgacacgacaggtttgaattttttactccttaatttgaccaattgtgttcatccgtgaactatctcactaacagccatctcatcgacgcgtacaatctctctggacacgcgtcttcgcgcgagtacaggaagcatccagagtttctaacctctctaacgaagcgctgctccaatccagacgactctctttgattgtggatctagatcaaacggttgttcatgctacggttgatccaacggtgggcgaatggatgtcggagtgcggcctgtttggcggagactcagacggggtcaagaatggaaagggtaagaatcgatcgcgaaacccgaatggcaacgcgctgagggatgtgcagcgattcaaactggaagatgaaacggctggcagaagaggcagaagagaagaggatgattgttggtattacatcaagccaaggtatctctgcatcttttcttgtattgggtcgtgatctattgctttccttgcatgaacctatttgactgacccgtaacgtgttgagagtaggcctggactcaaggaatttcttcggtcgctgtctgagctttacgaaatgcatgtatatacaatgggtactcggtcctatgcagaggctgtctgtcgggtgattgatcctggagggaagatctttgggggtcgtatactgagtcgggacgaaagcggtagtgagttgtttcgtttctgttcatctattcttgagtggaaatgtgctcgctcacacattcctggctgctgactggatataaatctcattccaggtttaacggccaaaagcatcgagaggctattcccagcagataccagtatggtcgtcatcatagacgatcgatcagatgtttgggagggaagcaaacgcaatctggtcaaagttgttccttgtaagtagtcgtattttgtcaatagaccattcaaccgtccaaccagcttgctcatacctactgtgttcgattaccaatgcgtgtttgatcgatacaatatagatgacttttttattggcattggagatattaactcctcatttctccccaaaattgcgccttctcttccctcgccttctctagcttcgtcatctgttgtctctccatcacaattaatcaattctcaaatcggggcgagccttcttaaagaggcaactgaggttcaacatcaggttttggaggatcaactggaagaacgaccgcttcaaaaactgcaggacgagatcaggcaatccgaagatcgatcaccggtgccatccagagcatcatccattgacggaacagccgacagtgatactcagctcgatgaggaagaacagactggtgaagaagagcacaaagcattattgagagatgacgacacggagttgaaccgtatcgaacaagtatgccccatttatattgtcaagcttagtcaagtagatcagtagggcaaggactgatgtacttctccttttatggacattgcagatccttagagaggtccatcacagatactactctgccatagacgccaaagagaagatcaaaccagacgtcaaggtaagcgatattcctatgataacgaagacacgaaagagtctgacgttagcttgtcctctctataaaatctgaaataccaagccaatcctggactacatcaagcgcagagttcttcgaggctgtcgaatagtgttttcaggagtaataccattaggaacgaaacctgaattgtttgagtcccgctcgtcaatgttctgtcttagagcggtgtatcatgtctgattgtatcactgaccggggaatcaatgggtttgcttattattgtttttataacgaaatagattttcactatggagacttgccgttcaacatggggcggtttgtgagaagaatctgtctactggctcgacccacttgatagcacgagctgtttgtctctatttcttcttagtttattgaatgctttattcatattcacatggcgctgactttcatttgtctatctttcttgaaacctcacagtccggaactcagaaagttcatgaagcatcgcgtatggatgggggaggaactagtagaatccatattgtcacaccctattggttgattgactcaatagcgcagtggacacatcttccggagtggatgtatctcctgattccgccatcgccttcaaaacagaatacgcaagaggaaaccacgacgcctccaggaagtcctgtgcgagatctcaatgagggatctgactcagtagcggacacgggggaggaggagagtgagggagttgaaggggaagagatcccgatgttggaggttgtcgagtttgatagggacgcggccgaccgtgagctcgaagcgtttctagagggaagtgatgacgatgaagagcaagatgatgatgtagaggaagaggaagaggacggcgcgattgatcctcaggatgtcatcggcggtgaagaaggggcagtctcaaagcagaacgacgaatttcgatcacctttagctgaggtttcgacgcctggaccatccatatcaaaagccaagagacctcgtccgagtacaccctccgactcgagccccggcctgcctctattgacaagctctgacgcggactttgaaaagtcaattgattttgcatcacggtcgaataagtcggtattcagtcctgtgaagcgtgcgcgggtgatagaatcgggagaaactcatgtgggtaaagagaacagctcaaaccaggaggacaacattcaagaagaggggcaggagcaggatctagaccatagtgataacgacgacgatgtcgatatcgaagatgataacgcgtcggacggtgatttggacgaggaagacgaagaatgggcgaaagagtttgccggtagtcttcttagcgaattcaaacaaggcggcggagatttatcggatgatggagaaaatcggggccaaggtgatggataatcatgaagtatttttttcttgtgattcatattcatcatcatcattcattcagatatccgttgaagtcgccgtgatggccggacaattggcggacccggtatgcttaatttatccgatggctgtgttcagcccgatcggctcgcctgtgcttcagtcgagttttctgacgatatttgacacattgtctgcgacgagaccggattgcttttgatctgactgactaacttgttactgagctgcttggcaaactttgaaaaggcttggatgatggcctttcgacaagtcgttgaagggaacacccgttgtttgatttttgataacctcgaaccagacgtctcaatctctttccttctctttcgtttgacgtttatccatttctcctcggaccgactgacctgatcagtatagcaatggtgattcggaatatcattcaaagcgctccctatgacccgccggttagtatcccggttagcccggctcctccacccacactccatgaggttctctcctcattttcagcttgcaatgatagagatagggacatgttgatccagctaatagttgagaagagccaacaggttcgttcaatttcaacagatagcgaaagagtctcatttcatgttgtctaatattgtccttgctttatttatatgcacacgggctctcttcttggactatctttacaggaccaactcattactcggaatcaaagagctcagtatgaacaactcgtacaatccaatttgattcttagggagaacctactagatgcaaaggcagcctgcgaagcgaacgatcgtttcgtcccctttgccaacgtttctgtccatcaaccaacaactgagccggtacgatcaacattcattctcaagacaaccgtgcagatggatgtaccatccatttcctcctcttgcgcttccacctcattcttctcaagtcatctcgcgcaactgctgttggatactccttcatccgcctcaccacgcgcgccactccgagatgctgcgccccagcttttccctgtgccgtccgtcaaccccgaaaaaccatatgttcctcgtcggctgaattggggcaatctaattagcgagcctgcgactacatgtgccgcgcaggatacaagtttgccaagggataatgaggcaggagagaaggtgaaaggatcttctattcagcaccgacatcaagtctcgttccttgtagagaagtaaaaatcagtagttgatctactgcaaacggacaacccttagatgatctgatagagagaaaccctgatttatctatctgcccaggcggctctaccctctttgttccattcctgtattgtgttgtatcacttgttctaattatgtatacccatgttcttatgtcattcttttgcaaatagaggatttcgtcccaggctgagcagaggttccgtacctaagggtcggctggaagaggcttaggctcgggttttcgccttcacctttctttttttttctctcgcaggtgctgcacttcacttccatctgtgacagacttcgagatgctgactgactgtactgtaagtgttttctttctgtgtcgtctattgtctgtagttctttctcttccttcccacccgtgtccaaaacgttagagctctcaattatacctccaaagggtgtctctgtcaaatcgcgggaaaatcgacatcttcttttttctttctaaaaaaaaggaaaaggaggcagtcttcacctatcgatcgcctgtttggtctcttgctcacctcgaaaggggtttgagcgtttctttctttatgcgaataagggaagaggagactagatggatgtgtcggcaggagagggcgtgaagctttcttttgtctgccttcccgattccctctatacgggcggaggaggcctttctagcttagacatctctcttctacctcgttccctcttgtttttttgtccgtcttttgccgtggtgctttgtgttcaagaagcaagaaccaaccagttgaccatgcattgttttggttttttatccaccttctgacacaggaccggctcatagcctgaaacaacattgatctcacttttttcagattttcttttcatcgttgttcatatatacacttctcctttccattccaatcttcacccgttttaaaatccagttacctcacctgacaaaggattaacccatgaggctatcgggacagtcgacgggcagaatagttcatgaacaaaagaaaaccatttgttagttttggccagtcctgtgcttgctctttcctcggagggagtcggtacgatgatggagtgtcagaacccttcccggtttcctaaatttcctcagttcttttttctttttttcttttatcgtagataattgagtaattggtgatatgataatatgatatgtcgagtaagaagaactggatcagcaatatgtgcccattcgaaaagtgacgcgagaatcgctctggggaaataccttatgtccgtcttccccatcatcatcatcatcagcatcatcatcatcgtcaattaacactttgccactccaatctttgagcttgatcttggatcttgttcgtgacaatcaccttactcaatcgcgcaagccatctttgttctgcattcaattaccatcatgtccaacccatcttctttccttttcgtttgtctagggtaagcgtctagatccattcttagaagatgtcttttctaggcctcggacctagctatcagatgctgagcataatattgattcatctttgtcccaacgcttcgtgctcaaccccagaaacatatgcaggagccgtatgttctttatctctttggcgattgcttaaagcgttgaaagctaactccaccatggtaatgctcaaactcgccgttgtacaccgtccatctttcatcgtttctcggcttgacttagctatggccgaagcggtctttgcccacgaagcctctcaacgaggtttcgatgtaaaggttgattctgccggttagtctgatagtgtcattcggttttctcgaacgagctactggctcacaacccggctcggcccatcatggtgcctcgtgccctcgacggacataggcacagcagcgtatcatgtcggagagaccccagacgctcgaacagtgtcgacctgcaaggctcacgccgtccccatcaactctagagccaggcaggtcagatcgagcgacttcaaacatttcgactacattttcgcgatggacaagaacaaccttgaaggactgcagagggaagcaggcaaggtgaaggatgggaaagccaaaggtgagaatacatcttgatgttaccagtttatcttgttctatcttcgagcagcattgttttagaaggtggtagaatgcctcggcggccgtggcctggatagtactaatagctaccgtacctgttgaatgaaacctactggatagtcatgcttttctctgcatatggagacaagaagcctatagctggttcgttcatcttccactcgggtgcttcacgagtggcctaattgactgataaatatttacatatcctacgccgacatcaaaccgtctagatccttactatggcggacaagatggatttgaagcgtcctacgagcagtgtactcgatattcgagggagatcttagacaaggtaatgggtcccagcgcataaagaataccattaaacgtagaagctcaggtgaagccaattgtaataggaagctcgatagaaggtcaacagaagctcgatagatgattccgtgcaggacgctcatccgttggtttctctcatacgcttcctggtggccgaacactatgtcggctgtcaccaaagagtggcgagacggatgttcgttgtgaggtgtatagaacccaaatcatcgccgcagacccaagtatgtgtcatcaaagtacagcatacatacagcaactgagcagacaagcccaagacgaaaagaatgtaggcaaaggaagaagcaaaatcgaaagaagcaggctacaaagacagcaaaataaattgagtacagagaacaagagaagaaacccaagtggtcagaagggatatatgatgaggatgagctctgacagaactcggtgagccgcgaccggtgatacagaagaagatagacttggcgagagaaggaggatgaagggcggcccgctcggctcatgatatcaccccgtcgcttagaagcctcgcaatgttttctttctcagtcccaaatattttcttcgatcctggcggcatcgatggagcgatctcgttgttttggcctggtccaagctgtatgttgtgcgttcccatagggatcaatgtgaacggggtagccaccttctgggcagctccctttgttgcccgcttgggcgtctcctgcttggatccagacgtaggccggtgcaactgccgagacggtgccatcggagacatccagaaaggtccgtcgacaggcacaggcggaagaagagactggaccgtctggcggtcggacggagagaaaggcggatgggagaacctgtcgccaggctggttgactggcccatggtcgggagtggaagccacgatcacctgtgggtttgtgagtggagtccagtcgttgcc

SEQ ID NO: 1339 - DNA, 17344 bp, Xanthophyllomyces dendrorhous
agatcctcgatatcgcccgcctccatctcgctgactgccaggctgacgaccctcgaccgtttctgccggtgatcatccaggccggttgcatccatgcgggctgtggagaaaggcatggagaaggccgcggaagaggggatgggagtcgggagtgcaggatcagacaaaccggacgaagtgggagttgaagcttgcctgtcaggataagacctaccaccggtcaaggtagaagacacaggcgcagacatgtcgaccgtgtttctagcacgtttgcccagaacctgctcaacctgctccgactgcctctctaggtcaagcgacaagtcagagaccttcattgcttccggctgagaagcgcacgtctgggactgacacagccgagcctctagcctgtcctcgactgtcttgagtcgactggcaaaagactgttcgatcagctttaggcgggactcgatcagcttcaggcgggactcaaccatctggtcgaccatcgcttcgatgtcctccttcttgacagacagccgttcggcccggctggacatccgcccaaagaccatgatctccgcgccaatgaactcgacggtggcatcggtgcacgccagagcgtcgtagacagatcgcttgttgggctcggtctcttctcgtgtgggcaggtcatcaaccctggctgtgagttcggcaagagcatctcgtagctcggctaacgccgtacaaggacggcaatatcagtctcaggaaagagtagagaaacgaaagcaggacaaaaatcgacgataaggaccaactttcaagagagccctcgggcgctatctcagcatctatctgtgaagcattagacaagctattctcctcagagggaagacttgcagacgattgcaggcctgatgtgctgaccgagggctcaacatccgtatagtgttggagtatacggtcgatgaggttctttgtcttctggtttgctcctttgatgccgagggtctacgtgccaccggaccggagggatgaggcataccagatggtaaaacggaggcacgtgttgagtacaagtgtgagacagagagaaagcgcgcgcgcacaggagcagagacagaccttgcatagtttttgtacgtcagcccgctttagtttgtgtaattcagtagaggtaggtgtcatggtaatcattccatggatggttggtgctggaatgggtgtggaagattaagacgaggaaatggcgaagcgagctgaagcgagatgggtcggtgattaggtgagtgttgttggtgtcggttataaaaagagcaacattgtctgctcagccattcgctcatactttatatagtacggacgggaagtgaaaggaagcagaagtgaaagcgggaaggataaagaaatgtcatccaggtatggtgaggatgttgagcggagaaatcaggcgcgtctgccgtcgggttctgatgaagatgacgtggccaaattgggcacgcgtcaaggcggggggctcgttcggctcacgacttatgctagttgtcgcaaccctaggcctcaactcacaataactcagttgccaatgctcttatgctttcttgtcctgcccttgttcctgtgaacctcctcagtctctgctcatcacgtgctcactcgttatcttataggattcaattttaaaagcagaaccaaggagaatacaatttctgttatgtagccatgtaggagaaaagcgccgtgactgaatgggtcagggtggcctgcagtacgacgaacagctcggcaaacgtccgggaaaagataacttccaaaatgaagaaccaaacttgtgggatatcgtgtgatctttctacctgcgcctacaacagctcaccaagctgcgtcagatgatagcctccaatcttaacgaactggagaagggacaagacacggatgggcagaggagccgatttagagcgccaagcgctctcttgtgaagtactatgctttacattaaactctgatggataagaaattattatcaactctatcatgaaaaggagactaaggcttagtttctggcgagacgaaaatcatgaagagtcgtcattttagaacgcttcacatactagagggaggaaaaaatatagagtagataaagatatatctagaacagcgatgaagcaggctcgcaaagaaaatttattcatataagaatagagacgcaagggcatgaagtgtgaggacagatataagccagttgacaagatagagcaaagatagaatgaatacagatcagataagacgaatgattcagccgagagaccttgcacgttgaaggcctgtacacgaaaagggggtgatcgaatgagaatgagcaggaaggcaaccggattggaaaggtcgctctaggtctagaagaaatatgctgaaggatgtgagaaagaaagtaagaaagagatagagtcgggtcgtgccctacaagcggaagaagagtacaaatataggcccagatagaaaggaaggaagaataaagtagaataaggtgggattgattcttgaagatcaggacagagaacagagagagatgttgtgaagcgccccaaaggagaaagaaaagaagatgagacagaaggaaggaggagatgcttcaaagagcctcctctctttcttctttaaggacttcgagtcgaccttcggccgagcatcttctcttgcgttttcggtcggtctgccaatcgtccctgtctgaagagttacggtcgatagggcgaccgccagaagtcaacagagtaaatgaacggctgtccggtctttcgtcgacatgctcgtgtagaacgggcagtatcgagattgacatcgatcttgccttcggtctattcttattcggatgaagcacggtcgacgaagtcgtctctacgtgtttgacaaggcagaatagaataagaagtggagatgagtgagatgaacatgaagaatagagagaggagaattcaacataccctgtggaaacgatgtcgctgggacaacatgggaggagataggatcaacagaggcgaccgacattgggctggtcgagcgagcgcggggagcggtatgagacggaccgaacgtggacgggtcgtccgagccagtcaccggaagagggcccgggagatagggcgagtgaaggatggtaggtgggtatgaggtggaaggcgagccagagggaccggatgacagagacaagacggaggaagaggaggacgggtttgtagacgaagtagacgaaaaggacgaccgggatgatctcggtgggctgtttgacggcgacgtaggctcgtatcccattcgatcctgagtgcgtgagtgaaccaaggcaaggtaagaaagacgacgcaagagaaaaggagctattcaacataagaaacagacgaaccaatcgtctgagtaggtcaccgagggaaatctctattgacggcctgctcgaatgatccgatttgggtcgtgagcgatgttttctgtgagtatgagcgctgctcgagtcaacttgatgtttgtagagaaatccttgtcggtcgtcatcctcgctactctgttcggcttcttcgtcgctcgaactaaacggatcgacaaatcggactactctagagggtaagataggaataactatcggccgggcgtctgaaagaaggtccgacttgaacgagtctccacggcagacagagattggcatattatatgtgctgatgagagagttttctgagaagggaatgggatgggaaggaaggcaagtgggagaagagagagactctccagccggctgtctattgatgataaagggatggcgaaaggagcgagggccacaggtatgataaagaatagcagagaactaagtcgaacgaccaaaacgatcgactttggggtgagaaagagatagtgggacgactggaatgaaaccgaaaacgatacgatggggaacttgaggaaagactggggcgaggtcaagaccaataataccaatggtggtgatgaggatactaatgatgatgagaaggatgagaatattctggtcaaaggagaacagacgaaagaagaacatagaactaaaagaaaattacacgcggtcaaatgatcagctgaaaaagtgaggggtaatctttgcagagggacagggcaggtgcatattaaacaagaggaacgcaatagcaagcgagccttggaacgcttatcgttttatcgttcgttccgtcgcacgcccagagctcagtccggtcgatgcactggttggcgtgcatgcctggacgttggtatgtgccctggctggcccttgaagaaagctctcaagggcacacagcgtgcaatcagaggcttgggcctggtcgattgatatattgttccgcaggatggcgtctggctgttggcatctgacgtttgatccctgggccgctagcccaaccggtgtccctggggatgcaaatcccgagcccctgaccccgctgcccggatctaatcatagaggccgcagggctgaagagagatcgtcttatgcctgagagcatgtgacgtgttccaagaaagtgaaggtaagaaaagataaaataaaaaaaatgataaaaattttagaaatcatagacgataaactatatctatattcgctcttgcatttagatcacctcccaggcccagcccagcctccgattttatctgcagatcatccctttacttatgtacctatatagttttctcttaatttttgttcctctaatttcatagcgtaaatgcttcccggagcgcgatcaccgccatcacataatgacatacattcggaagagatttactgcgcacatcacatttcctgcgcactcgtcatccgatcaacccatcagataagattgtcttctgtgcccttaattgccctactgacgtgttaccatattaccctgttaccctgtcgcccggctcctccatcgtctttcgctagtgatacaatctaatagtcttttcaatctcctagtgatttagtagtcacatcaccggcctatgctgatcatgtctatcatgctttcttgccaaccggctctactcctgcccggcctccccacgctctattttccactcggcctgcccactctgtctgccagccaagctatcgtcgttcatgtcagcctcctttgcaacccgatcggcctcttcctgcttccttttcgaccagtccagtaaccaggatctttctgccgcatcctctcgttctaaacgcgctctccaatcgtcatcgccctccaccgttgcccctcctggatgtcgttgttgacgacgacgttcggtcgtgattctgatcactcgacagagatcgcgctcgagaattttgtccctaccaagcggtagccgtccagaaggcatgtatcccaacgtcacatccgcgcatccgtcagtgctgaatccaaagacatatgtcatatgcttcttccagttggtggtgtacaacaagtgcgagttccaagtgccttcacacggatccaaatgaacccagcgctaaaatcgcagagacaccagagcgaaaaatgaagcatcgtttcagcgagtgactgaccgcaaatacaacaaagcatctccatcgctagaggatcttgtcgagatagctcaaactttctaccaatgttatactcctcaacctatcacataaagaaagaacgtacccctatagattcagaatgatattcgttccagacatgatcttccaggttccacacgtaccgcgctcgaaacccggcggcccggaggaagagtgtgaatagattggcaaactctccacatcggcctttccttgtcttcattaacatccggcaatcactatgaccaaatcacaagcagacaaacagttcagacaagaattgaatcgctctcggtgcgcgcacacgcaaacgcttacgtttaggcatttcactcacttgtaccgaggaaatcgttcgatcctcccacatttctggcatttccacaactccactctgcccgccccgccttccacctgctccattagagagacttctccctgaccgatgcattccatcttgaccttactgctaccggctccgccactgccatcactatcagttcccctctcacacaactgacatcttatggggtccacccagttcatatagctttgcttaaaccagctaaccaaaagttcggccaagtgatcttgagagtgtcgacctgaggatcgggcgagcatggtcgctcttgaacgtaattcgtccaacggcatctgtgtccgtgctaatctctatagacgattcattgttcatcataaattcatattagacaaaagaacaaacgcaacacttacctgcagatccgcatcctcataaacatccattccattgtccaaacgtcggatcacaccgacgatcatcgactcgtccgcccttcttggtttccaggagagtgtgtttgccaggagcacagatgatcggaagagctcgctcagattaggttctcgaggcgtcccgtgggtgatgtgatgtgttctcaggtaggacacataagccggaatgaatgtcattgtttttctctttgtgatgtatgtttgtaggttgatgtttgaacgagataaccaattggccgtataatatccgaatcaactccttaatatatataaccgcctccaacattttctcgccttcttttctttcaccacccaaccctcctggtcgtctttccgttcttgcttctattgctcgcttcttcgtcgttccgaaccatcacagagatggacgtccaggaacagaaaacgtcgcccaaacgacccattaatccccctagaccgctcgtcctgcggtcgccaacacagattccttcgccctcgccctcgccctcgccgtcaacatcatcgtcatcatccggtctctcgtcccctccgagctcgatcggttcggccgaccacccggattctttcgagtcctacaccagacatccacccgtcatccgtgcttcagatgtccttcctatatctcctctgcctacacccaccttcaaaaacgagacaacatcggccttacagaaaagatgtccttcgtgtgttcacgaaccaagcaggaacagtccggagggcatcatgatttgttgttcaaattgtacgctatttacccggccttgctccaatctgttctatcgatcgtcgtcattcgtcttcccttcacttctgctctcatctttcttttgtctcgccttttcttttagtttcctttctttttcacttcttgtctgtcgatcaaccgagttgaccagccacctttcttcacgttccgcaggtctcgagttctaccactgggcttgtatcacagcacagcatcccgaatgtcttgatccatcccagcaagtcgatcaacattcgaataagccagtcaccgcagcgccctctggcacgaatcagagttcaagaacgcagattgacaggcccgaacggtggttctgtccgaaagcaagctggttcgtcctcagtgtctcttccgttccttcctggcccagacgcacagggttgcacagtcgtcgatagaagtgcgaaatgtgtcaagagagcctgacggaagtctgacaggccgtgcgtatccgtcctagttcatcgatagacacacccgatagaccagtgctcgaaaaagcttcctgcctggacaattcatatctctcgccctggccgttttcgaaacctctgcttcgaccggcttcccagcttctaccccgactgtcgtcttccgacagcagaccttccagaccgggcgtctcgccacccgagacgaccaaacgacccgtcccgccgcggtcgtcgagttggatcccacggttcgcctcgttcgagtcagtcggactcatccatcaggacgggttcaacaccatggacccatccgagctaggctcgacatggaggtcttttctccagggtcacccgccaggcgatgtcttgtttgagcgaccgaccgtcgtgcgcgctcagagagagctcggaaagcagggagaagagagcatcagtttaattggcggaaggatgccaaaaccaggtttaacgttgtttgatatctgtcagctcaacggtgcgtgaatcctcttcacactgaggctaatttcccttccttccgacacgaaactgaaatggcatcgttctatacctccccctcttcacttgcgtggtctgtctcttcaggtgatcaaactcagctcgaagtgatcgatgtcgagaccgccgaattatcatcctcaccgccaaactcgacgaaaccctggacgctcctcagttggcgaaattactttgagctttcacctctggagaaggaatccgtgggcttattcaacgtactgagctatgaagtctcagattcacccttaggtaaacttgtcaacccaccagaaatcgtcaggttcgtgtttaatctcccgagggggtttctatttttctgcttctcgtcctggtgaggtagatactcaaagaatgagtgaggggtctgtttctacattctctcacgtcaaacaggatgttagactgggcgaacgttgtctggccaaagatacgcaagacgaacgatcagaaaccaagggtacaggtgtactgtttgatgtctcccgccggttgctttaccgtaagtcttttctccccttcttcttctttgctcgtcgatcatttgaataagtcgattaatgcatcgtcctactcgtccgccctgtcttccttatagaactggcacgttgatatggcagggagtagcgtatattatcatatcctccgaggatcaaaaacgttctatctaagtgagcacttccctcgttgtattgttccctcctcttggtaggagaagccactactgacgctcatattccaaaattgtcatcatcagttgaaccgacggttggcaacctgaatgcatatcaatcgtgggcgggagcggaaccgacagacgaatggtttggacatggagtcgacagagttcgtaaagtcacgatctcttctggggatacactgtgagtttttctttcccttctttttctttcatgaacgaagatgaaactcattcgccatgcgctcttgtatttctttcacgctgggtgtgaccgtcgaaagactgattccgtccggatggattcatgccgtggtatgtccgatgagctttttgtatatcatcccaatataggtttccccccgccaacctgaaattgtgatttctttttatatcagcatacgacggaagacacgatcgcgttcggtgggaactatctgcattcttatgatatcggcatgcgtatgtaccccttttccatgctttgtcctgggagaagaaatctcgtggagaaaagtcactgtgtgaattgttgtctgagcgatctttctatctttcttgcatcttttcttgtgtccgtttcgttcaaccgggggttctagaattcaaaatcaaaaagatcgaacaagacttggggattcaagcaaatcatacttatcctcaatttcacaagttggtctatccttattctgccctcctttctttctgaatccgagtcttaaatcaatcaatcctgatcacgccgtttcgaaataaaactacatatataatctttggttcgtttgtgcaatcgcgcgaaacagactttgctggtacgccgcgaactactactgtacgatccttcgcgatcgaacccgtctgtccaatcgatccaaacctgggccatctccatctagcactcgttacaacccccactcccacttcctgtctccctctccctctcactcatcgtcctcgttctcattccttgacacacccaatttcacccctcggttattaagaaatttaagcgagctggcgtccactttactgctattcataagagaacgtttgaaacgtcatcatctaggatcacccgccggaaacggaggcctagaccaaaagacagaccagtcacaaggcggtggaggcgaggagaccgagtcaattccatggttccgaacgcctgacccgttcggactgatactcgaattcgcaggcagaatcgactttcagtttgagcttgagcaggctcggggatggcgatcccatcttgccaacgatgggtccgggcccgaggatcacagggacgaatgtaagaatggcgaagaactcgatctggacgggaggaggaggaggaaaccagaggaaagcaagattgacggatcggatcgaccggtgaaggccgcgcgaaagggacgtcagactgagagagcagagagcgagccggcgagacccagaaggaagcctggaccaaaatcaaagtccaagaagaagccgggaccagagccaaagatgaaggctgaggataaccccagtaccggaacaggttccaaatcggtggttcgtcgaagagtcggccggccgagaaaaaatcctctggtcccagaaccaacggtcgtactagaccgggaatcgaatactgaatgtataacaaaattgggaccaggaccaggaccgaaatgaacaaaacttggatttggcaggaaaggatacagcagggatgtatttcaaattcaaaatgtacgattactatataatctcctgtttctgatgaggaagagaaaggcaacgtgcatctctttcatcctcttagcaacctggggagagaaagtctgttgctctatgagaacccatcgacttccctactctctgggcgcgtcaaatccacctttcgaacagatcctcaataataagaccactgaaaagtcatagggactaggtctggagaagacgctgaagatgtgtgcttcacagaagacgtatgtgtgacttgtcaatccgcgtgccatcaccacgccaagctttgtaaatcgaagctctctctcaaaacgtttcgataatctcttttggatcaatcgtgcccgaatttctgtgatctcatgtttctgcgtgtccctctcttcatctcgatcatgaagtctctgttcttctcagtcaaattgtctgaagccgtacgtatgggctgacatgaagcaagcgaacttcgatacagagtttgcccttcgagagggaaacgacgcgtttggtagtctgtttctttttttactcgaccatgacgcgttataccctgacttgagaaaccttctccaatccgatgctctccaagaacgcagcgcgctatatctcatctctttcaaatgatctcactttggtaaactggcctttcacaggttctcgtccaccctcatgatcataagtcaacagggaaactgttcgtgaccctctcttgtttccttcttctcgatccaccgttgagatggggttcagacgagattgctttcgtcgaaatggatggagataatcctacacgaaggctgaaacaatcatagcggcgttttccaataacgaagtttgcttcagttgttttttttgctcttcaaatgatgatttatgagtagacttcgggaaggtggagattagaacatgaaaggggagagaggggaggttggaatatcgatgggacggaagaagaaggagaaaagaatatgagagaaaaaaaaatagaaaagagggactgaccaagtcaagcttcaacgctctgtaaagatcctttatcgatcccaactggaccatacagaaatatcttctcttgagacagaaagccgatggttcggctgacggcaaattccacattgtgtatattgggatagggacaggtgcgtatgagaatattgattggaggtatgtgtagtctagatgctgatttgatatgatcttttttcagtttcgaaatttggtcaagaaggacaatggtgagtcatttgttggtgacaaagacattataggcagggtggaaggatgaaaacgatacgaaagaagagagcaggaaagctaccttgatatgacagccatgggagccaattggtaacgtattgatgggatccgtcgtcggtaattttgtagcagtcggtatcttctcgaattctacatcatcttgctatgtgtgatttgatacaaagaaagaaaagaaagaagcagcaagatggaacgttagcatgtctctcttttctgagcgcgagagtggaaacaacttctggaacactcaaaaaggaccaaacgaacgaaatacagttcatatgtcgaaagactgatgtttttggtgcgattggctttgagcaacttgtttgttttctacccggtttcgaatgaatttaaaattcataatcagaagaaaaagaataatgtcgggttcaacaccaagaaagagggaggatgatgagaaaccaggaaagtaaacgaccaacactattagaaaagccgacgtggtcctcggcgaggtgagctgagatgatctcgaaatgaggctgtccaagatttattagacatgtcagcttgtcgaaagtagattgaaagaaacagaccaatacagcaacgacaagacgagacgaaggattgagcgcacccagtgaacgccgacagccatagccagattcatgagactacttaactcgacctgaaagacaaatcggcccagatcgaacatttcatccggtgcttgttgactcagtagacagacggattttgtgcggatatccaactcggaaaaagtatgatcaatgtattccctagtgagcggaccgtttgctacgatctgcgtgagagaaggatgatatcggggtaagtttgaattgaaggggtcttgcttgaatgaaaaagtgtgtaccttcaagtaaggcgttcgttcgagagcttccggaaacttcacgagcagctgtccaggttttgtcttatcagtgcaaacccaaaaattgcaatgagaagaaattgtcatgaagaaagcatgcaggggaagggagaaaaggaaggatgaacatccaaattcaactttgcgctataggaaagaaggagagtcacgacgacgatagcgaaaggaatgacaaacttacgccgatatttgttctcaatggttcaccagggaggacagagggtttcacatatacgtatggcctgtgatttaaagcattcagagcccggtctttgtacgcttgagcctgtagggaaggtcaggcattcagttcatcattgacgatgtaagggcatgtagatcttatgaacacacggaaagagaggctcacagcttctagaaagaatttgtccaagaaggcaaagttcccagtctggtcctttggtttatctggcgacagattttcagcgactctcaaagtggacgcaggcaaggcttctgttgaggatacaggtaaggacgaggacggagagggtttggcgagtggtttggtcggatttcgaaggcgtgtacgatggggacctttgagattgagagtatctgacaccgtgttgagctcccggagagagacacaactccttctggacgagctggctgaggaacgagcgatggcgagagtagagaacatggtggttcaagggatgaaccgttgagtcgtgttgtcccaaaatacgaggacgaggggatgatgcgtttctcttacgtaatcaacctttatctaggtgtcagacgttgtagcataatccaacaaatgtgaacggacgtcaagaaaagcaagcagtgacagaagagaaaagacatcggcatttacaagcaggctcgaagaaaatagggatgtacaacgaacagaggaagaagaaagaaagttaatgggtacatatgaaagagcagaatggtcgagaatacattacaaggctttagaagagatggacggaaagagtgataaaagaaacaagagaaatccctagtacgcctccaggaaacaggtagaggggaacagggaaagatgcattgaaggaatagaaagagtaaggacgatctctacaggtctcgcttaccgtccctaccaccggggggtacataaggtgggcagaggatcttgtcgaactttgggtagggcagcttggcagagtcgctaacgaacttttcgataaagatctgtaagttccgtcgcctgaaagcgtcaagctccgcttctctcttgtttgcttccttagaccggagcgactggagtttccgttcttccttcgacggcctgggagcgatttttttgaggcctttgcgggagggataaagtgagcctggccatccgtgatgaacggtaggtgatttagtgatagtctctggagacaagctcaaaacaggactgcccgctgacgaccctaatgaggagtaccatctgcaagccatgctcattgaaggtctgtacaaacacggatgcatgtgggtgtgagtatgataaacaaacaagacagagaaggatacacacaaggcagaagggcgaaagattaatataaaaaagcactgctcatacctgatggaccgagagatcactctgctagtttgctgagctcgttgcataggagtcaatgtggaaagaattgagggaacagctggaagatcagtgatagaatgggagatgattggtgagaaagagatgagagattagagactgcttgatgaagagagcaggcgaaggggttgctgacaaagcaaatagacacttgactaaattaggaacgttcgtcgaacacagggtttggctacatgaaccaaagcggtgcacaatatcacaaagcggtgcgataacaaggctcatcctcccacagcacgtgaaccgtaaccctcccgtgtgtggtctcagtgtttccccgggggagctttcgttcaatcaccctcacttatcaccttgaccatcctcgtcttcatccctcttctacctcgcttctctctgggttgatctcttctaggttctgtcttcgctctctctttaataccgagatcattccgtggaggacaatcccgcgtccactcaaaatggctccaagaaagatgctgctgctcgtcctgctgtcctcgggcatgacctcacttctcttgttctcgttctttcaaccaccaccgctccctctcccagagttcatgtccatgaatgcaagcccttggctcgagtttggaccagatgaacagtgtgtaagtctctttgtgtttcgttttcccgtctctttcctcgtttttggtccatacttgcccatgttctctccctcgtcccgctcggtcgcgtccgtgtttatgagcctatctctctgtttccttctgttctcatcacgatttttactgatcgtgtcctctatgatctgacaatcatcttctacttttgctctgaccgtgattgactctctctgtcgctccttttcctcggtatattctcctattctcatccgcagctgtttgtgtctccattatcggaattgactagcgcagaacggcaagccgcagagtctttgttgccatcaatcgattcagcctttgaatcacccaatggccttctctccttccgaccaacggctggtaacgcttcggtcgtcggtgaaccttcagctgataaaactgtgcatccggtattaggtctcctggcacagggcgaacgcagatggaaaaacatgatcgataaacagagtagaacgcttggagaggctgtcgaagaatacaagaagcggatgggaagacaaccccccaaaggcttcgatcactgggttagtctatcgtccttgttctccttttctgtttgattgtccttttcttggtatattgatcgctgctccttggatccgacatctcatctgcctcctggtaactagtgggcgtttgcaaccgccaaccaggtacttttcccagacgaggtaaacagattatcttttttttcctttactcttctcaattgatctcctctcttactgatctaccgattgtctcatctttctactcctgttcttgtctttttaaaagtacgacccaatcatgaattccctccttcccttttatgcgcttcctccggacgagatcgctcagcgcgtcactgaagcagaatccatcccagagaccttcactctcattgtcaaagaaggcggtaaagtcgtccttcaatggaacgaccaatattccagagacatttggtggtcagtttcactttctttctccgtttcttcttagccttccgtctgatctctctgacggatagaatctcaaacgtctgtctcccaggaatgcaaggacaagagcagatcatcagataaacctcatggagcctttcctggataaattgggcgagatgcggtacgtctgttgtttcctcattctgctttgttccgcttcgcccttccttggacgactaaccacgtttcttgatcaacagagtcacgttctcgatacacgatcaaccgttcatggttcttccttatgagcgtcgtcaggagctcgaaggcttggcaaaagggcgtgttggttcatgtgtgtgcttcttttactctcggttcttgccttcatgaaccatctcgtctcatcatacaaggggcctgcttccgtttgctcagatacttcccatctcatcgacgaagatattcatacggccgactggatcaatgcctgccctccagactcaccagcaagaaccggcaccgaggcattgttcatcggcgaagagaacggcaaggagaaagattcagttcgattcgtcgtaaatcatgagagcgcgatgaacccttgttcaaatccctcggtaggttcaatcttgtttcccaccttcttcttcttctcttgtgcaaatctcttgatctgacatacaatgcctctctctctctgaacagcttcttcaatcgcacattcactttttgacccctcagacagagtccacaaagccaaaaccacattctcggttactccctattctcagtctctctcgaacagaggtcaacgcagatattccggtcgctcctgttgggatcgtcagtggtggtttgaccagacaggacgtcggaaaggagatggatggtggctggcctgctcaaagcccaaagctttattgggtgtgttcgactttaccttccctctaacaatgtgacgcatagcaacgtcaattctaattgtattccaacccgaatttccctcttgtcagcgaggcgctccgacagcaaatccaaaagtcccgatatctccatcgatattcgccaactcgcatcgaacaagacttgcttcactcgcacaaggaaactctagtcgctcggaagaggagcacatgttgatgattccttccggagcgagagatggttcagtcgaggtgcagtctatcaaaggagatatcctagctcaaaagtttttggatgtacagttgcaaggatcttggacttgcgagggtatgccctgcttcttctttcttctttccctattcttcagttcaaagttggagctaagagaaagttactatcaaattctgaaaattctgaaaatcttgggaaacagatgagaacgatgagcaatgcaacaaacttaagtaagcactcttctttaaggtgtaccgtcatctcgccttcgctgacttccgtgtgctttccttttttttcttcttttttttaaaaaaaaa

SEQ ID NO: 1340 - DNA, 12256 bp, Xanthophyllomyces dendrorhous
aaaaaaaaaaaaaaaagggatgagttctctggaaagccttacgacccgtacgaacgttcaaatgagtttaaatacgtccttgatctcgatggaaactcttggtccaagcgattccctaagctcatggccgccagaaagtatgtccctgttgttttctttttgttactcttcactatagatcgcgcgttcagattggacggtttactaaaaaaaaattgctgatgttttcctatctaatcactttgcttaaatcagcttgattatcaaggccggtgtatttccagaatggaatatggcgactttacccccttggttcgcatacgtacccgccaacgtacgtccaattttcttctcgctttcttctgttcctcctccgttcgcgtccaagatagttgaaagctgaaatacatcgatgtcggtttgaactggttgttcaggttgatttctcggatctgtacaccatcctagcgttgtacgtccccctcttctctccaccctcactcttcgactttcactctcacttctttccggggttctacatctttcgtgattgaaaattcgctaactttctcgtcattatggatgatagcttcagaggatcaccgtcgagtacgaaagggatgcatgacagagtagctcatcggattgcatcaaatggccaatgttgggtggaacgaacgtggaggatacaggatatgcaggcttatgctttcaggcttttgttggagtttgagagagctgtcagtccagatcgggataccggaaagatggttcgttctctgtattcctttcatgatgtatccgttcgcgtggtggatacctgttgactctgctcttctatggcgatcgatgatggtccacaggactttcactacacacctcgctcatcagggaagaaagttccggtgcctgaggagtgaggggtgatttaaacactcatttaacatctgtgattttagaccagagtccggtcacctcctctggtcctcacccattctttatatttatccagttataaatttgtatgattatttggtgttggtgtattgtcgagtgagagatgtcaggcaggggttaatgatgagaagccagtcgaaggaacggagagttgtagaaagttccgtctaatctcatcactttctttgacaactcgtttcctagacctttcgttcttttctttttcttgtacatattcgtcttctactttcatgttcctgttcttgatccgctcttagatacctctcgcagttctatttctttcttcattcttttcatcatttctatttctgcttctcatctttctttgctcttcatgtcgtctcatttacttttcactcctttcccctcccccctcttctttctttcgagcatttagttattcaaattcgcatggggttttgaaccttttctcacttgccccgctcgccttggcttgctcacgctcacgcgcacattcacgttgagaacaagtcgattgcccacattcattttgacctaaaaacgcttgacacgaatcctagtctgataaagtcattgaacatgatccctctttaccctttcgtgttctctttttatttattacatgaagtcgagaaccccttcaagcaagcttcttgatggccctctcgagtacctcgagatctcgcttgatactacctccgatggccttaacttctaccaacgagtcagctccttcaaggacgaactccttcctaacgtgtcctacctcttctgacactctctccacctgcgctttgctcaaacctgtctctgcagaagccaccgcagacgacgatgaccgcttgagaatctctattgctgttctcaagaactgggcgatcggttcgactcgggtctcgagcgagaccgatcgggactgaccgctcagcccggtggtgggctctaacaaagctcttctggttgccccgtcaaggttctcgcaaacagaggagacgacatcgagcacggttttcttggcgaggatgtagtctggttgagttttgaccagatcaagtagtgcttccaagtatacgatggctggtcctaacggtttgaaatccgcttcgctcccagatcgagatcggagagcaaacatcgctcggtaaagttgtcgagcgacggcaaacttgatgactttttggaagagcgtagtgtttggaccggaaacgttgaaaggcgctcgtctagcggtcacagttcggacaacgaggtcgaaagactctttgaacaagaccggccggttgatcttcaaggcgatctgtcggaaccggtcggccaggtagagcatctccagttgttggtaaaacatttggtccttgtggaactcgaccgtcttttcgaccgcgtgcaagaggttggatggctcggcgatctcgtttgtggtggtggcattggacaaacctgtaggacgagtcgagtcgaacatgtccgattcttttttgagtgttgctcgtcgtttcttgatcgtcccgttcatccagcttaggaacgatcgatgatcgttctccagagtgagcatcttgttcttccgagcttccgacacatcctgttgactctcctcgagtgacatctcgagttccttcagttgtttcatcgatgacctcaactctgcctccaacatttgggtctcttcaacagctgaggaaactccatcagcaatcaacaccttcaaccgatcggcaatctcgttcgctcgttcttgaatcggtcgaatctgagcagacgaagcctgtttcatagctgccaattcggcatcaaagtgtcggttccaggatttcttgttgtagtcgatgttgtactcgttcgaaaagtacactggatcgaacgcaggtatcgtcttgagttgcttcaagatcaatcggtatactctcatcgcatccttcaacgtgccttctgtatttgaacgaatcgccttggtcgaagtcgaccgatggatcatattgggaaacactttatcgtccccatcggtttgaatctgcttggcgatcgcgatcagtgagtcgtcttttgtgccgacggtctcgttctcgtaccttccgatgaatgtcctcaaaacgttcatgaccgcttcgtcgtcaagttcaaacttgttcttcaccattcggtcaaaatatgcctggaatcctcccgccggcaggttcgtgttgttgagtttgaattcggcgtaccgagggatcgagcgagacgaccgacccgtagactgaagttgttgagcagtctcccacggaagagcaagaggcatctgacggggcgcgggcacatttcgagaaggaggaaacggaagagagttcgttatcgaccgggagtgtgatcgaactgaaatgttcggtcgggcgtgtgtagccaggactgccatatgaatcgtgtacggaaattgaacgtgcaagaggagaataaagagaggacgaatgtatacgaccaggaggaagaaagaggtcggtcaggatccgaaacgaacccaaaaaaaaaagaaaaaaaccacccgatgcgttctggaattatgaacttacgtctggacgacattctttctaacgagataagcttctaacaggcagataaaaccttcggccaagaactaccaggattgatggaacgtatgaggatagaacgaaagagtgacgagcgagaagagagaaggagtaaaagtcaatcgtgtgcgtacggaaacgaaggagcgaagggccgtctgagcgtgacaacgaaaaagactatgaaaatgttgaggatccattacgaaacttcctattgcgttttctagcttgttttctgtgtgttcttccctcatctatatctctacactacatgtgattcactattcaatctggaacatcaaaccatctatctctatcaacgacctctaaatctatttagatccaacaggcttggcgcccttcgcagctatcagcgcatcagcagcggccgaggctgctttggcttcctcctctccctcgtatccctgctcgggttgaacgagagttgaagaatagatcgtcagcaagtgtttgatttctaagtaaaccgtgctgagaaatatgagccaagacttgtaaaacgaacctcgacaatcatatcgttcagtccgagttcctcgttctggtcaaagtctcgatcatagtcctcgaacgacatgtttgggtcagcatcgggagcatctaaagtgatgatcgtgatgaaaagaggatactagtcagtctatgaaatagaaagaggtttgaagacctttgaaacagacttacaagtattctgcaagtaggaatttgctaacggatcgtcgagaatcaatgtgaaaggtctgcttgcattcatgacctgattgtcattaaaataagaaaaaacgtcagcttgcgttcagcctactccggcttttctggatcgttcttccacgaaacgacttacccccttaaggtcctgcaagaacttttcaaaccctcccatctgaatttcctcgcctcctccagctcctccacccttcaaggagtttcctcctcctccgctagcaaagaccttggtgcttaactcttcgtacacctgggtcaagataccttcaagagtggtgaaccttcctccaagtgttccgggttgaagcacaagctcgatctcggggatttcaagaccacaagtctcagacttaagaaaaacaggaagaaaaaaaaggaaagatcaatcgataagtggagctaggtggctatagagaggatgtcggctcgagactagactaaagcgcaccttgagaagatctcgggagagatcctcggcgtcctctactttaagaatgatacgttttccttgggcagatacggctcctccagacttgacctcgttgtctttgtatccacaagagtggcagttggtcgacatgatgatgatatcctaaaagaccatagatgtatgcgcgtgaagacaacgttcggtgttcagcgtcttcgttcaaccctcatatgaaagataagagcgtagaagatccttacctggaaataaggaatgttaaccttcttcatcagcgtgtccaacgggtttttgcacgaatggcaatcactcgggaagctgaacacctcttcgttttggaactttccggcacccttgtcaacatattcttccccattctcaccttcctctttgacggtctccatctgctgatcatcagcctgctcttctggtgctgccaacccgattgaaacatcctgctctcttgttcggtcgtacgttcggaatgtccacttgggatccgaaggcgaacccaagaactggatgaaggagtttccagcaggatcgtccaaggtgatcgtgaacggcataaacggtttctcgccgacagctccggatgaagtaaagtcctgttcgcccgtttttcgtcgcttgacgtcgtccctaccaggcaactcgtccccctcctcatgtccgtccttgtactttccgtcccagcccatctcttcctcatctcctccttccagcacgccattcaacttggtgacgagctcttcgatcttctcgtacgtctcagggtcggtaatctttcggaccggctggtcgagagccaagtctcgcgcggtatcccggatgattccctcaacgttagtgagctgacctcggctggaaggaatcgttaattggaactgaggaatatggatggagcaggtaggcgacttgacgacctgtcggtcaaagtcttctcgagatctgatatgagcggtgtagatagatcctcgttctagcgatatcaatatatagtcagcaagtctaaatgatgacctagggagaaaaacgtatcggagaggatgcgaaccttggatttcaccagcactttgaatctcagtgttgttttctccacaatgctcgcatcggaaggacatgacgacgacttctcggaagaagggaatcgaggtcaacagcagtcgggtggttccctagagacgatcgaaaagatatcggagtttagtatctatttggctcttttgtcaccacgacggtgtaggatggaacaaaaacggaagctgacaaacattcttataacagctcatgcataaactctcgatctcctgaacggctctctcctcctcctcctggtcaactgcattctcgacattgctctcttgaatgttatcggtatcagccgcaaccgaaccgatggtaggaaagaagctagacggaatcagaaaagaaaaaagaacagagaacggttcagtttgacgtcgctccaaaatcccttggtaagtcaagaatgaggatcttcttacggatcttgaggttttgaagacattgctaatgatgatttagtctgacgagctctgcaagatgatggatcgataggaggagaatagtaaaacgacaaaatgttgcccgcccaaaagatttgggggtgactaaccggaaccccggttggctttgtcatgatgtctctctctgtgagaacgactggtctgacaaaggtcgcacggagaacaggacatacagaaaggacacgagaggacacgaagaaagcccatgaatcaaagaacagaaaagcctatacaatcccaaaacaatgtctctctcttgcccttcaccaaacttgctctacagacgcgtcattataagtcaatctcaaagtttcctatagttcctcccgaagtttgctatgtcctaatggctctctctctccgttcactaacgacgagggaaacgatgcgattggagcagcgttctcgaaaaacaagtccttgaggaaggcctggtaagacggtcgatcaagtgagttcaaagccaccttcttgtccgtgttgatatcttcaatcagggcctctgttatagagggaagaaagagtaaaggtcggaccagataaatacaggcgctgcatttcctcgacttgagaaagagaggatcaattccaaacgaacccttcgacacatagtttaattcgggacggatatatcccaagacgacgaccaaaatctcgtgagagtagaaatcgctggcatactaatcatccagtaacaaacgaagctgtgaatctaactgaatgagccagataaaagacgctcttaacatacctcatgcataacatgaacctcctggaagacgcaagaaatgtcggtcagtctcagatcccaggatacgcgaggaaacgcgattcccctttgataagcaggatggagcaagagcagagagctgccaacttacagcagtcagcctttcgttcttgtagtacgggttccatcctacgctcatcaccatcggatgaatcttcaaatcctgatcctctaactttgttgacggggtatccaatcctgactgagacgctccgtgggaaggctgaggaagcacgcgggcatagccgtaataaacgccccgtaaagaaatcgaagcaatcgaggcaatcgagtgatccggcaggttggctgaagagtgaaccgtcggcgtgaaacggaaggaaagagaagtatgcaagacagggtaacagaaagagaaacaaattgatagtaagcaggtgcaatcagtcgggttcgatgtagccaaatcagagtccctccgaaatgaacggaagatcaaggggatttacaatacacgatggtgaactaagaaggaaacgaaacgaaaaaagagagagagaataaagaaggatgacgaagtgacatcgactcaccagtaggaattcctagctctttgcttcctctaccaaaccctttctggacagctccttggatgtaaagtgggaacggttcggacggtggttctaaaccgacgatctgaggtctgtccgctcgtgagatcggggcgagttcggccatagtcaagttggatgatggagcagtagtatctgacatattaggcttatgtacgtatgtgagagtgggcgttagtgtatgtctttgtacgaaactctatgtggttctggatctgatgatgatgaggaaggatggtcggtggaggcagaaggttacgacccaaaagtgaccaacttttttttccctctgattgctcatcgccatcgatcaccatcttgtccatccccggtcggtcgtacaccccagtcggccatcgcgatacgtttctcagtattggatactcatgctctcatacagaccgctggcgttcgcttccaacctctcggtgaagaatcatctcgttctggcggcgttgcttcggctcgtcttctttgccttccttcccggctttgttctggccttcctcggcagtcgacccgaattatcgacacccctgacatcattcagacgatgcaagtgtttccttctctttcttcctgtttcttagactcatattcggcctgtcatcatgttctaacttcatctggtgacgacaatacttctggaatatatgtctcttttgttgacagaagtgagagaaggcttgtttctctgggcttccggtcaagatccttatgatggaggtgttttcaaccatgtgggttcatcttctcgtctctatcgtcattgaccttctctactgcattaagactgatagtttgtcatatagtctcccatttacctatacttgttctcaacatgcgcttcatttcccgcattcacctcgctctatttcatagcagctgacgtctcggtagcttgggcgctctccagtatatggcgcatccgctctagctcgaccacaacatcatcagaaagaagaaatcaaaactggagcgctgtcatcagtttcctgttcgtattctcttcgatcgttctctctgtgatcgttctctctgtcttgccaaaccaggtgaaattgacggaagcaatcctggtgaccatttttcttggtggacatgccgatatagatacttgtggaacccacatacgttgttgatgtgtctcgccaaatctacagccgccatcgataacgccctggttgttctttctatctactatgctgtagtccgttagtatgggtctttgctgttcagaaagcgcaagaaggcagatcacttttgggtactaaactcacctgattgcgtttcttaatgcctgtgatcgcctgtcgatttttagaccgcccaacagcgtctcttttgttcctagcactgtccaccttgacctctgtctatccggctcttcttcttccattcattgtcatgattctccttgactcgaccccagtgcttcgactaaaaacggaccaacatcgaaccagcaggacggtcaggcgatcaatcaagctgataacaacatatgcgctcctgttgacaggggtgagcgcggccttgcgaggtataacaggaagctgggaaagtgttatgaaaggtccttcgataatgtaagctgttcgctccgtttggtcgtgtttatatcttgttatctatactcgttcagcggacacggagaatttacctttttgtgacaaattgtgttcgaatatagactgggtattaaagatttgactcctaatgttggattgtcatggtgtgagctccttgtcctgaatactctctgaatatgttccatcagattggcttgagtctctacttaacaattcgatgtctcctctactcttcatccgactgtcttgtttgcgcagacttcttcaccgaaatgtttgatcatttccgtccattcttcaccatggtctttcaggcacaccttgccatctatgtcgccccgctagctttcgcatttcagtacgtgcttcgccttgttctcatatctcttttatatttctcatcatttgtcgatgttgaatccttgcttgcgctttcaacatgtacttttacccggccttacaatgactcagctccgaccctctgttcggcctcttgtgccagagtttcttgatatccactctcaagacatatccaacagtaggcgacactgcgctcagcgcatcgttcctgcctctctttccggcaatctttcctcgtgagtctcttcatgcacacagtcctcgtcctcgtatgctcttgctctcttgttcgcgttctttctggttcttgtttttttcctccttgttataccttcttgctcatcatccattgaacttgccactgtgcttactttactaggcatctcctactccgtcgtcatcattggcctccatgtctattcctccgttctcttcccgctacttgatttcctgtggctccacgccggctcggccaacgcgaactttttctacgcagccggtctggtgtacggtctggggaacgtcctcctctccgtaggtgtcatctgggccggtcggacggttgaattcgagcagtccagagggatcatggataagtcaagatggaaggtcattcaagttgtcgattagaattcatatgatacttcgatctaaaacaggctttcgatcaggatcggtccgttactcgggcaaatgggaaatgactgtgttcatacaatatagcaaatagagtggcagattgagttgagaaggggagttgaaaagagagatttcagttgttctcttgtagtctacatgtggcaacgaaatgtacaaagagagagtgaaagacagaagagaaaaggaaagatctctctaagaagaaaatctattagagacagtatgccaaagatgaagtaggaaatgaatcctaaagagaagggaagagaaaaaagcagattggatgatattcaaagacaaagaagagaagagcatgcactagagtatctaaacaaaatttaattagaaccgtctattgacaccaactctaaagttaatcagactctgaggcgattgatagaccaagaaccagatcttcttgtactcatacaagaaccaaactttctgcagctgtttgttcctaggtggaggagtagcggataggtcctgactcgtgaagaaatcattgtcgtaatgcttgtatatcgagcaaacccgtccgaccggatgagctaggtctcttccatccatcatgtgttctgaatttgtcatttatagtggtagagaagagaaccgttcagcgtgattgatttctctcgacagacccgaaagaagaggaagaaaacagaccgaagagttctagaagcccatttgtcgcatcggaccggtttgatacgtccgtcgggttgatcgctctcacaccctcctccctgaatgttgatcggctgactaaagccccccaaaacctgcttgatgcgtcgagcttccaatatgtttccggcgggtccgagggaacctttcggaagaggagcggagagagctcagcgtctgtctgggcggagtcttgttcggcttcggttaaggctgctctccatttgaccaaagcgtcctcccatactttgacagcatcggtggaccgttttatgtaaacctgtacagttgggttttcgtggatcggtagataagagaaagaattagataaaatagagccacaaaatagccaatgacggcaatggttgagaaggcttaaattggaagaaggcaagaaacttcgaatgaagacaagaagactgacctttttctcgtcatatggaagctcctcccatgctttcgccataaacactgccatgctaccttgcggccgttcctgcaaaggtatcagatgaagctggctcagacgttccttggcaaaagtcgtgaatgctgtatccctgggtctcttccggatgtctggaagccagtccagcgatacaacatggacaatagcatttggattcagcaggccgatccaacttctacaatgcagaccatgggaaagatgacaagaacgagaatctatgtgatggagatgatcaagatcttcttacctatgggacccggaagtttggcaacccccttgtttcgctgacttgcataaaactcctccagagctctaccacaatcaacgtagaataagacgagttcatagatcacggtaatggtttgagacacaacataaagcaaagaaacaggagagagttattgtgggtttagtacggatcctttgtcctcttaggagatggatagggaggttgtatgtgcccaagaagacttcgaaaatcaacatactgagatcgaggtttcttaaccgggcaggtacgaggcggtgccttgggcttgaacaagcggaaagaagagagagaaaacctgggagggtatggcatggagacggagatgaatgaaacccaagaaggagagaagtgaaagacgggagagacctatccgttatatggaagcaacagaagatacgtgagaggtaagaagaaataaaggccgagaaacgagatgatggaagaagatctgatgtacttcctaatcactatcaaagaatatcgggatcaacctcattgcgcgaattcttggctcattctctataattctaacagagatattgaccatgtctactgc

SEQ ID NO: 1341 - DNA, 3800 bp, Xanthophyllomyces dendrorhous
cgaacgtttctatcgccagacaggatatggaatagtagaaaaagaaaaagaaaaaaaggaatataatataaagaaaagatagattatctccatgtcgtagatggaaccccattgagaccctctccgtgccaactagcctgctctctgtcgtcactcagtactcttgcgtactctaggagaagtagaagcatatagctctgcatgtcttcccattgccattgctccttcacaaactgtctaccggcagcagcaattttcttggccgcctccggccgagttttgaagaaggtcatgatgtcaatcagatccgagctattatcgacagcggcaagagagatagaaacggacagatatcagcctgatcggtaatattgtgatgattaagtaaaaatagaaaaacgaaggtagaaggcaagacttactacgagttttgtaaggggacatagtggtaccacggaataaccacactattgttttgtgcaaccccgatcaactcaattagtcagagatacatattcctacgcctcaagtaaagccgcaggcgatgacttactcagaataccactacaatcaataaaaagcagaccaagtaagaagaggaagaatccagaaagaattcatactcgagtcagatgggacagaaaactggatggatatgaagaactcgagacaaacctctgaatagactgtggacttgagcacgaccgcgccatacaagagggttcgtctgaacctggacgaccatccattgccgtccacatcgataacgtatttatacatgaggtgccaattgacactcgatgcccaacttactcgaggggcaaacttgatctcctttgcaatcacgtcgcaggttccgtctctacatatacccagccccaattttgatttgacaatcgacatgataatcgatgcaagtccataggtcaatacggatcatacgaggacatgctgattgcgtccaacgaacccggtcgcccgcatagcagatatgccaggaagaaagcaaggacttacgtggctgagcattgtacaggaccgtcaacaaggccaatatcgaataaatcttctgcgacgctgaccaggttatgatccttaggcatccacttttttgtttttgggtccaactcaagaacagaaaccttctctgtcgaattgctgggtggattagcaaagtggtgcagtcggatccgttgacccgatcgccaatcgactttggcatcagcgtaagaacctataagaatccaatcaaacgatgagaacacccaagatagtcgcgtcagatctcttgggatgcaggtatctctgttatgttcaatgggccttaccggtcatcagaccccgccagaatgctttttcaatcgtcttttcctcccatggaacgtcttctacctcatgtttagttgcttccgtcggtatggcaggaatatcggtgttccaaatagtctatcataagcaacggacgtcaggacctgctattgggaaacgttttgggcgataattcgttgcgtcgtcacttactttgcacgtcgagaatataggagttaggacgctctaggtttttgagaatcccaaacccggttccaatctcgttttgtcagcccagagatcccgttcagcattaaaattcagatgacagaagaagatgctcacaggcgcaagacgagagccgatgaataagctatgcgcatccaataattccggagattcgcaatagtctatagcctgggtccaaggatgaaacgatatatgctgtacatgagtgcgatggtcgaaaacacagtgttcatgttgattagatgactcttaaacgtaccttcataaagtctgcaacaaatgatctgttccgatggaggtctgaaacggcgtctgatagattatcattattctctatcagtagattgccctcaactcgatgccatctaggaaaaatttattaagacagggaaacttattcaatgctttccatcgatggtgagactgaccagattttacttcgtgtggtgttaagatgatgtccgtggtcccctggagggaacgggcgttttgcttgcagggggacaaccatgaatttgccctagcgacctgaccctcctcgtgtcgtactcgatcatcttcaggccacactgtttgcacattgcccgcagtttggtaagtagggaaggacttaagtacatacaacgacgctgatgaaaaccccgaagcctagacataatcagaactaacgttctcctctagaagcataataggtggtgcggtcgatgacttcgcgcgaagcgatatagaaaggcgagtcgttgatgttgaagaagatttccatagaaggaagtaggtgcgcaattggattgatcagatccgtcaagtctctgcactcgtatgaaaatcgcagacgatgcaggtgagtcttcattctacggtattctctctaaatagactccaggtttgtgtattcactaaccgaggtcgctcgccatcaagcccagaacctttgagtgcagtcaccttgccgtttcttcggcaggaaagaccccgatcagctattgagaagattccaaagaagagcgctcagaaagctacatactgaagcttcatagaaaaaatcgtctgggcaacatcaactctggaaagtcgttctctgaggacctctcctttataggccaagaacggaagcatagagtcgtgggctgcttgataaaggtgaggagtgactttggaaggaaatgccgagaaccttatgagaagaaagcaaggaaggttatgcacaagacgaaagaacaaacgtcagccctaagtatctctgagtgtacgatgcctcgagcgagcagacgaaaggtcaccaagcgtgcgcaccatagatcaaatccttttggaggattcttgtggtattttgatcgataggcagcgacggcttgttccaaagaagtcaacctgttttccttcatctgttgtactttgaggtttgcactctgtgaatgcatgttacatttgtgcatgcaagatgaccagcatcagtaaagagtgagacacgtagatgagcatcaatcaaacaaataagcttacctcgatcaacacttcgataggatgcctgtccatgcccgttgactcgtgcaaatcccttgatataagtaatccagagtcggctatccacttgggatcccatgttggtgatggaagctgcgagttcttctctccgatgccgggctgggtggacgccgctaggtgatcggtcgagcccgaaggatttcgaacgatatttatcttatatgatcgatagaacatccaaatgattgcagataagatgagaaaactgctgagctgccttctccgaggaaaccgtagaaagatgagacgaggaggaagagaagcgaggttctgtcctccaagtgtacgcgaattaaatgccatgtcgagcttatgcaagagcagagatataagggaaggtttggccagacgttgcgttggttccctttcctccctatgtcgaagaagaggcaatgagaatcgacaaaagaagcagacgagaactaaacaagcaaaggaagcaatgcaagatgatgtatgagttgaacgtggttgaacccgtctagccagctcggttcaaaaaaggattgaagaatacctaccgagtaggctgcgtttaacgggtaaaggtctatcgctcagtctagatgagctcggtccataatgaagcgcagtaatcaaataatgttcttttcatgaaatctctatcacagcggctgttctatatcgctttctatcgccatcttgtggtggacgatcactgatgtattatgttgtgt

SEQ ID NO: 1342 - DNA, 6268 bp, Xanthophyllomyces dendrorhous
ctgatgtattatgttgtgtcaaagtttcggaactagaaacacttgtatcaagatagattccaggcatatgggtttctgtatatctttcctttctccttttgtcgcagaccggccaacaccctgacggtttcgacattccgcactttctcttttatcgccttgccagtcccatcgtctcttatggtggttcgcgaggagcatggcagtgagagatgacgcggttgaccgtcgttgttctcttggaggatattggaattctttctcagcgcgtttattaagcatatacaatggctagcatcgagaccgttaggcgtctgtttcggattgatgaactatgacgaccaaacatagtgagcagcaggtgtggatccagttgtaagacatgttcccaaaagatggttgattttggcaaggttcatcaaatatggaattttataagttgcgcggaaggttggacctgatagagacgaagcagtcgacaaaggaatgagcacagtgagcataactgatcgcaacctcagaataagaacccggcctatagaattgataagggatgtgaacaaacctgttcatcatggcaactttgtgcctctcatctacctgcttcagtactgaactcgttccatccagcactgccagcaactccatcgcgacccgcttatcaaagtcgattgctgatctcttgtcggcagcggccaatatccacttgattccccatcgagttcgctgacgctcggtcatcggtacgggaacgatcatgatctttgctcctttcttgatcgattttagtcgaatgaagggtgaagcagcgacgatagcggatttaaagatagggagaggtggagatttggtctgtcgatgactgtgcaagtaagaattcgatgcgtgaaacgtgtcgagcgagtatcatgaacgatgaggataacgatgtcagcatagatgaactctgaatagacctaagcggttgctccgactgacattgcttcgagaattttatggaagcttatgatagctctaagtcgatgaccgttcttcatgatcaagttgacaaaaaagtctgagagaggatccgatttctgagggatacttcttgttgggtatggaatcgtcttgtggacgtaatcttcggaggacggcaccgacacaggcgcctccaactcggcagagatctccttagcgaacggcggaaggggctggcgttgggtgtcccgggatccgagaaagtcgaagagggcttggccagcattatcagttgatgccagacggatctgcttgagagtggtaggaagaggggaagagcgacgaagcacctggcgagcaggttgccagatgaaggacatgatgggtagtatgaggggtttctgctaagatatttagatgctgagaataagacgatgactggatgcagataagttgaaaaggcgagtaagaacgagggatagtagaaggtggtgacgaggcgacaaaaaaaagacagtagaaaagttacaaagatgcacaatactcaagatcagtatcagcatctcctgatcaatcatgtatagaggtagtcaaggtgtggagagctctttaccttgaggtcacagatcaaaccttggagaaggttctttgatgggttgattgattgagttgacctggatgggattaactgagttgacggaactgggctcgctaccggcctgaatacttgcctggaaaaagcaaggcaagagaggccacaatacagatttccctaatgagccaggaaaattacactaggaggatctatagtcaaatggaccggctaatcaggattgataagggtgggtccaactgacttggtcatgcacctccttcggatcaacctaacagaaacaaaccaacattagaaagaggtcgaagctgggactgaaactcgagttaatagacaacagattgatatttcgcttgtttagtttcatctaagaggtaagtctaggtattggcagatgtgttctgagtcgagtcattccttttcagaaaacatcttgagacaccccatttcatcttacttgtcacaacttcccatcataatcgagcagagggatttcacccagatgttttgtcagcatgtacgcatcgaagattgacgcttatttatctcgatcttcagcgggcattgaaagcgagagacagtctaccgaaacagacatggaaggcgatgaaagaaagaagactttacattgttcagaaagtatgtgtcgattgttggggatctgtcttctctatatgcgcctctctgtactcttgtttgtgcaactaaaacgtcgtgttcgattctttcaatttctttcgaaatcatgtatgatcctcttattttactcttgtgcctggcgcatcaactcgatattctgacgcagatacattgaagattcaaaactgagaaaaggtgtacaagcgatacatatcggctgtcttcgcagtagaagggcatcggtcacaaatcactctcaactgtgtcacccatacggtttgctgagagatggacttacgaccatgtccttttataccaccactgtgctatgtgtgactagccccgtcaccggcgatatgccatcttgactcgaggaaacgaaaggaaaaaaagctctaaaaactcatgatcaacttacaagttaatccaaaaaaatgtttcccggtctcttcattgtactcgacagtctgtgttgggcgtgactctcggcgctcaagacatctcgctccgatctaaagacaggatggatcagcaacctggccgagtccagcgcggacgtgataacatacatggtatgatcgagaataaccctaacactgttagataaatcggttgatggcttatttggcaaacaatcccacacccgatcggtctttagccagtaattcattcctctcgtccttttcaacctatcgatcttcctgatatacgatgctcctcaaggccattggaagacccatccgactgtctctagtagggaaggcgtattctgtacttccttctttatcaacacttgtaagtcattctgacgtcgaggtgtccttgttggtatatgagtcctaacacttttgcttcacagacttccggcacgcttcaagaccccaaatcatccgtgctacatgtcggttccaagtctcaggcttccaaaaaagtatattataagataggggacaaagacgtttcaagagtaggaatgttcctctgccatctctgataaggctgtgaacgttgagttctgatttttaatcttgtttcgcatgacctgttagctcaattcctatcagctatatacattgtacaatcccattaaagactccaaaatccagtttgtcgatgaattgtcgtttggcttcaccaaacatgcttccaacgccaaatcctccaactttgaccgagatgcattggttgaaaccctttcgcaccagattgagaccaactcttccgcgctttctcctctacagctctcgtcttcattgaccaagaagtactctgattctatcctcaacctctccttgacggccactcgcagaatcaacaaactctggagtgttgaatcaaagtgctgggttcctctgtctcctccagacgatctctatcatcggatggataaatttgtgattggtgtggtcactgcttctgatctcatcaacggtctgaacaaagacaagcggtgtctacagaaggctgtcgaagagctcaaggctcactggatcaaccagcgggatttggttgagtctgatagctcactttccgataaacaattagattcttctaacggccagcccatagtggtgatatgcttggtcggatggggaccggccaagctgaagatgaaggcggacaaccaaatcgccgaggcgatggacttggaaaccgaaatcctcaaaacttccatccaagagggttgtctcatcagcgagggtcagtccaagagggcagcaacttctttcgatatcgattctattcctgacgtatttatttgactgatatgaatctattccttcattcgatgcagctatgaaccccaaagatgcttatgatctcatctggtccatgctgggtgatttcgctagaaaagtccaagtgtcagtacccatctatttgtactcttgatactctgatatctctcaaaccttacctcgcttttattcgcgcttcaacgatccttatcgatattagagacaacgaacggcagtccttcatacataccgatccggacctggtcgtcccgaaagggaagagtcaagaaaaggcatattctcttatgttgcagcaaattccatccatatcagcagccaacgtcaaggccatcacatcagcttacccaactctaagagttttgatggaggcgttgtcgacagaagcagggttcgaggtcccaaaggtacatcttttggttcccttggggtttcggtcgtttctgtcatactttccttatcatcgtccgctgatccttcttgccgatcgactcttcttctcgtttttaacaccaaagtttccaagcgaaaaagcagcgttgattcgtcgtgctttgacgacggaagacccgaatagcatcatagatgctcccaagtccaaagttcaggtagcttagcccgtgtcttgttgttgttgttgttattgtacatatcatttgattattaaaaaaaaccgaaatacaaaccagaacacctgtataggtataggacaaaactatatatagggaaagaagaattataaagatctctagggtgggacgataaagtcgatcaagcaaaagagatgttccatcccttttccctcgataactcggcccagtttatccaaattctaccgtggtcgtttcgctcccaaatctcttcgaccaactcgaacgcgttccggatattatcgattctgcaactgaacgatcaagggaaaagatagatgtagcacaagtttcacaccgtcagcggtcatcagcatacattaagaccaaaagaaggcacagaatgcaaagaaacgagttacgaacttgacgagcaaatcatcaaaatgaaccactatgttctcccggtcctcactagaaaggcaatcaatccccgtcaccgtacacggaaacaaaagtccactctctgctggtgtacccttgaccagtcgaatagcctccaacagatcagctacaagaacctggttagttagcgattgagcgttgctatgacattgtggttgtttttatttgatagaaagaacaggcgccgatcggttgtcagtttgagacaaaaccaaggttacacgaaatggtaggtgaaacatagagacttactttctccagacaacttgcttcaaatacagcttcgcagctaagacatagcatttgaacgcatcgtctagatatttatcgtcggccttgtgaagaggcttgcactcatctaacgaaacctccaaccttgaagcctggtatgacagatctctcagccgagccgctggattgtttcgcaaggggaatgatggcgggaggtcaaaggtcgatcggtaaacagccaaacgagatatctcgccgatgatctattattccaatcaacatctccgttagttggatcgcggagaaagaaagagataggcataaagggtagaatggagccttgcctcaaaaactggcatggaagatcccatatatgtattgagtttcccgcctaaaatctccgcatacgctcctgaatcgaagcatggaccttccaaacagaacgcgcttgactgtgcaactcaatccagacatacgatgggtcagcattcaaatacacacataaaccagaaacgaaggaccagatatagcgaaccataaactcgtgatagacatagttttgcattaaccattttcctggcccatctagacgagatatcattcctggctcatccagctgctcgacgacctttcgagctagcttcaacggagttgcccaagtcgatttcgatcccctacagatctgttgaacggcgccaacgatacaaaagctcaagttaaggagagaaagtcatggtggaacatgaacgagagacaacacacctcgattccacaaaggataaccaaacatgcgagaagagtctcgtcctccttacccagtgcctgactgtcttttgcggactgtttaggtttcaaacttcttgccttgagagcgcgttccacatgcgcgcatacctctctcgtggtttcgttagcaatgaactgccatggatggcctgtagtgctcaaatgggttgcactccaggcgatcagacttagatgctatcaaaatcgaccgcagcacatcgaaggtt

SEQ ID NO: 1343 - DNA, 47009 bp, Xanthophyllomyces dendrorhous
accaaatcgaatccattcccttctcctcggggaaaatagcgttgcatgccttcaggtggaagaacggataccacaggtgctagtttatgcataaagtagtcaaacaagatatgcgcctccttggcgacaatctataggatatgacaatcagattatcgagtcagtaagtcatgagtatagatgtgcagctacatacagcaaacgcgcgaaaaagattgacgccggtcttacagaaggtagctcaggaaaacgtatacccaacaatgaagacccaatttcgattgagttcttcattagcttcattctcttcctccactcccttctgtcatcgttttcgctcctcggacgcttttcgccagtttggtttgttgttgaaaggtcttcaatgaaagccctaggaggagacgtagacccgaaagagtgatccagggtttctacccaagccagtgttgctggagatagtcctggagacatgttcggtagataagaactaggaggagagaagaggccatttaaaaaatcgaaaggctgagtcgattgaatgacgccttgatcttgtaaaggtgggtaagcttgtgtctggattggaatttgggaaccatgagaaagatgcgtttgagagtgaatcccggaatgaggataataaggggaccgagatgattcggaagtctgagtgattggttgagagttgcattgattggatgtctgaacatctatcgaatcatcaagtggctggacaattggtgatagaaacgttagcggcggtgaaggtccataggttggaagaaagctggcttgtcgactatcgctggaagaatcaatagcatatccagctgatcctcggatgatgcctggctgatctgcgtaaggcaaaggaaagaacgatgaagttccgtcaaggattgactctgcgatcagtaatcacaaacgacacgaagcataagaatagactcgatctttttcagttttctacgactgaagctgtatatttaggaaactctaactgaccatcggttgtaccggattgccattgggggtccaccggaatgttaatcgagttttccttctcctttcctttcttcctgctcgtctggttttgatgaacatattcggatgcgccgccattcgtccatccagcaggtttctcatgaccatttgcaaaagttctgcttatcgtctcggtaccatcaacaggctgagagccaactgtattcacgtcatcggatgcaacgggagaagtagaggctttgagagatacaccaggcgcccaattaggcttcctaggctttcgttcgttcaattttcgattgggtaatttgacagtgacccattgaccagtttctggatctaacgtttgaggagggtactggcaggcctgtttcaagcgttgactgaatgcatcgtttgatagataaggcgaccgagaacagtatcgtagagaatgtcagacatacattctctttatccctacgattatcttggaggcttctcctgaaaggagagagatttaatccgatgaaggaaacaacatattaagacacaccaagacagacagataggcttctccaagtcgcatttcttctttcgggccctacagccatagcagccttctctgcttcgggcgattttcttattcttggaatcaactgtttcagcggccgtcgccagcacgaccgagtttacctgaggagtcgataaacccaagttcgccctatctacccgacaggagaacgaagatgacgatgaggaggaagatgaagacgaggccatggatgccatcggagacaagaggtgtccaagcagctcggcttaagatatcaggatggaaaaatggatggatggctgttagagaatcccggctgatatagcgccggttgaacccgacgcactatatgaatgacaaattacgaaaactacaccgacgagtctctcggtgaaataagccatgtatttgtcctgctcttcaactgcacatcaggtttgtttatcgtcatttttggcattggttgtacagatacatgagtaaattgtgcaaagtgaccaagtgaaacgagagagagagaagaatgacagtattcgagagataaaaaacagtggcgaaaaactaattcatgatgagcagctacactgaaatctgattagacgagaagacatataagatcgcagagatcgttccaaggggtcagaggagaggacaatagatgatcagaatctggactatccagtaatatgtagagtcaatctgaaactcacccgagcatgttttcagcccccaatccacagagtcttctttcttctttctcttccgtagaaagttgagcttcagcttcttcgtccgacacatcctcgcctccccaggatcggaaaggattgctggccatctgagaaagttgatagtcaaaacgttgttcgattagtctgggtcaatgagatacaagcgaaagcatcatcgactgacctccaaaatcctggcaagatctcgtctgcagccaacttctcccctctcacatttatcgattacctcctccaatatccattgcctcagaacgaacctcggattccactccttggtaccctttctttctccttcgcctactcgtgctgaatataactttagccaatcaaccaattctaccttggccgatcgttgatcgcaatgactagagcttgctagaagtttatccagcagaggagcatcggtggagaaagaagacaggttacccaggagagcaagcgatcggaagaaggaatggaaatcgagtgagtgccgctgaaggagagataacagagggttgatgaggtttaatttatcgcgatctgttggagaaggaatgccgagtcgctgtcgaagatttatttacatggacagctcgtttattaaaggttgtattctttgtgtatgcaagagtacagtaagaaaaaacaaaccttgcccatgatcaacagatacttttcctcatagactttccaaaattcatcctccagatcgttttcctttctgctggccagcgctttccaactatcaatggttgaattatccacctcgtcggcccaacctgcaggagcaagggcagaatgagattcttcgtagccgatcaacggtgaggtagctttgagaagtgcgctcatggcgtagaaaaccatttctggttgtgcctggtgagaatcaagtgaatcagtccatgagccatatggtattcattagcaaaagaagaagggcgcactcgataagaatatcgccccgagtcgtcagagtgatctgtataatgcagggtagatatagatatcagtcaaaacgtttcatatttggaaataagaatagaggatagataacagactgcagatatgatcgagattgaatttgtccataaaggcaaaaggtccatagtctatacagattcctaggacggagacattatcggtgttgataactattaagccacattatatggttatcaattggccggttcgaggttcattgatatttgaacaacaagaacagacgaacctccgtgcatgaatccccaagcctgccagccagcgaccatactagcgtttcttctagtgatttctctgaccatctcccacgtcgtcacctttggatcagatcctaatcggtctttaacaaccaaagtcagatctcgaagcagattccactcgtcaccagcatatgcggagtctcccatcaaggaaaacacaaattcattttcgggggggttaaggatttcaaatgagcctattcgaaggaacgttggagccaatcgagagacgatcgctcctttctcccagccatattctcgattgacgggcagatcagaaatcaaattgagggagagcgcgcgggaggtaggcagcgtggtttctggaaaggcagacgcatattcagaccccaaaactgaaacccccaatcaaaagactgtcagcaactatggaacggcagtttgttacaagtgggaaaagcatagtgtagcatacattctcgaatcgaagacctgagtacagctagtccgtcagctcgtcgactaaaaggtgttcttccggcacctttgatctgaatctcctggatttcaccagcagggttcacggtttccactgagcgcatcacacaaaagaaagaagggttgaaatgattaactattttcactacagatttacgagattggaggtaaacttacaaagagagatagctcgtccatcgcccaattggcctgcccactgtccgaactgtcttcctccactgtggaatgtcgagagattgagcgaggctcaaagatgttgtccaaaatagagagtatctgttacacttactatcttaacgaccatggatggtaactctcttccgtgtccgtttcgttcaaattcataatcacttccctgcctcccaatacgcctactagctcctcgcgcgccgagttcctcttctcttctacaccagtctccacttgtttgttgtaatcggctagcacgatgtgggcggcgtctcccgcgtccaaatggggaacaacctcgtccaggcatttctgactgaatccgagaagtaccaccggccattttctgttttcattagagtacagacccaatccatctttaccttcagaacttctctccagtggctcccgagacgttaaccacttctcgacatcctcagtcgtgtaagctttgtcctctgctccttccactcgcggtagacggtaaggaaatgatattggcaagggagttacgtatgagaggtgtccagattgaaaggttgttgttcgacgttgagtcgaagggttattcagcagaatgctgtggtagctaggctgactagatggacaagcggtcaaccttgtctgaatccgttgagagacaggtggcaaaggaagttgagatatagaggatgtcatgttggaagtccaacgagatagcattcgtacaggacaagacggaattggattatgaggacgttgatagaactagtgctggtcgtcgtcgtcgtcgttgatgtcatcattggggatctaggattgatacaaggtgaagtccgatcgcaaacaccatgtgtaaaaacaccgactgtacttaaccaaatttgtgaatatatcaataatcatatatcagatgcggtaaagcgcagcaagttgctagaggggcccttcaatcagaacccacctccgtgtgcttcaaccatcgcaccatcttccattgaaaccctgctgattcggtagtcatgcttccatttcgagctcttcgagcttcctctattaggatcccagccggccttctaaactctcagaaacgatacgttggtagcaactacgctccgctaaaccctcttggggattacgtaggcaaggggccagtcgttcccaagtgagatctaagctttggcctctatatgttggctgtatccgaattctattttgtgttggttgtatctgccttgtttcgtccggatcacgtctgacctctggttctgtcttgttgaaaatgaatccttttagcggaaaagaaccagatccgcaactgttcggttatccagagctgcccactgaatatacccagcgtatgtcttacacagttacccttgtctttaatcgtcgcatatagtgccattccttcactgagaacatgaatggaaatacatcggatgcatgtagtcagagatcctcgagctggatggtgggatcctcaggagcgacgaaactttggagaatttgtatgtggttgataacagtgttcgaatatatagaacatctctacatttgtcaatagaaattcttctgacctatctctcttcaaatccctcacaaatacattgaatagcttcaagaggaggatgaagttctaaacgtttggtctccagaggttaaccctcatcagagtccccgattcgccatctatactgtgagtcttcttccttttcagaccatactagatttgatgttgctgattgactgtactttgatctacagttcgcggggttctttggtttcctctatctttactaccagtatgcctgggctactttcgaataccctcccatggtggcccgagagtttccacatgtaaattccatcgtagctgtgttcttagattagattgaaggatcagcaaactaactgtatcatactcttcttcgttgacctacaggacggacttctgtctgccaacggagggcacaagaggaaccgatacaacgtttaccgaggaattgatgaggccgacgttttcgaaggctctcagagagaatactacttgggtcctaaggttgtagagcctaggaagtacggcgaccgagacgagtagatggaaggtgtacgaatacgtcagaaggcaggaaacggttgtatgttgatcatgttgtgttcttattgttttcttgtgtttcatgctagagcagcaaggcgagatgaaacgagatggaatgctgtttgctcggctttaatgacgacttgattcagactgtatcgttgtttgaccaactgacgaaggaccgggatctgctggattatctatcgatctggccatcgatctgcctgtcatgaacggccaggctgtttctcagacaaacagtatgctgtcacacaatatgctgtcaagaagcacattgctcatatatgaggctttcagctggtctcttcatatctcctcgcctttcactatcacctctcttactgttctcatcgattccattctctaaattgtttttagtaatggcacctaaacctaaggaaaagatagtatcagccaagggagacgacggtcagtttctactctgtttcgcttgttccttgtcgacttgagccattgatatctcctttttatatcgatggcacactgacaagtcttctggattatcttgtgaacatgacctgaatagctgagaaggttgaagcctctgtcctagtggtttttttttcttgttactcttttgttactgatgcaactctcatggttcttcttatacagatggtgctcgactacatgagacaggtacatcaccaacttcgttttcttgattcctttcaagatgcttttgactaatccctgagaccggttccataggtcaacagaccatacgcggcgagtgcgtaacgtctcccaagacatcacgacccttatgaacagcatcgtttactttgtagacactgacacgtctcgaaatttgttcttgctgcactaaacttgtagccgatatatcggccaacttgaagcaagcggtatcgaaagcggccgctcagaaagcgctactctcgctgagcgacaaaggtcttctccataagaaagaatatggtctgctctatttcaaacttccttggatagatgaatcatctaacgctcctgagctgactatatgtgaactcttgttggttgatggaatgaacgttcaggaaaacaaacgatctttgttatagaccaagtatctcatttttgccatccttgcacgatcatggttacatgcgctctctatgtctgacgcatatacccatttatcattaggactctcttcccgagacaacccctgaggcgatttctactcttcaagcagagatcagcgccttggatcctgttatagaagccgcgcgatcgacagtgaagaagttgacggaaggtgcgtctcgaactttgctctgtacccatgtgttcctgcaagacgttcttgtactcaagaacggctatatgtgtcgggtgtttcgttctcgttacacgtgtgggtgtgtacatgatctggacggattagagcttaatacattgaccgagtcgcctcgaacggttgacctgcctggcttgattgccagtcttgaagcagaggtatgctcaatgactttgtacatcaaacaccgcgctactcgctgtagcctatgtttgttcgttgctgaccatgtggtctcccgtttgtctctgttggtatgtccagaacgctatccaattatctaatctaaggtctctcgagtctggcgcccccccaatctcagctgagaaactagagcaggcggaactcgtgtggaagaaggagcgtgctcagtgggttcaaagaagaaagatctacaaagcgttagttcgctccgactttccgtttcctgacttgaatcgtgatatcaatctcttgagtttggattgactttcgttcattgtgtggccgtgtcgggcacagagtcatcgatcagcttactccggatatgaatgccgaagaaagagctgagtgggaagagggactcggaatcgagccgatgcctagcgtacgtaagcttgtactgtacagaaggtatctcaagagacactgacgtcttacgatgtttcctgttcatttgttaatgtttaccaggagtctcgaaaggtggaagaaagcaagctctgcgtcgttccttcagtggtcagggcgaagagacctagacaagggagtgatgcgtaacacttgatcctctcagacttattgaattaaaaccatcaagcacatgttacatgaatgagacaggtagagagcctgatggaaaatgtagatacaaaaagacaagatagaagtatgacgaccagaagaaagatacagctaacgttgcgagcgtttacaagcctttctgtgctcggtaggcctttgcagcagccttggtcagttccgtgaccttgtcctttcctgtgaagtcagaaccattcttggctcggaactcttgtaggaaaacaagccaggcattaactacaaagcaggtacatacacgatgtatagacaagatgagagcacaacaagagacatatagaaggaacagagcagcatcggtcagttcctcgcccctaatatttgagaatggtacaaaacataccagcaataggggtccgcgcgtactttcggaggggcagcagcgatttatcttgcttcaaagcctccttgaacgccgtcttgtcagcctcggttaaaccggccgaccaagcctcgatttccttctgccacgtggccttagcgtcattgtagactttgttatctttatcaaaggcctccttgtatgactgaaatttcgaagcaagcgagggtaaagaatgaagaagagatattgaacgagtgaccaggtcagtagagcttctgagcaccgagaggatgagtgagtgttggatggtacgatccacagagaagacagagaccaaaatagagataaaatgaagcaaaacaaaggaggaaacaaaggaggatgcacataaggatacacaaacctgtttgtccgtttcagtcaactgtttccagccttcagcagctgccgcaagagatcgtttggccgactctgttccttcgacgatggcatcctttccggcggcgaagtacgactgaatgtatcggttgtaggcatttgttggcctcttcggctgatttttcatcgctttaagatgagttgagccaagagagaaaaagaacatgacaatgacaaaagcaggtgggaatggagatggattagccatgagacgtgcctagtctggtcgtcgattgaaccacatcgaaagattacagcagacaagactgaacggaagccagaccagcatctatacttacgagacacataggtgttagccaaattctggatcgttttggtaacagtcgacttgggaggcatttttgatgatgttatagagaaaggacaagggtttatagagatggatggattcgatacaagaaggaagttgacacacgtatgttgtgatgtatctctgattaagagacccagcacgcgtcgcggaggcgaaaggttaaccctaactatattatatatgaaaagaaggataaccgtctgctgaccaaggctcaatctgtttttgatattccaagcaacttaagtctagcttatagctacacaaccgattggcacaagcagccgtaaccatgtaatgatctacagctttaattagtatcccacgtgcctctgtcaacagtgaccccatctaccaagccggggtatcaccggctgcacagagtggccaagcatagttgttccccagatcttcatcaatgatcggacctccacaatttttttccgacggctccactcgacctgcggcagatcatgaccccatagcaatgaccggagttgtgacccatgtttgtttccgtcactctcccgcatcttcggtcttattcccttcatgtgctggatactaaccggggttcagaagaagactccgtctggggctgaacgttctttgctaactgggcttacgtcatccagacggatagatagttgaccattccgcttggaacgtctactttgactaacgctttctgtagccactcatgcgtttcgttttatcgtttgactcttatgtcggtcagttgactgacttctccggagggtgccccccattcctggggctcaccaagctaagggcgtccgtctccggcaatttttttcctcatcattctgttttctctcagttccttatatcctaaagcgttaaaacaggagcagtctatcgacggcctttcccctcttcctcttcttgaacaatctttctcttccttctcttaacatacactcagcgggaaacccaaactagactgctagctcgattcattctgtcgacgcgttcagcttgacaagtgacataacagacaactacctgcgtacaatccatctttacaaccctcacattccccacactatgcaaagttcacacggtctcaagaagacgcctgttagtcactctttctctagcttttccttttcccattcgtttcttacactgtgaacttttgtcttccctgcgcacttgtcaagatcaacgcatcgttcttccctaacgagaatgaacgggaagatgagcatttcgaaaatctcgaccactcccctactaccactgctcccgcatcggaggctggtttctcgggcggcgaaaagactgctgacgtcaagagcaaaaaaaagattatccttgtgcagtttgaggaaaatgatcctgaaagtaagctcctttgttcagttttgcaactgtcgtcttgatttcgagctaatggtatgtaatcttttcgcagatcccatgaactggtcgactggcaggaagtggactatcactattcttctcaacttgatgacgctcatcatcggtctttcgacatctgcttattcgtctggaattacttccatgtcggaagagtttggagttgctaccgttgtcggacaggtgcgattcccttcttcgtctcttcgcataaggtctgactcggctcaacatcaggctaacatgttgtgtactctttaaaacgataggttggcatgttcactttcaacgccgcctgtgcaatcgctcccttgttcgtcgcccctctttgcgagttgactggacgaagatacatctaccttggcgccttcctttgtttcactttggttgacttgatgctcgctctcggcaagaacatcggaaccgagattgtcggacggctcttatccggattgtttggatccatcggttggtctttttctgttttcgaaccgatcgtcagcttacattgactcacccaactctgtcacctcttctaggtacaatcttggttggaggaactttcgccgacatgtttgttcctcgggatcgatcggtccctatgtctgttttcaccttcgctgccatcttctcaaccatcgctgctcgttcgttcaccttttctccttaatatcctgactttggagcgaagtcgttgatctaatcacgctttgtgacactagctttgtactgtggtttcatcgatcagtcactcggttggcgatggattcagtggattcacatgatcgctgccggtgtccttctcattgcagagttcatcttccttaaagagagccgaggagcggtcattctcaaagcccgagctgctagccttcgaaaggagaccggcgacgatcgataccgagcacctatcgagctggagtcggattcgattgctcagcttttcagagagagctcacttcgagctattcagcttttgtacaaggagcccgttgtgttcttgtttggattgtacgtcgatacattcgtttttccaaggtcgtatcatgcccgcgagatctgattctcctgtcatgcttttcttcgtcctcgattgttcagctggattgcgtgagtttttttcctttgtcgatcaatgttgttgtcatccaaaatgtcaagcactgcgcttacaacgatgtatacatgcgtgatctacagtttggcttggggtgttgttttcttgttcctttcggccatccccctcgctttcgccggtaaccgaggatggaacactggtatcgctggtctcccttacctcggcctcattgtcggttgcttcatcggatttgctactggtttctggcaggacagcatgtactacaaagccatggacaagtgagtctgttttcaagtctgcttcttcatgtcttcaatctaacgtttccacccatgtgtactattgcgtttctgcaacagcaacaacggagtacctgtccctgaggctcgactctatggtgccatggtctttggtcctcttttccccatcggtatcatcatgttcagctttacccagtacggattcgttcactggatcgcccctgtaagttttgtttcaatgttcttctggacgattgttagaaatactgaccgaccttgtctgcacgcacagatcattgctctggtcttgattattcttggaatttaccacatcttcttggctgtctacaactacacctgtaagtctatcctgctcaggcgcaatcttaacattccttaactgaccaagtttcctgatgtgatctctccagccgattcttatgccgagtactcgtcttccgctattgccggacaaggtttcatgcgaaacatgtttgccgctagtttccctctattcgccactcagatgttcaaaggaatgggttatcagtgggctggttcgttctgccacctcactatcctcatatctcacatagcggacaccttactgaatccatctgtttacgtcttctctacaggcctcatgatcgcttgcatcggtttctgcctcgttccccttccctttgtgcttttcaagtacggagcgtccatccgggccaagtctaagtttgctgcctctaacaccggactttcagccgacgaggatgaacaaggagcacccaatggcaagaagctcaacggccgggccacgtacgacgacgagaaagagaacaaacagattgaagctcaaatgagctctcagactgataccaaccaggatttacagtccgccgggtttggtgatcaggctgctcagagagtatagacatcatagcccctttgccttctgccaagcctttccactaggtactcatcattatcttcctaatccttcaattcacttgtctcgttcctgtttctatcttagaacaaccacttttcgttattttcataaatcctcacctgcatcaatgaatcaaactgggtagggcccatctatggtttccttaaaaagaaggaagacctcatcctttgctgctgtattaattacttttacaatattgaaacaaaaatatatatttaattctctctgtgtgaagaaaactgtcgatagactgatacagacgatctgagagtgaagatcatggctggatatcatgtatgtggatcagaagaacagagctgctttattggcagacagaacgccggggctcatactctccacaaccttgcactcgcttgagtttcttcccattcttctttttcatctattctccatttcttttgttctcctccttttcgttccactttgctgcataccctcactccttcatcttcccattcattcatctccatactctttggtcttcacaatcctctgctgggcactatgaggctgatccctcgagctgtcgtcaaggcacaaccattacttcagcctgccctgatatcccaacggcagttctcctctggggaacaccctccgagtagacgatccaaagcaaagcccaaagagatagtgaagacgatcgcatccttccttccggcccgtcctcctttcaagaaccctttcgagctactcggacatgctacgcgttatggagctcaagaaggtaagccatcttctcagtccaatctagatcgcgttcctgtccttatatcgtgccttaacaatgtcgttcatctcattcctcacgtcgctcgatagccgacaatccgttgtaccctcggtacaacccagccaagatacagcttgtctcttccctcgtacataagcagatctttccggaaccaacctcttcgtctcccactcccgaggcgctagaggtcttcagccgagtgacaagcgaacagactatgtcgatagacgggcttatgtcgagaaagcagacatcactgccgttacctccccagctgggaggcgaccttcgttctcatttcgaagctatggcttccaaggtttgtttgaccattcgttgtatctgttgagtttgcctcccgagcctcatcagtggttcttttatacgcaaccatgcgatcaacacttgtgttctgatgaacgctcttctaggttgcggaaccatacctgaagctctcagaacaagcagcggcaggtttcaaaaatccggttccatcaacgttccctgacggctcagcgtgcgtttctggatggtccagatttgatgtcgatactgaatcctggattgctacgccccatccggtcgagcaggtcctcatcgtcacctatgataaaatgccccagaatcatcgatggccgctcttcgcttgcgcttcctcgccaactgatacttatatatgggtttctccgtggttaacaggggattcagatcacttcaaacatctaatctctttcggccattcagcagaacctaggctcatcatttccaatgacttggtgggcttccgaccttgcgttcaagagacctacaacattcaggatagcgcattgcgattccttagtatgggtggccttttgggttctgttgtaacacagggcaagaaaattccagaggataactcgaaagatcactctgacttcgaaccgtcattatttgaaggcgtgtacaaccagagctttccaaaatatccgattcgttttgcttctcaaatgccgtctgtagtccggactccagccaaagcaagagaggtaaccgagaagagcctcaaggagttatttgaaaggcttagaggaatgggtcggtattttcaacttcttttcaagaatttccggaagacctctccttctttagtctcattatccggccctctgagaatgggaacatctatccttcctgtcgatcacgagttcagtcggtttgtcgccaattctgagcaggccttagaagacaccctgcaacacgctcaaacggatcttgctctacttgccgaagaagctcgactgttatggactcctccatcagcccagtataagcctgattcgccacactcggaccccatcgaacttcctccccaaatagcgaacgacgaatttctatctcggttggactggacacctcaacgggctaagcatgtcaattggcccacagagttcactctcaagcaaagctcggatcctcttgcgatatctcaccgtcaaaatgcaccgatgaactatgacgaacttgtctcctccaaactcatcccaactcagattggacttcggttcaatggtcatcccatcgtatactctgaggaacatgggttcatctatttctctccaacaccgctggagaaccaacaaccattagaattttccgatgtcaatcacgacgtgcatctcgcgcatgccacgagcacttccggagcgtacttctaccggttgccgagcagaccaggacttgatattgccgtccgatcggtgttgaataaagattatttgaaaagatcattttcctcgcctctgagctgtgtcgatccaaaactattggatcttattaggaaggatgcggatacgagccttattttagaaacagtgtctcaagcaatctcgtcttacactatgtctaaagataagagtcagtttttctttgaaacttctgttcatcaatacattcgtaaagctccttttgctttgacctaatttctgacctcggttgcgttccggatttacgttctttcctccagtttcgaaacctttttcaaaacatctttcgaatactttgtcgcgctttgatgatacgcccaatgaccgcgttgatttaaggaacaacgtgacggtgcctgcccgtatcggtctcacttttgatggacactctgtggtttattccgccgagcatgggtttgtgtatcgaactgacgcgccaatagatggttatgaacccttgcagttccccaaggagagtgcagataacgtttttgctttcatatcttccgcttccgagggatacttttaccacatgcctaccataagatatgacggcaaggaagtccgatcggtactgggagcaagatatttgacgagagttgggttcaatcggtttagctgcgcgaattcagacctattgcaactcatccgagatcgggcggataatgaatcgatcatgaatgccacgaagagagcgatggccgctcaagacagactaatgaaagaggcaccacatttcgactatccagctccctcgaaatctgctctggaagcttattggtggccgaagtggttcagtgatctttttgatgatgtgtctaccgagcctgccaatcgtcttaatctaccaatttcacattcaattactcctatactccttcggctctgctggaaaggctatcctctataccgtagccgtcgtcatggttgggtatatcgggtgccgacctcgaggacgaaaggagtaaagctgcacaccaacatgcgggagagtggagaccattatcttcaacaattgggagctcaagaggtacggactatggagcgggacgggttccttcacccaaaccgtaaaccgaagagcgcattctttagaataccatcggcggtcaaaatctctcaagccgcagacgatatctggtcaggattcatcaggggagggcggctcactagttctcatccgaaggcccaagccatacttgaatctctggcctcagggacaatttggacattgcaccgcgaacgtatgaaaagcgctattgccatgaaggcatctgaagaccaccctatgggtttcgatcaagaaatacgaaacggaaatcagaatgaatggagcctgattgctccacgggtctcgcctatggcttctttgacaagacaagcagcggatgatatttggctggttagtttagtccctgcaatcatcttgtttttgtacccgaagctgagctacttttttctcttctcatggtctttctttgcaatctttttctttctgttgtacaaccttttgtgatgctatagaacgctcccaatccaagatctgaccagattggaactgaggttaaagcaatggttaaggctcctgaaggctatagaattgtaggggctgccgttgagtcccaggaagcatggatcacttctaccttgggcgacgctcagtttggctttcatggagccactcccgatagtaggaaggtcttgaacggaaatgagaaatcacaaacagacatacattcccaaacagcggcgatggtcaacacccaggccgccaaggttttcaggatttcggaacctgttttgagccgagaacaggctaaaacgttaaaccaccatcgagcctttggcggcactcaacacgacatggccaaacaaatttatctttcaatgcctaagccagatcaaacggtggccggacgtctggctcgatggcttcgtatcagaacaagaggttggcgctcgagagcttccaagatgcaccatttctggtgcgaaggaaccgaaagtttttcgtccaactcggtcgaaaacattgcgcaagccatcagaccggttacgcctcttctgggtgcatgtatcccgtataatatccaggcgtcaagattggccgatcccgcacactttaggccgatccgaatcgattggagtgtaaagtcttcaggagtcgactacctccattgcctgattacctcgatggactatctgtgcaccacctttgagatcaacgcccgcttcttgatctccaaccacgacgaagttcgatatcttgtcagagaggaggatagctaccgagcagctttggcacttcaaatttctaacctctggacccgtgcattgatgtctcaacggttaggaatggaggatcttcctcatcgtgccgcctttttcccttctatcgatattgatactgtgcttcgggcagatgtcaataatgactgtgtcactccttcccatccaacacctatcccggctggagagaccgctaacatccgagagattctcaagaagacaaacagcagtctcctccgggatggacctatacctgcttccgtcccgagcgacaagagtgggggatcgaccgagcttgagaggattcttgaagattggaagaagctttacgcggaccgtgtttcttcgtcgacggccttatgtgaccatccgaaattcccgtcacttgctcaggtcaatgcggatcccgactggagaaggttttatctttatgcgcaaacagggagaaatagagcagagctcaagcaactctacgaggagactggggagcctgaggattgggttcgtaagagtcgaggcataaaatgattgagaacgaagagcatgatgttttatttgtatacttatttaatctcgatcatgtttattatttacccgcatatatttattcctttgctctcattttcatatctcgcacatggctgctccctatcgcttgtgcttcttattctctgtttatctttgacaattcggaaacggggggcgaagtaggggggccgggcttgggtagaccatagaaaatcgaatatcatatagaaatgactaggctacaaaggatggagacaaagattcgaacgaaaagataacgagcgatcgatgcggaaagcccttaatcgacaagagaaagcagtgaaagtgtattgtgttgtgtgcagaatcaaagatggaaactgaaagatccttcaaagagagagggaatgtggagggaatgagacagagaaaaaaagaagaagaagagggagacgatgccttaacccaagaccttcttcagtccctccttttgagcgtcggtaagggtgagagggaatttaatctgccatctgacaagcaaatcacccttctttttcagactacctttcttgctgatcggcatacccatctcaaatagcctggtctccttgccgggagtgacgactgacggaggaacggtgatcaaggtggtcgttccgtccaacagagtgatcgttcgttgggaaccaccgggggaagtcaatgcgtcgagcaaagaaatctcctggttaagaatcaagtcgttgtcctgtcgcttgtatcggtcgtggggcttttcttcgacgacgactggaacgaagagcgcgaatgatgcataaagtgagcaagataagtcacgaaaaagcgaaagtagaacagagggaacaagaaaggtcaagcgacttacaaacgacatcagccgaaggtccgttatcaacctcggttcccatcgactcatacttgatcctcgttcccgtcttccatcctggcttgatgacgatgctaacgaccttttcctcgagcgttccattcaacattcgtcttgtaatcttgagcttctttgtcgttccggtgaagagatcttcgagtgagcaaggtaacggtcgaacgatctcgtccggctttggctttggctcggccctgggctgtcgtcttcctccgcctccaccgggcataccaccgaaccctccgcccatatcaccaaaaggactgtgatcatgaccacccatgccgcccattccgcccattcctccacctcggccaccgccgttcatgaacatactgtaaggaggaagagaagaccgacttgtcaaaaccggtcgactgtacacaacgcttcataacgaaaaaaaaggcagctcactttaagatatcctccattccaccaccaccacctcctcctccagggaaccctccgctgaaacctgctcctcctcctccaaagccggaaccaggaggaggttggttcttcagtccatcctcgccataagtatcatacaagtgtcgtttattctgaattcacgaaagacagcgtagaaagataggagatagtcaaacatgttagactcttttgcgccacacgattcataaaggaaagtgatagaatccaagacgtacgctgtcagagagaacatcgaatgcctcagagacctctttgaactttttgctagcagtctcgggactgagggaatatggagaaagacggtgacgtttgatcagcacaaacgccggatcatccaggaaaagaagatacagtcgtcgagagggtatcttactcgttagggtttcgatctgggtgatgacgcagagcagctttcttgtatgctttcctagaaggaaaagaagtgaaagaggagcgaaaaggaaggcgaataagtacaaagaaataggttgagtagggcagagagtgaggaaacgggaacgaacttgatctcgtcgtcggatgcgtcctaagagacgtcatcgaagttcatcatacgttgaaaatccaaggtatcatcagctttggctcaaacgtgaacggcgtaggccaaagtagaatcggatgggaagcataccttggagatacctaacagtctagagaccaccgaggtaagaggatcataggaaagattgtgttagtgaaacgaacacagaccaagactcttgcgataaaaaggaatggagaacgaagagccagaagccagtcaatgcgaccggacacaagcacaaacggttggaacggacctgtagtacttgtcgtcggccattattctatgattcgaaagagctgaatgagatgatctgtgtgcgtttgcgaatggatgtacgtgttgctgtttatggagggaagagaagaggatgcaagaagagaaaaaggaaaaaaaagccaacagcccgactatgaaattcttgccggttttctaatagaacatgctagaattctctagtcagttttcattctctccgcctccatctccatctctcatcatcgtcaccttcgatcagtatcatcgttgttggctcctcatcatgagttctgttcagaccagacacagagtcatcggcctgtacaaagaggtcagcatgctagttcacagaagagatcagctcacagaggtaagaaagctaactggtaacggatctattgacccatccctttcgttcagctcatccgtctaggtcgagactagttcgtcccgatcgactaaccgtgtatgagagactcatcctttctctttcttactgacccgttgttttctcctcctcctccttaataatactaactgatgctcttgtaaagcccaaatcctggatataactttgtacccaaagtacaggcagccttcagagcatccgcagggttgacagatcagaaagctatcgacgagaagcttgctttggcagaacatgtgaagaatggttagaacctccttctctcttttcttccttgttcagctccggccgtactcacgcgcgcttggaatcaatatcgacttgatggtctacatcccgacaccgccttacctcttctctctgtgatgacatccttcagagacactggctctgatatctctttccaaatatcgatacctccgccggacgtactgtgttcccattaaggatacgataccagatgtctcactggaaaacacaaacaaatgaggaacccctgctttatttgtctgctttcttctcgaacgaagcagagcgtccgaggttctttcgataggaggcagaaccatcgtgattcacgttcgagggtcctgccatctgctcacacgcccgagaccgtccgtattgtcgttctcggtccaggtccaattatgtatattgtctcttgttgtaatcttattcagtcattttgggatcaatttgacccattgatcgagtctcagctcagacttgaactgcatggcaaaaatctttgtcttcttcattagacaagtagacaagagcagacatatagatcagagagggaataaagagaacggatcacgaaaaggaagaagaaagcttcctgatcaagaggaagaaatgataaaatagagaaagacatggaaggaagcgaataccggacttaatgtacaagagaccaaaatcagagagaaaagagagaaaagaaaaagatagccagacagaggggaggggagaggagcggagaggagagtagaaatcaaaaaagagaccttgaagggaaaaaaatattaaaaagttatccagagaaaggaaaggaaacagaaaccgagacgagagaagaaggtgataaagaggagagcagacaccaacagatcgtatgctttctgagggtcttggaacgattctttgcaataaatttaattcggattttgacatttctctcttatcttttaagaatatgtcttttcctcgattcatcgccaatgcgtcggatctatcataacgggaaacagatctgtcagttccagaatcagctaatcaaacaaaaaggagatggtaccactcactacacagcccaacgttctacacatacacatcgctcctcagatccaagggtacgccccgattcccgacccttgagctgacgttccagaaccagagctagagccaacagagtatgtacctatctgcctctgcggtcccatctggaaggctcctccaggagcagatctgtagacgcccatcgagggtccctggacctgctggtaaacctgagagtgtggagaagatggcgatggagagaggggagaagatgatggcgaaggcgtcgtcaaagctggatggtacgctacagagagcggagcatggtgaccacccgcggcaatatttgtgtgcatatgctgttgctgttggtgagaaagatcaagttgatgaccttgaactggaggagcaacgctgatcgcctgagggataggatgatactgagtataaaccggatgctgaagatgctgctgttgttgttgctgctgctgctgctgctgtatcgcaagagaagccgatcgatagaccatagtagagtttgggatgtgagctcccgaaatcattggttgatgagcgacttgagacatcatctgctgctggtgttgctcctgatcttgatgctggttttgggggtggacgagagatgagggagtagctgactggaaaccaagagaaaatgaacccgcctgtggctgtaattgagtgttgttctcgtgcgaccaagggtttggtctagcagtgccaatgggcgccggtcggccgaccgtctctcgctgtgtcaccgggttccagattggatcgataccaggcatatgtaatccagccaaagggaactcgagctgacgcgacgtgggaccatgatcatcggtttccaatgaaggaacgagtgtaggtacaggcgacggtaggctctggacggcagcaacgtgtttgaaaaggggaacagtcgatagacgaggtgattgttgttgcacggtaggtacagtagcttggacaacggcagtggtgaacggagtgtcgataggcttatccacaggagcggtagaaggaacagcaacgagagcaggggcctcctcaaccttgacttctggggcgaccggaataaccttcacagattcgtcaacagcggcagtgggttgaacgacttccgtcgtgataggcttggggctgatgacagacagcttttccactacagacgacttggtttttcttgactctgaggaggaatgaacttcaaccttcttgactaagggtgcaatcttgacagccgctttgacgactggagcagacgaggaagaggaaccagatgcagccgccttcttggctcgtttggcttcggcttgtagatcagcttcttttttcttccgagcagcttcagcctcagccttagctttggctgctgtcgctacttccgccttgactcgtgcttctgcttcaatcttggctttagctttggcgaccgcttctgcttctgctttagctgcgacctctgcctctgccttctttagagacgctgcctccctgttcttctttgcctcttcctctgccttcctcgctgctgcctcagccctcctcgcttcagcctctgctttcctggcagcggcggcgtcttcagccttcttcaaagcggccgcctccctggctcgtttagcctccaattcggctttcctggcggctgccgcttcctccactttcttttgtgcggccgcttctttagccttcctggcgtcggctaccgctttcttgacagccgcggcctctctgattcgtttagcatctgcctcggcccttcgggcagacgcctccgcctttctcgcagcggtcgccgcttctttcgccgcctttctctcggccttttccgactggagcctcatcagatcttcccagctgatcgtccccaggccttgaccgatgcctccaccgggttccatgccaacgtttggtaccgactcagcccctccgaacatggcttgcatctctgcttcctcctcaaccgacatcatgctgacaacacaaccgtcgctcagagttgttcctacacccaaagccttggcccttgcctgtagttcggcgtccgccttcttctttgctttctgtcgcatccgtttcttggcgttgagagatttgagaggtaattccggtggtgccgatgatgctgtaccagaatcaacagagtcagcgtcctgttcggcacgcgagtccaaatcgtcttgggagtttcccgaggtcgaaccggatcgagagcgtatatgttgacttggatcagagttcaaccccgaaccggaagcgaccggttgatcaatttgggctgcttccggttcggctgcagagctagcggcggcctgtttcttcttgttcttcttttttttcttgttctttttcttgcctggtagaggtatctcgatctcttcggactcatatacgttttcgtcgtccgagtagtcatctggacccgcgataatgttagcctgaagagatggaaacaaagagatgccagtagagagggtaagcaggttcagagtcaacaggagtgagcaatcaaccagaaggggcgacaaagaaggcgagaaggaagaaagcgaccacaagagagacagagagggagagggagggagaaagtgtccgaccaacgaaaacatcgcggatgaaaggaccgttgaaacaataactcagcctgagcctgggaacagagagcaaactacaagaacgggcagaaaaggggaggagaaacaagaaggacagaactgacgtcttgaaggatctggatggcccgagcctgtgctatcggattcgatatatgatggtcttgatagatggatcgataatttgcttcatcgtacacgttgtggtgtgcctgaaaaggaagaaggccatgagagccatgttcggtataagcaaacccgcccaatgtattgacaaggtctctatggaaagccccggcggagaacgtggcattgtcgtgcaggacaggttggatggatgaacgaacaagagcatcctgtgtggttatcgccatcgacgacggcggtggcctgtagctgccgatcgaactcggacttatgctcggtccgacgcctacgccgacccttgtactttcaatgtcacccatgccatatgtcccactgatatccgaggttttctcacgaaacgactgtcgggcgatccgggaggtaatggccgtgttaccgaacgcggaggttggcagaccgaccgaatagactccttgggaggtaggaaacgtggtcgaaatccgtccggaaagaccctggtcgatcctctggaaagtgatctttgcgtcttcggcagaaaccgctcgttggcgttgagccatctgggcggcttctccggcagcagcgagcatttcctgggcggcctctttgagctgtcggttgaactccaaccggtacgcctccgagtttggatcccctgtcattcgactttggatctgactctggatatctctcaagatgtcttgcctcgaaggcgtcgagcttttgctgtagacaaagaagaggagtcgcaacaggatgagagacaaaagagataaagatcgagcagttccggtaggggaacaaagaaagaacgaaagactttggaagacgaaaatttcaagacttacccctcggtcggcgttgtgacgctctttcctttctgaagcgggctcgatccagagatagtagtcctactggtagtaccacgagtgttcttgggacttgtcccgagatagctccagattggagctgggtctggtgtagatttggatggattcggctctgaccgaggatcagttttgtcaacatgttccgttcgtctatactcggcgagagaagatgcggtctggtcgttcatcgtagcgtcgcattcgacttccgacagcttgttgtcggccattgatcgatagacgaaaggagtgggccgcctggatgtgaattatgtgttatggatacgtctacaaggaacagaacagactggcgaagacggtacgagggagagcaagtcggaagatagcgagagcaaggacttgggcagcaaccgaggattaaacctggatatcggaccagagagatgtgtggcagagacggatggaagagagtcagatctaagcaagtgatgttttttagggaccagagaatcttatgggtcaaccgaacaatgcgaacgaagccacacagcagagaggtctggaagcctgaacgatcaaggacaaatccaggacgatacaacaagctgacgcagtgtattcctttctatctctcctctcttgcagccgtcgctgtcactctgagagaaagaagactggaaaggatccaaggctggacgtaccgatggaagctgatggttactggttgcctagaaggaagacgagaataaaaaggaacgaactggaagaaactacaaaattgcgtaatcacattagaaacgttttctaatacaaagactacagaagtttgacggccaagactgctgctctgacagaacagttgttcccatctcccggcaaacacacatcgtctgtggacctctagagaggagtatcccagaacgataacactacaacgctctcccagataccatatcgacccggtagaaagccccatcatctgccggctctgcaaggattcctataggacgcagggtttctcaccgccagctgggggccgtggcagacgtcagattacgtaagtgtccggcactttcgccgggttacgtaatcataccatctttcaaaaaaacgggagaactcacacgctgaaagaatggcagactcgacaaggataccatcacctcactttggtctttgatctgtctatctcttgttcccatggcatcaattctctcccgatcgcttctctcggcttctcgtgtggctagagtaccggccggcgcgtttgttttggctcagaaggctacctttagctcaactcttgctccttccatccggatcaggtcggctcctctcgcttcggacccaactccgcctcctccaccgccgttcaaggcttcacccatcagaccttcaggtcaatccgagtctgacgtgaaagaaagctcttctgatgctgaggcaacgtctgagtcggtcccggaaccgacgcctgaggctactaaccctccgccttcgtcaccgggagccgaaacgcccgcatcagagcctagtgcaaacgctggtgccaagccgactgccaatccaactcctgatcccaaattcaaggccaaggaggaagcaaagaagaaaatgaacagcaagctggtcgacaagatcatatatcgaggtgcctgggctatcgtggccggttgcttggtatactctgcgttgcctttcagcgaggaggagaggaagcgcgttcaattggaggcatgtcttctctttgattttctctctctccttctctccggtcacgtcttgcttcagcatctctcatgtttgtagtctgatctgatctttatttctcaattctaacaggccggtgcctccgacccttctcttaccgatcgaatgtgggctcgactgacggatacttatgtcgtaggttcccctcctcatgcactcaacttgtcccaatgatctaaaccttatgcatgtttcgatccaaacttcacccggtgataggtccaacccaagcctttgccacctcaacccatgcttccgcctccgattcaggcggaaaagcctttcaccttgatcctcgaccttgaaggaatcctgtccatgacgacggtggatccagtaaagggccgaaaagtcgcgattcgacctggagccgagtactttatcaagtaagtgcggatcggtcttgtccatacatctcttttgaaacatccaatcttggcctagacctcattcgcttgtccgatcgttctgtgtcaaacagacgcgttcatcagctttatgatatttcggtcttgacatctcagccaggcagagtacgtccacttttcacgatcctcaagcataccttcatttttgcgcttgtatctcaagctcgttcttttgtctcttggtcgcgacacgataggaggcgatgatgatcctcgacaagttcgatccctatcagttttacattcccttcaaccagcgacttcttttagccagccccgatcctgaagccgctccggtcttgcctggaacccaaaagaagtcatttgagaacctcggtcgagattacgaaaagacggtcgtcatcttgaccgatcgaaaccaagtgggaagccacgaggaaaacgtgttggtaattccaccgtggaagggcgatgcgtctgataaagcattattggacttgattgacttgctcgagggtatgacgttctttttatttttcctcactctgtacccggcaaacattatcctgacgagttgattcatgcgtctttcttctttcctttcccttttcctctctccttcgtgccttccttccatagctctgcgatgttcagaggttgatgacttccgaccgatcctcaagacatacgccaatgatgcaaaccccctcgaaacgttccagctctctgaagccaaccgacggaaagcagcatacgacgcatgggcgctcacccccttcggagctcgagcgatccaagaaaacattccatccggaacaccggaagtgcagccaacgtcgtcactctcccgatggttcggactgggagcatccagaggacaggcctcgaccggtagatcagtcgttcccaccgtctggggagataaacccggtccagggccggataagttggacgtcttgaagtatgtgattcaggaaagcatgagaaagctggaggtagagttggagagggcggtcaaggaggaacaagcaaagaaggctgaggaggccaaagccggggaggtggctactgtttaaataatcatgatttggatgaaaatgtaccttcacatgcacccccttgctctccaaagagatacaaaaaaaacgttttaaaaaaaaggaaaccccgacagatcagaccttcattacaatgatttctctcgatggagtgactgaaaatcatcctcgataatgtaaagaacacatttggatgggtaaaagaaacttatacccgctcggtcagatccgaacatttccttgttctatgtctcaaatttggaattcgcccagatgctaaacccatctcttcattccatcttgatctcactgtgtcataaaccagacaaaatcaccttagtgactgactgtgatttcttctagaacgaagaaaaacacgaagactgcaagaacactacacgcatcagaatggagagcatcagggctcataatcctagagacctcattgtcatcagtgcatcggacgatcagaagagagctagccgagtgaacaccttccgttcgttcgcttctttttcttctctttgatggtatttccatttccttctcatggcgatcgtcaagcttatcaagactcgttttgttcaaaaaacgaaacaaacacaaatccgatgcaatgaacgtgattgtcgacttctgacataaaaagctcagtggggagctcccaacggcttgtcactcgagatgtatctgaatagagatgaattgatggactcggaggcgtgggctgctgatcggaaacttgtcacttggtttgtgttattgatttcttcttcttcatcttgccttcttctcttgtctcttgacgcacacactgatctataacatctcggactttgtttgcggtgtctaacgattgggccgatgcgccaatcgataggattcttacaacaaagagcacagctgatcagtcagacactccccttctcgcccattgcgaaacattccgaagggccgcttttgttcttgatcaatctgctactgacagtgagaacgagacaagcatagaaggtagaaagaaaagattgaagagagcagtggggtatggaattgcttctgtcttcacgccagctgttcacagaagcaaggggtatgcgaaacggctattaaaggaattacattgtttgtctactcggttctttccctcattgttcgccaagcaggaagtcagaggcctcctagctcatccgatgtgatcgatcagaccttcttgctccctcagagtcactcccgccgtttcctgaaagtctaggatctcatactccaaaagtcccttcagagttgacgggtatgctacaggacggtgcattttctgtactatatagcgacattggaccatcggtttgctcttcttgcttcttttctgtcctgctactccacttatagagctttgactgatcgaagcttgggctggtctgcgtcgcgtcccctacgggaacggggaagtgtagttctacacaggatgctacgttggcgagtcggagcccggatgggtttcccagtcgtccatcacctgggaattccctatccttccatcctctctgactgaaacagacaaagaagcaggaacgaatgtgaaatggatatatttaaaagaggacatcacccacatccagtcgcgcgtatccgaagagctttacacacaactagagagcacaaccagtgaaagagataaagactgcgtcgagttagggtttcttcctgaacagtatgtattatcgaactctataaaacatctgatgaatcaacgtgcatactgatctgcgcttttcatccaactgtatcatgtacagaggtcttctctatacatctatagtccgatcccaactagttgacacccagccaggtcccaagcaagcacggcgaacgtatggatttcagacgtccgatggaggattagttgtctggtctcctgtagtagagaagggaaaggggaaagggctgggcatcaccttcgtaggtgctcctcttattcttttgtccccaagttaacggaaactgaagcttgtacacatgtatacgtgcatatacaaacagactatgggaaaaatcccatacgacttgatcgcccgcgccgccgccagcgagcagtacgactggatcgagatctgggacgaccggtggctggccgagcaggaagggatgggatggcctgttgatggaaggaggatagaaagaagttcgtctgccttctcgattgccctttttctgctactcgtgcttgcgctttcctctattacgcgcgcttcctatctactgacacttgactcaaccgtgtgagaatcttaatagaggaacatctcgctcagttgtgttactacgatcgacctaaggttgacaaagctcgctgggtctataatgaacggtttgttatgttattcttgtagttcaagtcaattacgacttggcttgtcttctcggtgtgtactgatgtgacagactaactgatagattcgttccatctgaccacttcattctaggtatgcatggtgctgaggtcgactaagcatatgaactcctatcagccatatatcaagtatactgtagagaggggcagcgttgtacatctaaaagaactactatcgtaatgagcttacaggaaggcctatcggcctttctcgctgtacttccatatcccagtcttacatgagtacccgagaatatcgtctgtatctaccaacaaatcaaccagagcatggacagtatatctataaggtcatcagagaaacagactggatcggaaaaatccgtcttcatagaatgtggatttcattctctgcaccgctttgcttatctctttcttatctattaccgttcttgaccgaaaacccgatcatcgataatcttctatccgaacccatcttctttttattgcacactccgcctccagcatcttgtctgaccgcataacatcgatctctcaaacaacaacgacagaagattgaaggagaagaaacagtcggagacatacggaaggaaaaaaaatgagtggagaaagtgtttcactgacagagggctatgatcatcgagaactgatggtcgtccaagcttctgaggagcagacgagaatgactcgcctgaacacatatcgttcgtttttttttcttcatgcttgctcacctttttccggctgagtttgcattttcagcagctcattcactgattgaaaaacacacctgattactcttctttacttctggatgctatcttccgttcattcgtaatcgatactccgttctacacgcggacgaaacagctcattggggactctcaaacggagtctcgctagaggactatcttaacaaagatgaggtcatggagagagaagagttctccactgaaggcaaattcatcgtctggtacgccggccttcttttttcttcctctttctcgttgtccgcacttgactgctaagctgacatgcgctgtacaaacaggattttgacgcctaggaagacagccgatcaacctgatacacccattcttgctcaatgcaagacttatcgacgagcctcttctttcatcctcgaccgcaacagcagtcttgcagagggaaaggtaccgagcaccttggagaagaaggtgggctatgggatcgctactgtttacacgccagatgcctatagagggaaggggtatgctaaacggatgttgagagagttgcattgttagttgttttctgtcttttcacatatccctgagagtgatctgatcacgttatactgtcaatttttatctcacgtacagatctcatggcggccccagagtccttgcctccgtatccggccagtctgggaccccattctcctcgtgtacctcctaatttgagaaatgttctacaggatgctgcgttctctgtgctgtatagcgacatcggaccccttgtttgttcatttttcttgattctgatcgaggttataccacggaacatctggacaccatactaatctagtcgaggatactgtcatggtcagttctacacgaagtgttacgtcggcgagtccggatctggctgggttgcccaaccatcgatcacctgggagtttcctgtttcggctgcttccaccacggcgacccatcctgacttacagaaagagaaagatgttcagtggatatactcaaaggaggacattattcccattcagtcgcgcgtttcgcaagctgtgtggacccaattagagcgctctgcacaagatacgaagggaaaggatggagctgaggtcgggtttctgcctgatcagttcgtctggtctttctctcctttcccttcggatgtacgtgtatactgacgattatgacatcccttgcatctcgctagaggagtcctatacatgatcatcgtcaagtcacaagcggttgatcctcaaccaggtcctgatgatccaagacgaacatacgggttccaaacatctgatggaggggtcgtggtatggtcacctgtcgtcgaaagaggaaggggtgtcgggttaggtataaattatgtatgtccttttgttcttgcctacccatttatgatctttcttttcttctcttgatgtgactgacgaaacacacttacctgtgagtagactatgggaaaaatcccatacgacttgatcgcccgcgccgccgccagcgagcagtacgactggatcgagatctgggacgaccggtggctggccgagcaggaagggatgggatggcctgttgatggaaggaggatagaaagaagttcgtccttctcttataagcgggagatcgctggtcaggtcgtgtctcacttatgattcgttctccctcctttaaccggacgttgaattcattagaggaacatatacctcaaatttgtcattacgatagatctaacgtagatcgcgtccggtttattttcaatgagcggttggttttctttttttcccttatacctatctgctgtttcacttgactgaaagactgagcacaactgactgatcgaccaatggatccaatcgtttaacacgtcctatagatttgcatggtgttaaatcaagtcacggctgatcttcaaaagggtgataagatttgtatgcgacgcggaggcagaagggaagggcgagtctgggacagagaaggagatagtatatcttgactacaaaagatccggtacgacacttgatacaattccacatcactgagattagtaacgggacctcttgttcaaacgcaagcgttctagaagattttagtaggagaaagcaagtagaaagacgaaagagagagaaaagatcacgcattgtaccgcatcgacttgaacaagtcatacactttctcgctcaaaatatcccctatctttcgtctacccacaccttttacagtagcaaccaacatgtgcttggcatacctgatctttgccggcctcttcttcggtgttttggtcaccgactcggccttcttttcggaccctattgatttagatttcgacttggacttgggacttggtgtagggttaggttgagatttagcaatagcagaagctgctatatcctgcttctcgacctgctctgcttgctcgaaagctttccacaagagttggagcgtcgggtgaacctcaacgatcgcgtccgctttaggagcgctgattccgtctattgagcgcaacatcctgctcaacaactctggtggagtaagatctgaccgagaccgtttgtttaatttgttgtacgtcgaataggtcgtcaagtaggtttcgtgtgggttagaagtagttaggttggatctaagagactcgtaggtttgtcgggtcacggccgagtctgggatgatgtttagtggtttgttctatttgtacgaaacgaaaacaaagatgtcagagataagacgtatcggccgttcacgcacaaatagatcaagacgttgcatacctcaaagaacgaccggacggtttgatcaagaacgcgtagagagtcaagtgtatcatcggggttcatagtccttttgagaatcgttttatcaagcgcttgaagggaagtcatcgtggaagtgatttgagtggaccatcgttgttcatcgtatgctgattcaaattcctccatcaagtatgatacgtgttccattcctgattgccgaagtcttgctttttgatctctaaatctgccatcaagtgtagagttgacaacgtcgtccatccgtttccgttcgactacgaaccccaagacgacttcatcgttatcttctggtgaggatgattttgcgtctgttctctttgcgacccaaagcatgtctcccaggacgagacttcgcttctcgacgttgagttccgtggcctgaaggttctcgaaagcggccatcccactttcagcgatagtttccctggtatcaacgagaagagcaatctcgtaagaaccagcaggccaggtgatcagttgaggaacacttggtggaggacgagttgagaatgatctttggatcgggtgtgagcaagctattggcagagatgtggattcggagcgcgtcggtcgaatcgagaccagtttaggaaaagagagagggaatggtcgacgagccacgacaacagaccgagctagaggacggaagtgtatgggtgtcagcctgaacaaacacgcgacttggatacgtcgttccatccaaaaacttacctgataggctcccaaggcgagacgtacgagctaggtgcatttcacagtacagaatagttgtgcgatgacggttgatcgttgatcgtcggtgtccaagatgactgtcggatgggttgtcttgaagcaagcggaggccaagtgaatgttaggctagggttacaatgcacatagactcaggtcacgtgttacggctaacgagtaaccagactcgcgccagatatcttttgtcttcttctcttatgttcgttttggattgtagggagcgtcttgatctgtgatcgtgcgtcgttactctaggacacctttgaaagtcacgtatgtttctggactaggaagaaatgggattatttgtaatctgctgatagcatttcattcgaatacagaggagtcgtctagacgcaaagagataggaaagaagaagaagaagcgaccatcgaagtttcatctttagaaatcatcttcgtccatctcgactatcgtttggaagcccaagagaaagagcggaaagttagcttcgtatcaaatgcgaaagacagaaaatagaagacagttctaaggaaagagagataagacgtactctcgtcagggttggcggccggtccttcattttcaggcaaagccgtggtagcttccgtccccgtcttcttcgtagcagccacgaaactaggtcctcctgccgctccggctccttcgagcgcggccatcggatcttctcctgctcctccatcttcgttagcaggattagaggagctggaagcggtggtgttggtcttgccaagtcgagcggctgcgacttgggcggcaaggtatgagccttcggtgttgaacgctgcttggacggctctctgttatggtccatgtttattaagtaagagaggagcaggaaagtgcaggagatgagttttctcaactcttgagattggaggacagggagaacagtagaaatcgaaccttgattcgaagcatctctcggaacgtatcctccgatccagtatcgactgaacagaccgaaaagagacagatcagtctctcatcaacaagagagaagagagaaaaggacgaagattagaaacaaggcgtactctcaaaagcgttccattcggtccagaaagccttgtggattctcggatcacagaactgactggcgtgcgcatagatcgctcgagctctgtcgatctcgcccaactttctctcgaggttcgcaaaccgaagacacatctgggcggtttgaccatctgggaggacttcgatcgctcgagcgtaaatcggccgagttgcaggaagtccaaagttggcggctgctttagcgatgtagatcgtgaacatctgtttggggattgaattatcatcctcgatccgaacgtcagatacgtcggccaagagaacggtaaacagagtaggacgagactgacctcaaacttgtcttctgatttgacagcccgagtggctcgatcgtaaattgccatcgcccgtttcgccagtccatgttcttcctcgagctgagcaaacatgaggaacagcggcttgcagaggttatcaggacatttctcgagagcttgttcaaacaaatctcgcgttctctccaactttgttccgccctgtttgcgagaaaaggggataaagattgcgttaggatttgaattataatgtaaaataagatgacaagtctttgaagaaggagcagaatgaacgtacataacgtttaacaaacttggaaaggtaaatgttccaaagttcgaaagcgatagggaaagcgaacagatcgataccccgttcgtacactttgaaagattcctcaaagtatttgttttcctcgaggaacgctgcgtaattgacgatgatctggaattgcgccatgatacattagagagttgatcgtcagcaacttcaaacgaccgaaaagagaccaggagagatgtgctttgaaactgacctgagcattagcgatcttcaactccattattcgatcgtaaacctccttggtgctctcaacagaaccgatggattcttcaagatcaacatagaaagaccaaagcttaagtgacttgaagagtctctgttggactgtgagggtctgttgttacgcaattgatagggatagattgactgtcaggatgtacgctatgaggtatcataggaggattgatagtgggaacaaaatttgactaacttcgtcgtggtaactgatcttgaggtttttaggtgcggtcgtcgctcgttgcataaccctgatagcctcatcgtagttcctatcgaacaataaagtataacaagaatacgtcagatgtttgtaagatagaatccggaacgacgcaaagaccatgaacaaagaaacctactcgtttcggacctccatctctgcccactcacaccaaacctcggccaactcatcgaccgacacgaacggaactcttaccgccctctcgaacacttctctcgcgctcttcaagtctttttcgttcttgccttctccggactcggaagagggatcagatgatcctccgttttcatagaacttggcaaaatttatgtacaatggggagagcgcggttggcgcttttcggggattgattgtcgagattgccttgttgtacgtctcgatgatctgaattgggatacgtgatcgatgtaaaaaggtcaggctcaagacgataggaggtgataagcagaagcagaaagaaaaagagagaacgttttcaatcataccttttcgtcgtcctgaccatagagagcaactcgtttctcccactcgacgacatcgtttccgttcctcctcaacaaaacttcgttgaccaagaatggtcgcttatccatcaactcctcaaactcttgcatagcagaatccagctcctgttccattccttctttgtcatcctcatcctcctcatcctcagcggcgagggattccatgagggaggagattagggtttcggagaactcggtgaaggcatcaaagatttgggtaaagtctctgatggtgagaacagagccaagacctgtctcgaaagagtactttgctctgtcaaattctcctttctgaatccagaacgtggccaatccggtccagagtcgtccggcctggtctttgaaaacctccagtccgtctttcataacgatctgttcgacatcaagcttgacatccgagctgggatctgtagcggaatcgtagatctccttcttttgttgctgttgttgagtgggttctttctttttcccattggcgactgcagaaggagcgacagtgttggcaggtctcatagggccgtcgatcctcatcaacttgccgttgaccgaggcaccaccgtcctggtcagcagttccatcagcatcagcctgagcgttcgttccagaggaggaagcagcttctgctcgagcacgttcaacctcgtcccagtccattccaacctcatccgcgttggcctcgacgcgctcgagccactcgacaaagagctgataagcagactgtccgtcgacgggtgtatatgtccccgcctgagcctgtctagccagagagagcagcaactttgaacgctcgaggggcgaaggaagaggggtggtgaggtagtgaggggtcaaagatggatcaactttaaggaaccgtcgccagactcgtcgaccagcctcacctcctctgatctcggcccatcggaggtatagtgcccagacttttccatggagggatggagcgagggaccgaagagctcggtcgaacgtccttcgagcgtaagttctagagagcggtgccggacagagagggtgaagaagcggaagcagatggtagtgccatgccatgggaagctagaggacgcgtacattgtagagagacagatagagaggaggttgtaagaaatgaaagacaggagatggaagccgacgcgtcagccgaagcaaacttttcagaatgcatcaactcgaggatagaaaaagaagaagaaagaacaaagaccatgccgactcacattaggtagccagctgaccattctttcccctgttgcgatcaacgctttccactcctcaaaaccaacaccaccatcgagaccaccctcccaatcggcagcgtctttgatctcttgcaagagctcggtcacgtccaactttcgcttgaccgacttctgctttttggtacctgcaagaacggagggtccgagaacgtaccgttgtctggtgaggatgtaagatttccatagcttgaacgaggtgggaaagatctccaacgctcgttcataaagcgaggtcaacgtttgaaggccaagtctagcttcttttgaacgaagtggaccaagcacgacacattctgcactagcaccggagttctcggccgtgtctttctcgtcgttctcggccagctctacctcggcatccttctcggcagcctccaaccgagctctggtcgagtgaatgtgggtccaccaggcagcaaagttgtcagggttcaatgataggtcttcctctgcctgtagggaggacggggagaggatctctgggtgtgtcaaaggatttgggatgggcgatgtcagcgggaacaactcagtgagagaggataacgatgccatgataggcaaagtgagagataagagagagaaacccagaagggatggaggaagaaacgaagaagatagttggaggttgaaagactgaaatcgaccggagatggaggtttgaggaaaaaaaaaggaataggaaatattccagacaagactacaaaagtttgtaatgcaaaaagacaaaggttcactacaacatccagcccaagctccgtcttgatctcttggtctgtatcctccatcatgtctggatcatcagttctcagaccgtggtgccaccctctaggaggagtcggtagagcgttatgtgtcaagccacgtttgttccggtcttatgtggtcaagtctcataatggtaagaccaaaaaatccaagtcaacatcatcaaaatcagaaccatcgccgtcacccctaccgagaatccaaccaccaagcatcactagcttactctctccagcgtataccgtggtatccccagacgagaccaatccaaatccagttgggtcgtttctcaatccgatcaaagttcggaccaacttcgcgctcgccaaggaacgcaagatcaaagcaggcgccgctgctctcgctgccgctttggtcgagggtgcgggatctctggatcagatagaggaagatgagtctggtcgtctgagaaaactggatgggacccttgtcgtctataccgatggaagtgccaaagggtctggtctcagactagctgatgctgggtggggcgtcgtctggagtcacacaaatcaacagttgtgagtgtgttgtttcgtctctttattgtgtcgcggtatgagatcatctttgggtcctaacatcaatcatagaaatcggtgtgggtacatgccaggtttatatcagacaagcaaccgagcagaactcaatgtttgtcttttgtttctcgcgtgttctccatttgccgattcacactgatatccttgcgcttttctgtcccaggccatcttggaagctatccgatcaattccggaccatcattccccagtcgagattcgtacagactcatcgtaggtccgaatgactctttagaattctgtcctgttcctcttcgcctctttgtctatgcgcgctcatgatattgtttctcgtttctgtgctctttttcttacagatattgtgtcaacagtacggtcatcaatttcgttctatcaatcccacacctcgcggaatatcggttcgatgctaactcttcatgctcgacgtctttcctaacagtctttacaaaatttcttgccacgtggcgaaagcgatcttttgcagggagctacgctaacttggatctgattttcgagatcgaagatctgcttgctaaacgaagggcaaaggacccgcgaaaagcaccccaaagcaaggctgagaaagcagcagggggatcactgaaaggaaacgaaataagattcgtccatcttagaggacataaaggtgaattaggaaacacaatggccgatgtatgtccttctcctgtcatcctcatcttgtctatgccttttgttgcgccagcaaccatacgcccaccgtctctcagcgtactccccttgccactgttctgatcccatctacaaacctcattgtccgataacgttctgaatagaaactcgcagacgaaggatcatcgatccctttcccgctacctccgatggaatactttggccagagggagttctcgaaactacgtccagagtggagaggattgaatcacaagtaccggattcctggaccggcaagtataagattagagggagaaagggacaactagagctggatcgagtttgtcgtatactcgacatcttccaaaccacatcccacccaaatacataatctgggatcactccaaagcatatacgcacgatagatcaagttgcgcgcgctcttctttccctctctcagcctccaaaacatggtatccactgtactcttggtgcgacagaaagagatcgtagaagaagttgattacacatggacattcttcatagacatcacgtgacctaaccccgcaaagaatctttttatattcccaaccttccatcctatcaatcaactcccatacattcctgcctccgttcttttcagagtacattcgtggagatcaggagtgaaggtaaaggtagagcaagacgaggatgtccctcatatctagattcaatatcagatcgaacgctgctcttagtttgagccgtagatcaaccagtcgagtttcactgctttcacttccttctaccttgaagtcaaccgaccaatctatcgcatttggccgggtgtactcttctcatccgaagcaaccctctggacataaggatgttcctcatctttcttctccagagtcccgagtatcaacagagtcccatttcgttggaagacgtcgtcgcggaccattcgttcgatctgaaggttcgcaatcaccttcttcatcatcatcaccacaaacatcatcatcatcgccgacaacgacaacgacgacgacatcatcatcatcatcatcgtcaactccatcatcgtcattcacgccctcatctccatcagcatcagtatcaagactatcttcaaaaccatcgtctcataaattcgcaataaaaccaccagaaccgactaccagacctaaatcataccaaggtctggccgctgacctctataaccaatacgttaccggaaagctggctccgttaaatagagctaaacctgtgaaaagagagattctcccctcgccggacttaaaagatgaagagacaggacaggctgatgcaaggaaaaagaaagatggaggcgggtcaggaagggtcagaagttggttcgtcagggatatcaatgcgtctggtgagcgactcgtttacttctctgcaggtctattcgtgtttcaccttcgatctcgttgtatcacgtcgcttaccctcctaattgtagagatcaatggagagagctccacatccgtttccaatcaaaataaggatagagtgggaaccgaggtcaaaacaaagccccaacagagtgagcatgtgtttcttctcgttcaatatgaagagtcatcatatgacgtcctaacgtgctttcaatactcagcgtttacttcagaaaacatatctctcgctcgcggatttgaacgcactctagaaggagaccagttcgttcttatctcttgttcttctcatgtattgttgtttacttgtgatgcttacccataacactggttcatcctgaaggaatatcaaggacgggaagatgcaattttacaaagaaccagtggagaagggtggagttctccttttcgaatcggatgctagaaagatccctcaacccgagatcttagatgttaagaagattattagttatcctacaacgtcccagttggccgtatgactattctcttgattttgtatccctctcatgttgtgtcgatctattgcgctgatagctttgatctgtttttgggcgattgatggttatcatggtgggaaccaggctatggagagtgcagcagacaaggactcaagaccgacttttctgagtgattcgtcatatttttcgacattatgcgccttggtatacaactcaatctctgctagatcggacctgtcggataagggtgcttctagtttccaaaactatgtttgtccttctacttctggaggtgttttcagagcttatgtagtctaacttgctgacgcgctgtgttcaatctgttcaacggcaataaagcgtcctatgtcgttcaacttgttgcaaaaagatgatacaaacgtctatcatatagtagaagacgtcgatctatctgttcagcctttgaaacactttaaaaatattgtcagtgttatcatctttgtcctttaaccctctgtcctccacttcgtttcgccgcacgaattgattgtcgattgaagcgatttacatcaaacaggatacgatcgtgtcaaagatgatgactacgcctacggatcagatggagaatttgattggaaatgtcgattttgtggatcaggtggaacaaacaagacttgagcgagcaaaagttatcgaggtaccactcttcctccgtgatctgatctttcgtccagtaatatgtcgaactgaccctcattcatcgtgatcatctgggatggtcaaaagctcatggatatctacttgggcgcatcaagactttactcgtctcctaacttgccagggaacggagaattctctgtgaagaccaaagttacgaatcggattatgcatgactgcatgcccggcgaagtacgtatctccccgtcctgttctcgtcgtttgcgccgtgactacgagatttcctcggtatacttattttcttgtttttataaatcgtatagggcgagaggttgaagaagtttgacgagcaaatggaactattccaaatcgaaagggaaagttccaatttgagagacatggttcaagactggttcgtattcctctccctatctatcggtcccagcgtctcactgctcacaaccctttattctaggttcatgcttcgacttgaagaacgacaaggacttcttacagtcttccataacacatctcaactccaaggcttcgagtaccgatccatcgatttcttccaagacgctttgttctccttatctttgtcttcaccttcatcctcacaagacagcttggcaaccaatgaggccatggccgaatccagatttcgagagacgatcatcgctgtgacagagatccttcaaagaatctctgtggacttcaactatcactcggttggtcctgtttctcctcattctacatctgttgatttgcgggtcgaggaaagttgttctgataatcgtcgttacatgcgcgcgtgaatataggatctcaacgtgatcataaatcaaagagaacaaaacccactggcaatctacgtgttttcacacggactttccaaagagtcttctgccagtggaaaacgagctggaaagatgttgttaggctcctacatctacgaataccgaaatgcgcccggctctgaagcgtgtatgtctcttccttgttccttatacccgagttgctttcgtgagatacgttattcacgacttgagttgtttttggtttacgggtcgatcagggtctccggaaacaaccgtcattacgagagacatctttggcgctagagacgaaatcgcaatggagatgcaagatatcggcgaagctctgaatcggcctgcaaaccccttgttcctgctctccatctacgatccgacggatcttctcaacttgttcgaccgaagacgcgatctcgcccccggatggaggaacccttctcttgctgatggttctagtacctcccatcgatcatcggatggcggaggcagaggaagagagatcgatgcatacacgttcattcgtgatgggaccgatatcgcgagacaacctcccccgtcgtttcttagtggacaaacaaacacgacctcccccctgccgagtctttcattcgatctaggaattcatgctccaaaagctcaataccgaccttggaaagaagttctgacttctcctccgactgcttctgcagatgcacctgtgctggccaatggattatacacgaccgattattctgctttgttcaaaatcgcaagaagatcaggagcctggacgtctaaaatggaaccgatggaccgaaacttggtgggagaaccaaaccgtcagcgtgaccagatggtaagatggaataaaatacaatccaagatgaagtccatcatcgaaaaggagttcccagcccctgcactatcaacgtcatcggcaccatcagcggcatcagtgccgccagcaccatggacgaacaaaagcacaaagtggagggaagagagaaatccacatgcccctcgtcctgttttgacctacaagtcggttcaggaacaaaagaccgccaaccggcaccacgtccgtgactcaatcggaagatctaaacctatcgttgctactcccccatcaaaccctcccactccaaatgcaccagccccaaatttccagataccaacgtaccaaccaaaggtggactctgaaaaggctgtggcggcttggcactcagctgaacacgctagaagacgagtcgtggatttcttcgcaaaggaagaggcgatcaatcctgatgctaactacgaagtcgacttgaagaccggccacggactactcaataagcctgtccgacacgaggtgttggctaatttcatcaagattaacccgaacgcaccatcgtccactcaagattcttcctcttcatccgtgttttctccacccccctcgatcccaaactccaaatcttcgccggcggcaacggcagcgatttcagccgcggtagcggtagcgaggaagtcgtctggaaacatcctgtataactccccccggttgcaaccaaggaacttgaaggactacaagaggcctaagaaatagtctttttcttttctttgatagaaagatatgtagttgacatccgctgcctgaggacgaaatatatatatatatatgtgtg

SEQ ID NO: 1344 - DNA, 20612 bp, Xanthophyllomyces dendrorhous
atatatatgtgtgtgtgtgttgtataacatatgctttcgtcttattctatcaccctcattcgcggactttgagcggatcacacgacgtttttcacgtcttgtacacatggaaagctcataatatactgaagatactgcccaaaaagagagagagagagaagaagacacacgattgaagcacaagaaatatttaagaacaatacgagcataaagaatctatgagatgaccctgccaaatgctaagccgtcgaacgattgagatgataagtcaaacgctccctaaaagatcaagatccatcttgcaagtttctcgagtcgtgagttccaaagagaaagaaaactttcggtcgactcaccatactgcatcttacaaacatgtatgaagaacggcttttcattcctaatatgagctgccaattgttctcttcttgagaatagagaaacaccgacttctacagttgagccactcttagcgcttgcaaggtcttctcggacgtatctgacagcttcttcaccataggcaacgatgttgaagatatcaaactccgttttgtcctgttttactttttcatcaaacgatatcgtgagagacaagaaaaagaggtggatggaaaggtgatgatacagttcaaagtctcagcaataatgtcgtggatcgacgaacaggtaggggtctggcgacttacatctcttgatgttgatgctgatagaatagcgaaacaagcaagatccgtttaacacatggcaatgagttttgaattcttacaaggcgtttcaacgaaagatatgtttgtatggatccgagcgacccctcacctggcatatgtcctcttactatcattgcgaaatcaaagagacagaacacaaatcggagatcagtgtctactcgacgccatcatgcagtgaactcaccgagatcgaagcaaacgcgggcttactctccatacttggaggttttatactcgacgtcaaccaagagcttcccttggaggacggtgtcagccgctggtcgacccagatcagtagagtagcagagctatcttgaacggacgaggatgaatcaaacgaaaacaacaaaggatagaggaatcccagatgaactaacgacaccaacagtcacagctttctacataaacctaaccacttaccctagatgcggaaagacttctggtggtagtattgacagctcgactgaagagagacatgaaggacgatagccgatggtcgacggttgaagtcaaggacgtgtgtttcaggcagatgtattatcgacagaagacacatgtattttcaaagcatcattttgacttgttatgcatctcacatctcgttgctcttgttgtatcaattacatgctcattcatcttgcacactgtgcagtatacatcgtcaagtaaggcttagatgatctatcatgatttatatctcgtcctcgagatgcgcggatatgatcctgaatgacgactatcaggttgtaaacccgtgaagttgtcccagcccgttcaatgttagcgcgccggttccaaaggggtgtctttccaacagaaaatggagccgactgcaaagcgacaagagaaggaaactagcaagtaaacagaaagaacataccgatttcatcttcaacgctctgcccagatcatacggatctttgacggtaacctgataagattgctgtccttctggatgggataatgagggaggtgttggtggaagtgtccaaattgcgctgaccaggatatcgttgatagagaactgccttttgatcgttgtatgtccaggatctctctgacaaacaatcttgacagacatatatgtgtgtcaaatgcagaatcaggatatgaatgagcccagggttcgagtaaaaagaccatgtgaacgagcggaagatcaacagactttgacataaggtgttttggtgggcacaaaatcaccgttttggcttgggtcgaactcatgctcaggctgcagctgtttgacctgaggtgtatttatcttggtgttctgctctggttctggtgatccgaccaatgcatgatgaccagatgtgctgttatctgaagaaggccttcgaagtgtcgttggttcgtgacgtatcgagtttcgttgtggacggtttgatgatcgtttttgtgaaacattctctttgatggatgctcggcaatggttattggtagacggagagtcatcgggaagagaccggggcgatctgatagactacagtgttgcacaactcatcagaaagtacacatttctgatgcacgcatgactcggctcctgactcacttgatgatggtcgttatcacgatgacgatcggatcgacctggtattgttcgactgccctcagaagatgctagagtggcatttcgctctctcctcttgttttcgtctggcttattttccggtttgttctgatgggtttgaggctgagaagatttcgttcggacgtggacctgtggcatgggtcgaatggcctacacccaacagggttttcaaagagttgaacatcagccaatgaagaaaatcgaatgcatggagcaacgtaacctacttgcttcgacatgtcgtccaggagattttccaaagtcattgacgcttcttttcgcttttctgaatcagccagaggtgatgtatctttttcgttccctttgcgccttttgggtttcttctttcccgtttgctagataaagtggaggaaagaatcgttaattttggcaacagaagaggaactatacgacccgactaacctggtggtcattccttattatcatgccctcattttgcttattagaagcaagttccctgggtgtttgtgtttctcgaagaatggcaggtcttgttccagaacttttgtcacgaaccattccttcctgtcgttgatgtcgctgattgttaagtctgacaatcatgaatcgaaacgcaatccatcaggctcttgtacaggacagagatcacatcattcagactgactgtttgttttggttggtctcgttgcgcaaatcatgtgttcgaggctttctctagaggccgtgtaacaagtttgagctggatcgttcaataatcatgatagacagtctgtatggagactagtagatgatccatacatacagagttatcccctgagttcaccttaacagacacggatgttgggagcgatttaacttcaccagatcgccgatcacgatctcttctagacgactgtactggaagcgatgagtctgaagcagtcgaagaggaaggagggcgtttcgcgaatctggaattgctctgtaacttgctggatgccatggctattgattcggtcatcgcgaacgaccttgaagtccaaacagagtgggacgccagcagacgaaccggccgaaagagattcagcatgagatcaacagggttctctccaactggaggtagcagtgacgctgtcttagtagaaaggagagaacggatgagacggtgttgatggtggtcggaggagaccaagcgaattctttttgatgtatatcatctcaaaccatcatcagccagacttgacaatacctcatcccatgagcacggctgactctacaacttcttctcaacctgtaaaacaagcatgcttatcctctgttagccctcaaatgagctctcttgcgttggggatcgctccgactcagtcagacaactcacaaagtgttggtccaacggcgctgatgaactcttcggctacgggtagtccgttcttggcctctttatccaggttagtacatgtatcatttgtcccgttcaaacgacaaacgagctgatttcaaggacttcttatgtcagaacgatcatttttcttattgggatgatgctgaaacgaccggcaaggatattcaggccgtcaaaaggtaaggctcgaaaccccacttgttccatagcaccaaacacttctctgaccttttccttgtacacttcttggatggggaaacagtgtcgacatttgctttcataaaggctctcgctcagcgggatggccggtcgttctcgccttcaggtcttctcaagcttgctaaacgctatggaccgttgtccttagtattgcccatcattccccctctgttcttcaataccattcttaccagtaagctcggtcacactcctactcataattgcctagaacaaactcatatctttcgcttgatgtgtctcatggctagctctcctgttcaccacgcattctgttatatcttctctcttgagcgctcttcccttcttccgtcctccggagcgcacatccggttcagagcctactggatttctttctgaaaccgactccgagccagatacaactatacctgtatacctctcccttctcacccataaccttcacgcaaccgttcatcctacactgctttcgttcttggcaggtgccggcgcaggtgtcgcacaatctaccttggccatcccgctcgacaaagtcatatcatttctgacgaggctgattgtcgggaaacgcggtcatgatcatctgaaatcagggctcggaagggaagcaaagttaccgagcattccaggaacacccagggtgaaccagattggtgatagggctgtgggaggaagtattaagtcgaaaagagacatgggcgcttggttgagagaattgaggaacgtcgggaccggaccgggaggagcgttgggtatggtcagaggcttcgattggggtgggatcaaggattggaagggattaggaaggttgggttggcaaggatggagatggggagcagcgaaggatgctgttgggtatgtttctggtttcttgctcttcctttatggtccagtcttgctctatgttactttgagaatcttggatgaaaaagactgatcaccttgtgaccccatcatctcataccttatgatctttgacacaggtacggacttttctttgctacgttcgacacctctcgtcgactggccctgcatgtccgacatctgattgaggccactcagtcagatgcctcacgctctgtcgacgttgtcgaaaacacatctcccaaagtgaaagcgttctttgggatagaagatcggacgagacgtaaatcgactgataaaaatcattcaagagtagacgatgaagatcctgaggaagaaggtgggctcggttacgagggaagcaagtgggcgagggtcggtcaggcaaccgttttaattctcgtacgttcaagtgtctttcagtctttgataaagttataagttgataggtgtagtctgatctgatgacaaaatcttctgatgctcgccttgattcgcgctccgttcaaaagggtgggatctgcgctggaacactgtgcgtcgtttttatacctcatcgcgtgtgctctccttggccccgaaatttaatctgtttattcacctactcttttcagatttacattgtcaactcgtccattcgacgcgatccttcacctgctctctgctccctcctcctcttcttcttcctcctcctcttcgacgccttctccaactcaattcaagtttcctatcgtatcaacctccaatacctcgcttgctccacctcctatccaacctctccgcacacaccggactcagcgagtgatcaaaccaacctgggaagcatccttacctcgcgctattccgttaataacaaagacttggaaaaagaagggccctaaatacttttttggtccccaaaagggagagaatttaggtggaggtggaccttggaagaggtttggatggagacttgttggtgtagccccttggtccgtactgtttatattgacatcatgtactcttgcttcaaaaagaaagttgatatagaggagagaatgattgatctctcttcttttttgtgcgttcgtcactgaaatcttctggacttgtaggggctgtggtttcctcgtcttcgcatggtatgtattgttcgtgttctttcagcgtttgcttctttttgaaagcgatagtaatcattcttcatgttctaacattctacagggttgggggggaagtatgatatgataaatcacgtaaaacttgaaaaccgaaatctgcgtgctagcggtgatcaccgaagtagacgagacgactttcgtttgaacatttgattcctatttttatctattcattctacatcgtctctctctctcattttgctctctcccctccctctatcctcctctcatccgaccaacccaggagccaagagctccaggtcaagacactttgctggaaacgttttagaaaatagaagatagaatcaaggttcgacaccaatgtatctttagatcccgtatcaaatggatgatcttacatctttgccggttcatcattcttgaaattggcgcaaagaccggacgggccagttcggatgaaaatccagatgtggaagacttgtgtcgaaaggcttgcattaagattgctcagtttccccaatcaaaacagttcttccttctttaccatttctcggtttgcctgaaaggggaagaaactaagaaaggcgaacatgaatatagaagatgatttatcatacataacggatgagggaagaagatccaaggttgtagtgaaggaaagaagggttgtgtatcaaaggcatgtgacaaataacacgaaaaacaagactgcaccaagaaagaagaaataccatactaaaggagagagacagagtgaaggtccatgtatgttctctcacatatctctttcaaagtttttccacgcgtgcttctcgtaagtcttttgcgtccttgctctgctttgaggaatgatgggttttcgaggttcgaccaatgctctttgttgcatcgaggtaaacctatccttgaacaagttaccctccggctgagattcaaagatgatgaccaggtcagtcagtcattcatgtctgggcacgatatgaagagacgaaaggaacgagaaacatactttgatagccctccaactctcactcaaatcctctcctagttgaacgtcttcctctatgccgacgggtaccacgtgtttaccaaccttgatgcccttcaagccagcctggagtcttgcagctctagcctctgctttctgaagcatcatttggcttcggagcgagtgggtcttctcgacctgcttgcgaagagtcggaagggtgttgatggtttggagaagttgtttttgtttcaattgagccagacgggcggcttcctgtggggcgcgaatgttacaaatggacacgagataagatggacatcatgttcagtcagctgaagaaagatgaggctatatgattgagagaacctgatgaagcgaataaagaagacgaacctcagcagcgagtttatcagcctttttcctctccgcctttgtcttccttgcaggtgctttcttcttcggcgcctcgagcttttcttcatcctcctcctcctcttcctcctcgtcctttggcagatcgaccctcattccgtcaacccagtcttccgtccagcccatcatctctccctccgtctttctcgcggcgtgcatcctgtccttgacaatcctatccttctcctccttcctaactctggcaagctccttctcctcagctctcgtgagcaaagcctgatgagcttcgaccgtagggttataactctgaccggtgggaggcagtgggatagcaggcacagagatcttttcgacggattgtaatgatcgtgggaccttgatgtccttggggacgaacgtccttgcctcgtcccattcggcgttctcgtcgacttctccattggtagctttggactctgccaaccaatcgtattcctctccaggatgaaggccaccgaacagagcagaaccctcgccccaccgagaaggatctctctcgacgagtgctccgaaaggaccccggatgtcttttctagcgattcgaaggagccgctctttttgctctctggtcatcttcttcttggcaggaggagcagaggaagaaggccgggagtagacagccgggtgagaggatcgttggaggagtaccttttggtagtgaaggagtttctttggaggagaaacggtgggagcttgggctgagcgttgatagagtagatacagaccatataagggtaagcccctcttactccgtttccgtttgtcccacacgatagtagttgaatggtgacaacagacggtcttcgaagaaagacatgacacacaaagatagaagcttgacacgtaccaccagattgaccaacggtatcaacaacgaacaactcttcgtccttcttgtccgaaacatgccctccgatagtctgctccttagctctcctaacatccaatccatcaagaatatcgccaatctcactggccttcctccaggacgatttcttgtttttcgaaacctttcctgtcaaacggggagcacctattgagttggacatcacggacaaaagagaacgtgagaaggaaacaaaagaaagagagaacggcaagtttgtcgaaacgaaagagaaagtccaaaaaagtggcccagttgtaattttgatattttccgtttgcaccgcttgtggatgctaccggcgggctatctccgatcacgtgacattcgatatggcctttcaatgtgtacatctatctcaacatcattttgaaacagcagaggcagagaaagacaacacaagttcatacaataactaaagttcacaaaggtggtaaggacagaaatggaacaacaaagaagacaaaacaaatggatgtacagaacattgaaatcaagagaagaggagccaaatgagacacccgatcaacccctttgagcaaccttgggctcccaagcattcaacttggcaccggtggtagagtaaggtttgtaagctcctcgagtacctgtcatgttctctcggtggggctgttgcagatcaggagtggtaaaagagataagttattgagtatgagtaaaagttgatggatctttcctggcagacgataatttctccgacaaggtcagaaagccacagaagacaagggaaaagacgcacgagcagccatgtgggagtagactccttcatgatagggtcgatcgtaggaggatcctttcggatgtggttgatccaagagtgcctataagatcgaatgaggtgatggttatgaaccgttattaaagagccatcaaccctaaacaaatagaaatctatggaagcaatgaacttaccactcaggagggatctgggacacgtggtagttgtgctatacatgtatattacaaaaggaatgagatatcactatctaccactctgccgaatcttgttgttacctgaggacctgatggaaacatacctgagcgtagtcgacccaacgatgacgaccaggaatttcctcttcgggattgtagttttggaagtactgtagtgacagtaaagagttgtcggtttaggtcgttagccaagctgataagtcaggccaacaagtcgaccggatggaccgaggacaaaccttgtttccaaatctgtttcggtgagaaccaagacagaccgttagatggcttgatcaagtgctcgagctaggacgacggcaaggttgaaggacgaaaacgtaccgatctttaccaacactaccaggtttcaagatcatgaccaaaagcaacgaaagagaagggatcacgccgaacaagttagatcagaattcagaggaatgaacacagctcaattgacgtatttttgacacatcggactgtgtcgttctgttgaacgagaataatggccaaagaaaatgacatacaaatctccagatttggcatcacagagatagctagttcgatgagagggtcaagcaatcagtcaaagggctggcactctaccaaaggcataaaatgttgacctgtgtatgattgctcgtctgaacaaaggtcaactcaacggccacttacagcatttgtcggaaccaatacttgactccggtcctgcggatctggttgtgagattgagaacatgaaacaaaagatagaaagacttagacaagctggtgtagcgattgatttgatgaagagtttgtggaacgcatctctatccgagtggatggacgggcgaacaagctacgagattgaactatcaagttccatgatgtacgcacgtttctaatagttctggctagagataccatggccagatatgtatttgctctgtgtgtgtgatctgtgtggatgtgtaaagatatgtgtatgtgtggatgatgatgtcgatgtctgaggatggccaagagagaagagaaagagaacgaacggattggctcccggatgggatgtctggttacaatcgaacctgtttgcgaaccgcgggttccagtcggttggtgagggctcgaccgggttgatgggggttcagaccggttcaccgtgtaaccgtcgccgggttacactcattccgtaccttgtgccttgacttgctccgttacttcccttctctccatccaatcctcacccaatcgacatccatacagagatctcctcaaggaaggatgagaatcaagaccaacccctacgatgtggagaagtccatgatgcgaatggtcagtctggttctttgtttcgtttctgtttctgtttccctgccatgtgttgtcttggtctctttctttctttttttttctctctttttttctttttcttttcttcttttttgtagctcctgtttgcatacatcagatcagatcagcaaagacttcttgcttctgcttgttgcctctcaggctgaagggagataagtaggaaacgctttcttcctccagccatgctgtagatcgtctttctttctttctttcgtcgagagaccgtccgactacatatgagtctactagaatgaaatcattacgctagcatactaaagccaatttgtttcttgatcgtctcggcacacagggctggaacccaacgaacgtctacaacacatggaaacgaaacgccggtccgctcgctgggcagtacaacttccgaaagtcaaaggattcactctatcagcttcgattccgaagtaaacagcatctgagagcctattggggtggttccaagatagaagatagacaagtcagttcccttctatcttctttgcacttcaaagctatacatgcttggcgcttatgtacaacggctttgtccttctttctactctccaccgcaaacagtttcggaaatggtaccttccttccgcactcccactcatcgttccctccgccttgacgtccccaacgttgaacccgaaagcaacctcgatcacccgattctctcaccctggtaaagaaggtggaagacaccttctcgagcaagaggagatgttccgttaccatggatcccaggccccagtcagcccgctcatgttcagagaagtcgagcgtcggctggatcatgtcatcttcagaggtggttttgccaggtcggccgaagaggctagaggtcttatcggttcaggtgccgtcaggttgaacggaaacgtcgagagacagtgccagatcaggcttcttcccggagactttttggagattgatccgagcagtgtcaagatgttgtccatcccggacggatcgtctattctggccgcagttgacaaggacgtcgtaccactgagaaagaggcaggagcttcttaccaagaggccgagcgccacgccagtcgatgaagacggagaagagagtgagcaggctctgggagaaaaggtcaacaacggagaaggatggaaggctgtatatcgagcgaggttgacaagcttgctcggaatgggagctgctgaggtagatgccttgttcgagaaaggcgaaaagaagaccagagatctttggttgcgacgatggaacgcaatcaagaagaaggaagctgacgctcaggatgcagtcatgcagtcgaaactcgcctccttgagtcttggatctccttctgccaccactgattccacaccttctccttccgccgatgtcacttctgccgggtcttcctcggaagcctcttctgaatcttcttctcctaccggctggcaacgaccggcgatgaagcccctcacccccacccaccacgtcccacagccgtccgaccctccgggcacccttcatttcaaccttcctccctttgccggcccatcgctatttgtcccggcatacctccaaccgaactatgcctactgtacattgacctacctccgacatccgaccgcgagacacaaatacgaagagattccctctccgttcgacgcgaaaggagacgtgatgaagagcgcttgggagtggtatgtgcaacgaaggatcagaatcaagacgtttggtggtggactcttcccaggaggaatcgacgcgagggcgagactcaagtcaagaaacagaggaccggagatcaagaggagtggtgtggtcgaggacttttactaaatgggtttatgatcatgaaatcaaatctcctgcttccgtttctcttcgtccgaggtacatcgaccacgaacaatgtgaatgatctgcactgctgagcgatccatatgaaagagacaagaaaacatcccacactgaatgcgctgaagagaggcgggaaaagaacgatgacgtgaaatattcggaaattccacgtttaacttcactgccatctcttttcccttcttcacccgaccatcaccctctctttcttctagcctcgtgccttcagaccacttgtttctcgtacaaacatctctcataatacatcagatacatcatggatgagcgtatgttctgttttcacccagtagcgtgatgtcagctcagtctaaaatcgcttaacgcttccttctttctcggttcctctttcaagaaatcgcacagttcatcagtgtaacttcggccacgccagaggttgcccgaacttacttgacacagtcgaatgggaacatcgaggcgagtttcttttgctccatctcttacctatctcttatcgtataacgtcgaagaaacgttttctaatcagtcggtgggaattcgcactgttttcaataggaagcaatcaacacctatctcgccgctactaccggtgaggacgatgagatcgatgacgaggatgatcaatacggagacgaggcaacatctggttccgctagatcatcggcaatccgagaagaaactgggagcggaaacactctgggaggaaacacgttggggggagggactgctcaaagtagcttaccagacgactgggcgcaaaaccgaagtcagggaggaacgggtgcaagggttgggagagtcggtcagtggggttctacaggcaggttcgtttgtagttccatcttcttttccgaccaggtatagagctttcggtgtgtgatcaagcgaatgcaggacttacgccatgggtctactcccgaatcggaaatcagtggatcaggaagctcgacacctcgatcaggaggaggacctaaagttgcgacctttggatcgctagcttcttcgtcgagcgcatctatgcctagtggaggcgacgatgtgagtcatagattgaactacctttcctctggcctttcgtgatcatataacgttctcatcgctcttcggatgctgatcgttgattccgattaattggccttatggcgtttagtcggacaaggaaggagaggattggtacgctggtggagagcgcaggtatgtatcaattgtttgtttgtttgtttttccttgtaatcctgaatgtggttcaaaagatctgatcgagtcttaaaaattgtcattgagttggtagtgggatcaacgtccaaaaccccgaccgagctcccgagggccgaaatggaccagggatcgtttctgatattttgaagaaagcccgacagttcgttctgttctccatcgacctcttagattctcaggttcccattcttccttttactatcatagaacttaactttcacgaacgttgtgcttacaaaattacagagccggtcccccgccttcccaagatgatccttcctcatccacgggcgctgctccctcttggggatcaggaaacacgctaggatcagatgtgacagagtcggttgctgtccctgatccgaacagacccacagtaggatcggctcaggatgatgaagacgaagaggatgatgatgaggtggccattcgacatctgactttctggagaaacggatttagtctggaagatgggtcggtaagggcttatgatgcgcctggaagtagagaaattctggaggccatcaacaatgggtcagtatcttgttcaactccattgttgggtttatccaaacagatgaagaaaagctgattgattggcatgattgaaaacattacagaacggctccgctatcgattctgaacatccgacctggtcagcaggtcgaagttcgagttcagaaacgactgaacgaagagtggcagcctgctccacctaagcctcgacagcctttcgacggaaccggttcgttcggacttcatcgtcatcttactatccatcatagcttccctctcatatcattattgcctacttatctctaattcattttgtctgtgtaataggaaaccgactgggagcccccgttccttcagttgcttcatcttcttcaactggttcatccatgccaggatctttccagtccactacagctagcaccagatctggtactggtactagcgctagcgccagtgccgaaactagcaccggattcgaagtggatcaggataagccggtgacaagcttgcaaatccgtctaggtgatggaacgaggttcgtctttgatcatttacattctaacttgttgacaaggagctgatatgatcaattgggcacgatatgatgaacccgggctactgggatttgacaggatgcctgcaaaggtcaatttgactcatactgttggtgacctccgacgatacattgactcgtgcgtctttatatatgtttctctccttctctctgtctttctgttctgcaccatactcatacaccatcgtcacttgtcgatgttgctatacaaatacgaactggttgaatcaaaaatctgtacgtaacagatcaagaccagctcaaagacaatacgtactgcagaccacgttcccgaacaaggatctcacggacgacacccagacgattgagcaggctggcctgaagaatgcagtcatcgttcagaggtgggtctgagcgcatttatggtcaagcaagtgggaaggaggaacagtgttgcggtgagatataatgaagatcctcttctttgtttcaaatctccatctatttctttgcttagtgatgcagcgagaggtatttgagatgtgtacaggcataaatcaaaacctttctgtatcagacttgtctctcggtcgtgtctttgactaaaggtttgaacactgaagatgaaacatacacaagtgagacaatttggatcgataatgaacgggcaaacacacatcgtacattcatcttttttctacaacatcaacatgcccacgttcttctctcttccagtcttcttgaacatcgcataacaaacccactctccaccaggcttgggtctgatcaagcttcgaaaggagcacttcaagcttcgttgatcgtgacgaacaatttttcgcctttccactcgactgaaaccctgtttcaaacagagaacccaaaacaaaattaaaaaaatcaagatgagtagtgcgcttgacgccaggaatcccgactagaaacaaggcggggaagaggatgatgagaactcttcggaacgaactgagtaaggtcagcaacgaagtacgtcgggttaacctgttgacacaaacacatacattatgttgacaaaaaaaattaagtagagtgttgttcaatacaaaaatacatgaaaacacaaactgaagataaaaacattgagaagctcaaagggggaaaaatggaaaagagtccttacggctttaatggcaggaacatcatgacctgttccgacagccagtacttctgagccagctgcgagtcctgcgcgtgccccagaaggagcatcttctaccaccaagcctgaagagccccaggataggtacggttgagaaacacatatcagttcaatctgaacgttgggacgaacgatgacaaatgaaaagatgcgaagacgtacatttcgtgatatcaaggcctagtctatgtcaaatgaagcatcaggcgtgattgaaaagcaaagatatctcttaatgagaacagacttggtgaaatagagagatggaaagacaatttagaaacaaacctcttggctccctcaaggtaaggatccgggttgggctataaacagaagaacatgatagatccgtcaatatctcatgtttcaagaacagaacgtcatgaaatttgtagttcgtagtagtggctaaagttggttgaaagggaaggaacagagaaggacagacctttcctttaggtacatcatctgccgtcacgatcacttttggaagctcgcccaattggtccgagagcattcccaaggcagcttcagcatctgtgattcgtgtttttgttagcaaggatggaacaacccccaagagaaaaggacagtagcacaggcacaaaaggcgttaggatacgctcaaacccagtcacagtatttcaaggaagtaaacacgttggcgcgcaggtcaaagacctcgtgttgagcaacatattgtaatatgactagtaactcacaggcagaagtagcagaggtgacgatagcgtaccctgtcgatcgacctgctcggagcttcatagatcatatacagaatgaccaaacaaaaccattcgaaagaattaattatgttcagaaaacaaggctggatatacaagaaaaacaaaaggtgagaccaacttgagagagtacagcgggaactccaggaagaacatttaagccctccttcccctatatgaaatgaattggtccagcgaaaccgtgagatatctcttacaaagcatgaacccgtaagaaacgatcggaagagttgggcttacctcggcctgaagtttagtggccattggaataatacccttttcgaagttaacgacctccgctgccctgtgaatagttttgaaaagggagaggatatcgattcggacaaacatgaaccggtccgattgtgccgaagatcgaagaattcacagtgaaaccccaaaagagggaagaaagtcatagagaagagattagccagaagaatgtatacacgaaacggaatagattgcaaggaagaaggagcacctctcttcgtccgtaagatggggaaggtattttcggaaggtcatatgggtttgaacaccatgtgagtctagacagaggagagcatgccatcagctcacaaaagatcaatgaatattcacatcaaacttgatctctgatatatctgactgaacaggatggtatttaccactaagcatctgttttagattcagatcgtactttttcgcaaagtcttcccaaactccgttgacagcaggggtcgaattgatgagcgtgccatcctgaatgagtcatgccgaatatcaaacaacgaaatatgatgatatgatgatctggtcaataagagtggcatagaaagagaaggtggcagcagtaaaaggacctatttaccatgtcaaagaggatagcatctatttctaaagtgtgggaaggcatgtttgttaagacgctcggagggagtgtatcaggtgttggtggttaacaagcaaagagatgcgatttttatatctagaccaactcattcgacatgatcagaaaacaacctctatcattctttctttctttctttctctcttatcgcaatattcgtgttgtaagtcggccaagctcgttgaattaattaggcatataattgaacaagtaccctataagatgggtgatcaggaagagcgagaacagaaacgaggaaaataaccaaaatcaagagttcgcgaccagatgggagaaagaaaaaagaaagaaaaactatgataaataatgaggatgaggacggagcgaacacatcaaatggcagcaaccctcaaagatagaagagacgaaataaaagcacaagacagagaggaagtaaataggaagcccggaactcccgaaaatgttgagacagtatatgaaacagtgaaccaaatcaaaagaatctggccaagggtactattaagaggtgagatgtagagcgcaaaacgaaagaattaactgatcaaccatcctgccggtgtcgagccgccgtcctggccggatattggtccctcccaatcaaatccatcaagcccaccactgaaatacgcatcctcgcccatcaaaaagatctcccccgacggcgtctcgttaggcaaaaggggagacaccgagtttttcaaccctgtcgcaaccccagctccgggacctgtcggtacaccaccgcccccaccaccgttacccccttcagccgaacttggaccggcgtcagtttccgcttgatcaagacgtgtcgagcctgactcggcctccttttgcgcgagtgagttctttggaggcgagatcgcctctttgagcgatatcggagactcctcgataccctctgtaggctgaatgagatccggcgtggctgcactttccggcggtcgaggctccggctctttcgtacttgatcccgatccggactcgttcttcgctgcgcccttctgtccgtcaatcttggactggtcggttgtctccgttgactctgagttagccgctggctcgtcgtcctctgcgaattgagaatcatcatccctaatgaagaatgagatatcgaaatcgtctggaggaggagttggcacagttgtcggcgaagatggacgtaacaaattagggaaaggcatgaaagaaggaggtcggatttgttgcagttgtttttgaccttgtacagtctgctgagcttgaatgctcgagagaaccattgaaggtgaggtgaattgcggggcggtcaacccttgcatcgcctgggagagataagccggtacggcgtcaacatccagatgcgactggctgacagactgcaagttcgaaaactggttttggaagaatgccaaaggatccatgttggcgtcttgatcttcttgtttccgtcttttgagctccgtattagcatccgtctgcagaccaagcatcgagcctgtttcctctccttcgatcaccggcttaacctggtttgccaaagtcgagtttgacgcagcagacgatttccgtttccttggcttggtctccttcggcgacttcccaaattgaggcgacgtctgagtcgcaggcgtcttgggtgtcttagcgtcggccggagttgaagcaggggacgaagctccgggaccggtggatccgttccgttgtcgcttcgtgagaggcgctcgaagatcctccgcgcgaagacggacaggaggagtaaacgacgtgtggtcaaaggagctcgcagctccagcagggttgggcatagagaggttcgggccgttatgtaacaactgttgttgttgttgttgttgttgttgttgttgctgctgctgttgttgctgttggagttggagctgctgctgttgctgttgagcctgttgttgggacacaacctgactggcctggttgttcgaagacgaaccacttcgagacatgatgttacccacgaacgcgatgaacttgttgatgtttagcttaatctgatcaagttccctaggcttgatgatgatgatcgctcgggtcgcgagacatcggctagcgtatttgaccatagcaacctgttgtcatcgtacgcgtcaaggtctccgtcagccgatttgttctgcttacaatcgataggacttcctccaggatgctgcgacaaccaaagcagaagaagaaagacttgccatatagattatcttcttggatgatgccgcagtctcttccgaagggaacaatgctcgatagagaagcaagcccttttcagtttccatcaagatcggtggcaagacctctcgtagtaatctcacagcgtctgttcgctcctgatcggaaagaccatcgatgttgttgctgttgcttgaaactatcattcattacgaatttttgaggaaaatagcgccaatctcagtttggaaacgggtataacagattagatagatgaagaacgtacgaaatttatccatcgcttgagcctccgcgatggcgatgaacttctttgcctcctccaactgttgacccgtcgggatggatcttcctccaggtaataacccattcgatgcggtccctgggccagtgcctccattattcagaccctcaggcttcaactgctgttgctgctgaacttggtgctgctgctgctgctgttgctgttgctgttgctgggcctgttgctgttgttgaagttgttgttgctgttgaagaccggccaacgcttgctgttgttgttgaagtgcccatgcctgggtattgttcaattgctgctggctctgctgattctgctgctgaagttgtctcagcccaggtgccatcccggcagtaacgccagccccaacgccaagacctagaccaacaccaccagcaccaacctgattgatccctccgtttttagcggcctctaccatacgaagtagctctggggcgagattgagtgctcggatctgagcgggagtcatagctgcaacttgttgaacaaccgtaggattccattcagatgcaggagggatgttcgttgagtttgcgttggactgagcaaacaggtttgtccccaggttgttggctccaccaagttgctgttgttgttg

SEQ ID NO: 1345 - DNA, 22497 bp, Xanthophyllomyces dendrorhous
ttgttgttgctgctgttgcttctgttgctgttgctgctgtacgtgaagctgctgaagttgttgaagctgttggagttggggagattgtcgaagttgtctcctttgatcctcgactgcgtgcttccaggcgtcttcgagtcgggcaaggaaggtagtaaagattccagccagctgattggctacatcgggagtacaacgcgatggcacgtccatcgatgagggtgaggcgaaaccgatttgacctccaataataggccaatggttctgattccggacctacagcacacgatcgtagagatgcctgttagcaagagaaggctttcgagatcaacaaaaagaggggaacagttgatagcagcatacctgatcacttcctcccatcgcgatgacagcttggtagagcagaaacaaatcgacgtcttttccttcgatctgaggcaacttctcgacgttcaacccctgagttttgaacagctctgccagcttcttgaagaattgtgttctcctcgcctgatttgcttccgagttctgagttgccaggtattgctgcagctgaggtggttggatgagtcccaaactgggagatgcattgattgcttggttcccaatctggttcgatccggaagctacgttcgggttgataacacctcctccgaccagcggggatgcgagcctaggcgatttgttgaaccctgcctgctggtttattgccggtgagttcaattgaggcaccctaggtgatccgttcaccccaagcgaatcagagttgatccctggcggatttggatgaccagcagccccgacaggcttgccacccaggttgatccccctgttcttgcattccgcaaagagcaaccgaacctgttttcgccattcagtctgagcagctcgagccttatccaacgattcaggtggaatcgtgttctaaagaggggtcgcaaacaagattttggattagactcttggtctcgtgatatttgatagaaggtagtaatttcgagatatacgtacaccctgcaatgatatttccaagttcttcagcttcattgccagatccgatgtcatcgcaagaatttttgcatctggcacggcggcgagactaggaattccagctgtaggcggctgttgttgttgttgctgctgctgctgttgttgttgttgttgttgctgctgttgttgcgcgtgcaaggatgcggctgttccgatggaaggagatccgttttggcgattcaaaggcatgttgaggttggtgggaatattgttttgaggatctacaaagagttgatttgtcaatccggcgtccaacgactcacttataaataacagatagaaacgtatacactgaaggagatcaaacatactgagtttcactattcctctttgttgagccatgagcatcatttgtctcaactgagtgtcatgaaagagaaaagataggcgagatgacttcagttggtgggatgatcatattttgtggatgacaccgtagagaattggagaacatacctgagcgagctgttcctgtgtgagcgatccgttctggtacgacatttgcaacgcctttcctctttcccccatacttgccaagagtgctgacagctgggccgtcaatggttgaccttgaccctgagattgaggaagagggatgttcccttggttctgaggttggacagtgttaggttgttgggcaggttttgattggagtggaggttgttggagattgaactgttttcgagcataagcccgtgacacgatagaacggctcaatcatcagtataagtgtatcaacatgccctgacatcacagaagagaaacctcctacctgggtttgatcgaaacctgtctgttgttgttgctgttgttgttgctgctgctgctgatgttgttgctgctgcacctgtaactgctgggcctgttgttgggcttgctgagccatgaagaactgtacagggaagtgagaggaaggaaaaagcgcatcaatcctccgagctgagaagacttcgggcgagaaaacgatgatcgaaatctgaaggagaagaaggcaagcaacaggaatgggaagaacaaacgaacctgtaaaagagttgcattgttggttcctacaccaggcatgccaccttgtccagcttggtttccactttgctgttgttgctgctgctgttgttgttgttgttgctgctgttgtccgctctgggctctttgcatttgagcctgttgttgttgcagaaacaaagcttgttgctgctgagtcgtgttcatcctgggcgaaggattgacgtttgtgcctcccactgagccaagaggtgtagaaagattgccgggtgccggaggattttgagcagagaaaggtctctgtcgataggatcgcagactggatggaaccaagagaaccccgatgaagaagaagtgacaagatgacagacagagaattagatagaaaagacattagctttaccccttgactcttcatgctaacgagatactaagagagtgcaaaagggtattgttccgagatgagtacgtacagctagagagcgagcgagcgattgtcgagaatcatattcagcgttcacgcatatatagcatcatccgattagaagaaagaaaagaagacagagagtccagtcagtgaattgactcgatcaggaccaccatccgtgtgaacagtgaaggaaggcgtgaacctctcaagaacatgacaagcaaggcgatcaagagatgaaagtgatgaagcaacagagacaaggaagatagaacagagtgcaagcgaaggaaaagttgtaaagattttgctaggtcttgaaacatgctcgctcgtctgtctgtctgatatatattccacgctgatggaactctcgcccaccacaagaataaccccaccagtcgctataaagatccggatgaatccagtagacagagtgtttcaccacgaagagaagatagaccggcaggtcctcttctttgcctcgctttctaactgcatatcccgacccatattctgttcctcaacgaagactgccttgtgtacgtgcgtccagagaaagccccctccctggacctttacgcatgtccatcactagattgaaagagcgagaaacttgccgacgtccatccagtgagaacaaaaaaacaacgaacctgttctgtatcttggaccgcgttggttccttgtggttgctgttgaggttgttgaaacgtccagttctccatcccgcagttgggaggtcaggctgcttccggaaggagaagaggaaagaggacttttttttcttctttatatatgcgttttcttttctattctggttttttcgacgatcctcgattgattcgaactaagaggtgaactgtttcgtctgggctgtgatatcctcggaggagagaagactgccacaaagatagagaagatgggccgtcgatggatgggagaaggagaacggtttggacgcaacaggacgagaggtggacgaagtgccggtgaaaggaaaaaaggagcgaccaatttgcacgcgtctcagaaagtcagaataggaaatcttgtggaaatgaatagagaaattctatccagttttgtaatcaatcgcgtctctcgcttctcgtttctgtacccatttaattataccaggtgtaggtcatcgcatacacacactttggatgcacgaggaccacgagaataagaggaaaggcaacatatatggttcaaattatagtgtgttcgatcattcaagcattttcaaccagcacagaagtagaggtgaagacaagaattctttctgtcttctttttttttcccttgatttttctaatgatctcagcaggacacaactttggtctcaccaactctcgttcccaccaacgacggcctcgccaacaggacttacacctgcttcctgctgaagctgttggaattgtagctgctgtagatgctgtagcgtggccaccacgcttgagtgatcttccaggtcgtccggtccgaacgagaaatgatgaggcccgtcgtcgagcgagagcgtgaattggaccggatgcgcgttcgatgcatccggatcacgatccaaatcagtacctctaccgagatcacgctcggggtcgacggagaagagtggtgagagagatcgaacggagggcttcgaatggtcaaatgataccctgttgggtgatggtagtgatgatgtcgagtgatggtcaggaggggaatccgagggggttctcgcttccctcgtcagaggcagaggaggtggcgacggcggaattgacggtggatcgatcgaacttgggttcggaacgtggtcaaacgaattggtcgtcgtgatctgaaggtcggtctgtgtacagatgtatataaatatatacacacgtatgtacgtgtgttttgatggaggcgttagccgtcaaggacaagtaagaaacatcttgagtttttgcaccttcttcagctcccaagacgaaagaaatgtttgaacaaaccggctccaaagaatctttcccactctccctcctatctcccaactcacttccttccctactgctcaacgcgccaatatccatcctcagtataccctccgcctctggctccccaccttcatcctgcactctgtccgcatcgcttccttccccaccggtagcttctgccaacgcgacggccacggctgccgctgctgctctcgcgttatggtcatccacataccgatcaaagacctcacctatgcccgctctcatgttctcataatcggtttccatcacgcccaacgttctctgaagatggtcctttagtccgtcattcatttgaagggcgagtaacaatgtgctcgcgaacaagtgtccgttcggggtcggacctgttgagataggtgattctgatggatgatggtgatggtgatgttgttgaatatgattttgatggtggtgatgatccccaccaccagaagaaatgttcgtgcccgtcccgttggttgagttggaatgtaaagaaagagcggcagataggtcaaggatatgctgtgtggtcgaggatgatctagccgagcgagaggacgattgatagccgccggctgatggaccgggcgacggagatccatgggcagagtagtgttggcttaggtcggactgtccagtttggtttggcttccgttttttgcgtgccgcgttggccgaggcttgggcagagttgtcaccgacaacaccaacgccagaatgacttcctggccgagtaagacccattcgacggtttgccaacgttccgtgagctgttgatgtggatgcttgcggttgagacgcgtcttggagtattagagatggctgtggacgaaagaggaaaggaaagggagcaaaacaaattcctattgagaaaccccacgaacatgccacagaacggaaagtgaaagtgaggagacttttgttactcacatcctgagatttttgagctctatctcgctctcgctttcttcgctgtctctctctaccctgtgctctgatctttgccaatcgatcctcgtcctgattgattccatactttggtctctttttcttcccaccagctcctgctcctcctagccctccgccaagacctccacctcctctacctcctccctcctccaagtccaactcgccatcgatagttgttgaatcaacctggtcagcctgaccattaaggtctaatgaatggtgaccttccagatcgacatgactgcctgaacccgaatcatcctcaaggtggatgaatgttccttccggaaggctgatcgacccgtcttcatggtgatatgccaagtgttgctgctgtcgttgtcgttgttgtttttgctgattatcttcgtcagctctaacgacaccgttctcttggtcttgttgctgttgctgttgctgttgctgtcgattatgagcatcttgtagttgttgaagttgacgttcgaacgaaggatgatgttgctctagagcgcgctgcatttcttccatcggcagatcgatagattgatggttttcgtctctattgtcatggtcattctcatcatgaggctgacctggttcgtgactatgggagtgatgatcgaggtggtcatggttgaggtgatcatgatgggagggaagttcttgaaccgactcatggtggttgacgtgatcattgtgaaggtgatgatgatgatgatgatgatgatgatggtcgtggtgcagaccggagctgtcgaatgagggatggggatcttgggcaaggtcaactcctaaggaagggtctcccagcgaaggatagctttttgatgtaccaagagggtttacaagtgttcatgaaggtatgatagaggagcgaggagagagtgagaagaaaacaaaaaggtgagcatacaatcagacgacccttctatccattgggatccatgagcagctctttcttttctcttcttctttttccttacttgtggctgctatggagccacctcgacatgaacggctgaagaaggaggagagaacgtactcttgcagcggatcattcatctcgagtacgggcccatccaatcctaaaatatcccgaatctagctctactgaaagacaaatccgagcctgctcttaaggatgtgtcgagcgagagaggaagagaatgaaaacacaacggagaggagagagaacaggtgaatggtagggtgtggactcagacggttctgttggtcaatgtgaaattgttgagtaaagaaatacttgagaattctttctcttccgcgcgcgaaaccgcaccgggccgaagcgagttttctcctcatgtgttcttatcatccttctctactgtaggatttccgcttctgttcgggaacagcgtctctcagtcttgctgatcatagaaccgctctctcaagctaactgaactgccaggcgctcatctttatggaagagggccaagtttaaagtagactcttagtgtttaaccctaacatcggctgtggccatagtatctatgccaagccctctaatgctaacgaccagcaacactaggaaaattgtatgttcctcgacaagagcaatcatgattcatccattatccgcacatatcgtccaagttcatatgtgggcgaacaagacccgcgcacaatgactgaaggcttagaagagtactaagagtggatgaacattcatgtcgctgtgacatgctgatgttgttcccgacgggcgggcgggcggacggacagactaccggctaccaccttctgactcgtcttggttgagtgtgtatttcagatcagcacgaccgatatcaatctcgagagtgatgatgatgttgatgttgatgttgatgatgaaagcagtggccttcgtgattgtagttgtatccggttgcttgacgacaagccttagggattccaaacgttgtggcgtcggcagacaacgtgactacgtatgctgtgcaccactgttacgctcacctcatccatcttctcagcatacagatcatctactcaccgcccaacgcccaacactcaacactcaacccatctggctagatcgcttccttatgccccttctattcctcttcacctttgccatgtatgtctaaatatgttgatgtcctccatctcactcagatagaatagccacaacagtcctggccggccacgatctttcaccgtggcaggacgagctcagcaactctttgttacactggttactgacatatggttacatcccccactctgctttgtttttcatccgttggggtttttccactcttaacttgcacctccatcaactcttgggttgtgttcttcctccagcacatcgatcgtcctcatctcgctctttcatctgttcgtgcaaccttatttgcacgaccttgctctctggatcttgcctcctccccacatagatctttaggtttcccccaaggttctcaaattccgatcgtccctagccgatttcttcccctctcccacccgaaaccttgctctcttcatctctcatgagtatctttggatttgatccggccgtcattatctcgctctgtcttggtatggggctgagcattggatcgatcatcctgttcaactacctctcctccgagagtgggtctcgtcttttttctttttcttcttcttctccatctcatacatcattccctggactagttttgtcgaaactcatgtctttctattctcgccctttctatcgttcggcgcccttaaagaggctagcaagaccgctctcgatggaaccaactgggctcagtacccgttgatcaagcgagttgacattagctctaacactgccgtgtttgtatcgctcccatcaatttctgcacatcatggctcttactgaaccgatcccttctgaacgacagctaccgattcggtcttccctccccgacggccgtccttggtctgcccatcggacaacacattcagatccaggccaccatcaatgacaaggtcgtcacccgatcgtacactccgacttcgtccgacgatgaccagggcttctttgagcttctcatcaaggtctacgagaagggaaacatctccaagcacatcgacggactcaagatcggcgattctatcaaggtcaaaggaccgaaagggcagtttgtgtatgataagaatttggcttcccatttgagcatgatcgctggtggaaccggaattactcctcatctgcaggtagaacttgtcattctttgtcatgtaggagcacggagcatggtgttggtgtaacatgattggctgagctgtggcccctttcttgacagattattcgagccgctttgaaggacgagaccgacaagacgaccatcagtcttatctacgctaatgtgaccgaggaagacatctgtttgtgccccttctttcattcatgtggtgaccttcttctgcgcgtgatccgagtctgaactttaaaatcccaatactcacgcatacgtatagtgctcaagaaggaacttgacgagcttgctgccaacgtaagtctgcatatttagttcatactcagcctgccttcccctcaagatcaacagaatatcgctgaccggcaacacgattcggaacacaaacaaaaagtcccagggcagatttacagtgtattacgtgctcaacaacccccctcccggatggacgggcggtgtcggttttatcactaaggagcagatcgaccagcgtttgggcaaggccctagaagacgagagcagcaaggtcttgctttgtggacctcctccgatgttgaccgctatgaagtctgttccatccaattctttttttcccaatcttctttccctcttctttcgtttgacaacataactgacgaaccttgtgcgcttgatggataattatgaccatgtgttcatattgttattgaacaactatagggtccacctctcggagcttggttatcccgctcccaaggtcatctccaagttgcccgataaggtcttctgcttctaaacatcaaacaaaacccatgagtccttatccgacacggttccttccggtgatggggaccatcattacttctcttgtttttcgctttcacactcattctcttcttcctatgttgtttctgtgtctttgggttgataagattgatatctagataagctttttttttctcttcttttttcctttcgtcatctcatgattctttctctctagatccttttacttctcgccgccggccgtctggcatgtggcggtcaatgtcaacacacgtagatttgagagtacccgatgtctgatgtctgatgacacttcttgatccacccatcaaaagtcaatcgagaccgagtcatacatatctgatttagggatttctgataagaaagtaaaaggagaacgaagagcacgaaatcaagatagataaggaaaaaggttgtagaggccagatgagatggaagataaacgcacagaggggtgaagaaagttgtacgttggagacagaagaagacagggacagtagagtatgacctggtgaggaagaagacggacagacggatgtatggcacgtacgtgtagttgagtacaggctgtaaataaatccgtgagacgggcctgaaagacaaagattctttccgacatatagatcgagcgggaagttcaggtgatccaaaaaatatcaaaagaccgggggcgaaataagatatggataggaagggcggaataagaaaaaaaaggaggcaagagcttctgtgttggttgataacaccctctagagtctgtttgaagcatacaggatagaagtagtggtttagatgtgtaagaatagggaagggataagatatgaaggtagggtagagtagagtacacaggttcaagatagaaaccaacaccaaaatgaagaaggaaaagagatagtatgggaaccagataaggaagaaagggatgatgaagaaagaaagaaagaaaagaaatggaaccgagttcggtcgtggcttagaaaccttcttcaggggcttctaagtacgatgaaccctcccagtctagcgctacatcgcatacagtcaaaccaagccgaaggtcagtaacggaatttgactgttttcacatctagatgaggagctagggaaaagcgaaggactaactctgttggaaaatattgttcccaccccaactcagagccaatccgccgtccttcggcaactgaagacacaagaaaacgataataattccaatgacggttcctgtgtccaagcctgcgcttaatatgtagttgtactgttggtttcattgtcataaaggaaaagatggcgagaggcggaagtgagtgtgatgggctattaagttgatgagaatagagattggacgaagacataccttggaccaccatctgaaataccgacgtctgatcagatattctattaaacacctcagacccaaagagaacagatgtgatcaacaccacttctaaaagaggaaaaaagttgtccggtccaaaagagaaaataacaggcaggcgagaacgcacggaagatgaaaccgacgataacgaaagacgtatagttgactccgtttgccgaaggaatgttcgtgtatccattaaagagaacaatccaattgacgttgatcacccacgagtttggatactgaagtttatatagacatgaccgaaacagattagagtcaaatccacgacgcttagcctaacttagataaagaaaaagaaaacaagacaaacccttcgaagccagagccaaccgataacaggcaagaccgcaccggcgagcagagcccataagaacggctcataaggcgttccgcttccaaattgtctggccggtccgatcaaacccctgttgaaaccgtcccagagaaaaccccagatgtaattggttaggttcagcgtgtgcttgaattatcatacccacatcgaggcagatatgactcaccaaaggacggaagcggtgaagaacgtcttggttgaagggcaatacaagtggttcttgtttgtcgactggcagatatcaggtacctgagcaaacatgacttccttaatgccgacctggataagacaagtgataaagacgatcaccagttgagctgtcacggcggaagaagaaagaagaagaaccacacaaatcagtacgcttgagacgaagaacttagaaacgcatggagataaagaaagaaaacacgtaccggtgaacgactttctcggtgggatcttcaagtaatgtcccagtttcagagccatcgaaaaatctccaccgacaaacaatgtttcaactgcgaacgctttgaaaaactgattcggcaggcggaatgaacatccaatgttagaattggttgtttatgttgaggaaaagtcgaagaatagacgaaccatcacaggaacaggtttccctttgaagaggtatccagcaataacctgagacaggacattcaacattgaggcctgctcggatccaaatcgaacaagataggcggagagaaatgtgagcaaagctatggtgatcgaagaagaaggaagacgagcgaacaaggacgaacagattgtccggtttgagcaaagacgtaacccgctgggatgaagtatatggccggcaggatgagtgaaagaatcaagccccacactggaacttctgttgggtacgcctagcaatttaattcattccataccgcagacacatacttaggtcagctagtcagaagcggaagaaaaacgacctgaactttaaaacagacagacctgaacagcagcaatacccagaacaaagaacactacaaatgacagggcataccacctgacaaaagattcaaccaactttcagcgttaaccagcgatcaaagaccaccaaataaagcgaattaaacagaaagtgtcatcgaactgaccaatctggaacatctggatacactctcatcagctggttatgaatatcgtcctcctcaaccttattcccttttaagccttgccagatcctcggtccaaagaacaaagcggtatgaacaacagcagcggtggttaaggcaaacgagaagatgtatgccatcatgagggacgccgagaggtagaatggagaatattcttgataggcagtctcattgaaccgaaggtcggtaccaataactgcagtgtaattgtatctgcttccaaacctgtcgaatgcagcgctcgttgaaatcggcaagtaagcaaatccagcgtactatgaacagacatgaaaataaggggagaaagattagatcaatgaccgttgataagatctcctaaagatgatcgtagaaggaccatacgtacgttggtgtagtacaatatggggaccaagatccaagaaccgagaacgaagccagcgccgatgtttgcctcagcccaccaaggagtgacaagcggagaaagaatccaattaatttgactccagtcaaaggtgaggatactcatccctaaacctgttgatgttccaaataattggttgaccacgatattatcttcagaaagtgggggtatatatcagctagagaaatataactcagaaataccgaaaggaaagacttactcggacgaatccaacaaacccaggaaaagtaactaagagctccaaatagataacctgaaccaccagttcaatcatcaggaccaggattagccaacgagacaaaagcaagatagcaaggagaaacaacataggaacagtaggaaagaccaaccaggtaaaaagtagtagaagaatgaggcagcgatcacgatgatgaaaaactttaatctggtcatccttcctcccgtagcgtcatcctccgcgtgcaacgtattaagaatggtacacaagatgagcacttgtggccagatgagcgaggcaggatacgtctgtataattgggcgaaggggtttgaacaaggagatgagtacatggtcaatgaatgaccaaaagtggaacagaagaagggatactgacaatgaaacgtcgtgcataacctgcaaatgcaaacccggtcatttgagtagcaagcactagtaacacttcgaacctgtgatgacaaacgaaggatcgttgcatattgagtatacgtttgaccgatgaaggagattgtgtaaggacaaaaacttacccgacagggaacttgatgtcatagtatagatcagaggcaatgacggcctgtagggcataagcctgtacgttactaacgacgaccatgatagtgatcaacccgtgttctttgatgttgaacggccctgggttgagagaccaagtcttgccggccagtccaaagggcatgaaagatggcaactcgtagtcgtcgataggaagggcccaagccaatagtttacccaacgggaatgcggtgagcctgtttgggaagaggaaaaagagagacattgttcaaagaggtgcatacaaaagagtgaagaaaagagttgcaaaacgagggactaacactcctaacgtggtcggaacaggaggagccggatttcgatagtacaaaaacgcgttgattgccgcagtgacgatcgagagaagcccaccgacaaaccaaactcggaatgtaagcactaagagagtaaaatgggtcagaaaggaagggccaacaaaaacaacacatgctggcagtgcaggagaaatggagaagagaagaggcgggtacttaccaggcatatctgggtcatccatattcgaaaccgatgctctgacttctgcgtatggactgtcatcctcgtgcatgtctgccataatctcgcctctgtttgagtaacgagagaaagaacgaaccaacaggcgaataaataggttaatggactgaagtgtctattcgaaaagaaggaaaagacaagcaactgacttttctgaatcatcgatcgaaccgacgtcatctggtctatcaaacgttccgtccggaacggtggatgcgccagtgagggcagtggtaagccaagctcttctgccaggtcgagtaccgaaggcgtgtctgccggtgatagtagtgcctgtagtggtcgagaaatcggttccatccgttaggggcgtgaagtttctcatccttatggcggaagaatccatgcctaggtcatcactgaaattgctggaggtgtcgacctcactcaagagatcagcaatcgcctttctggagcctagatcatttctgacaagttcggaccgtttgtcggctccttccgtgtatttgatcggtgccaatggggcgagtgaactttggtttggagtcgacatgaagccactagcactcgagttgaatgtcggtgcggttggcgagtaagtcgctgtcgaccgatcatcagcgtaggtacgcccgttattgaaagcgaacggattttctgacgggtgtacccggaacgcgtcctgggacgatagttgtggagatggtggcaataaagacggcgatgacagcatggtagacgccggctgggcctcctcctcgcctgtagactcaacgattgagggcggagcgaacgagaagggaccagacgaggcggccgactggatgggccgattgattctagtgttcgcaggacggggaccaaacgaagccgggtttgctaaaggaaaatgaccaagttggccttggttcatctcgaacattgctctgggcaccctaccagccgaagtttgtggtcgttcgtattgttcgtcatcttggtcatcatccgatgaagggtacattgtgcctgccgatactgagcccggttggttgactggcacggtcgtcgtgccctgaaaggcagtggaaggtctgtgaaaggcaaatacaccttcttctggctcactctcctcctctgattcttcaccttctgaaaagtcattcaaatccggtctaaacgtgtttggtgccgggcccaggtttgaaacggtcgaggccgcagtgtctggtctaagacttgaccaggcagtcgtggcggaggcggaatcggaggaagaggggtagccagaggtcgaggtgcctggccggtccgtcgttgacggcacagcagtcaacatcgagaagggtgtagttgtttgggagaggaaaggatcgagtgggttcaaataagaattaaagactgattgtagatgtacaagagggaaggctgaatcagaaaaaatggctcgagtcagctggttaagcttttcgcaagagggaagagagaaacaagagaagaaaaaaccgtctctctccacagaaggaaaaaggagaaaaaagaagagacaaaaataaaacgacttgtcgagggcagaccaagcagagaaggagaagattatctgtgggaagcaacaaagagagaagagggacgaacgagaagacgatctctaagagaaagactggctgacactctgaggaaaggaggatgatctctagcgatgaagaaagtgttgatgtatgtagcttctgcgagaaggatggataagaaggcgaatccaaacggacaatgcttaaatcgatggatttcctcaaagggtgaaataagcacgaggtctatttcaagttgacaagcggcgagcaacgagcgacgagcaatgagcaacgagcgacgagcaacaagcaagaacgacggaagacctgagctgggccttgccttgattggaagtaggtgggtaagcgagcgagtgtgtggatggagttgtgaatgagtgtgtgttccgcactattctatatctgtgtatcttaactcctgggtgtgcgtgtatatatccgagtggatcgagagagaagggaagaaatgatgaagagaatcgccggaactgaaagggaagccgaaagagcgcagtcagtagaaatgaaggcgcagccatcgatcaggcacatgaacacaagcacaggcatacggccacagacaatttttcgcagatagctgctgcctctccgacgataagaccaatgtggacaaagccgagacatccatgttttccttattcttggcttccgcccagtgcttatgttcacacatccctctcttttcacatattcttccacgcttccatatgcgctttctctgttgatgatatttaaatttgctttctctagaagagcgttcgatacccagacaaacattccttggctctaacacacatgttccatctcgagcttcagtcctttccgagggcctagatccctgcccacggtccgttcaaatagttccatcatcacgccaaactgaagagaaccacagcatacagacgaatacgtatcaatctcagctcaatacaaacacaagagaagaagacgagaccacgactgacgagtgagcgagacaacgcagcgtcccatcgtcctttggaagagttgtctcgaatgaatgcatgctgtgcttgaacctcgtaaaactagagcacgttgtagtaattgcaagttgcattcttcttcagtcaggctcgaacacaatacttgaacagaagatgtgacccactgaaaacactgtgccggcatcatccaacgtatctctgatcaacgttctaccttctctcggcacatgattgtccttcgtgttcggagggaagagaagagtaggcatttgtcaatcaacctgagcctctgaccggctcgatgccgatatagatcaccgactcacctgcttgccaaataccatgccgacctcgcccttgatcgtcttgctcttgattcgggcgagagtatcgtcgtgggaaccaaggccaagagtggaacaatggacatcggtcgcaaagtaacagaacgaagctagtactcgaacgtcgaacgaggcctaaaaacgggtttccagtcagatgatttcggatatcagttgggctctatacacctttgagattctttgactcactcgaagtgcctagagtaattaattccgaaaaacagagaaggattccttcagcaaaggggaaagaaaaagagagagaactctacatctctactcggattgaatcaaataagaagaaaagaaaacgaaacataccaaatgcccaccgagacacatcccggtagcagcgatcctcccgttacagctatttagctgagtcaacaagtcgattgataacgtacaatcttcatcgtaagcctccaccgtcttctctgcctgaattcatcaatatcagatgaagaagaaatgaccgttaagttcgtttcttcaaaaacggatcttgacagaagaagattaaacaaaccttgtacttgttgcctttgtcagtcccagccacgtcatatggaatagcctctggtccttcccattcatggaacgaactaggacaagcgacgacgtatcccgctgatgcgactgttatttttgaaggaggaaagacacatttaattctatatggttccttcttatttgtctttcgttctcgacagtgaagaaagaggaacaaaaagagcgtactgtttgaggcaaactatatagaaacacatcatccaaagacaaaacgttagctgacattactcagactcaaagaggagaaaagagaccaacacgctcgacaggtcctgtcacttggtagatctcggagaaacagacgacacccgggaatttcgcttctggatactctggaacgttcggttcgtagatgaactgtacaaattttcaagaaaaatatatataccgtttgattgtttgtcaccccaagaaccagtcaaacaaggaggagtgaagacagaaaggaaaggaagcaaaaaagtttcagagaaaacgtcttgaaatctattcacatcaagacttaaagaaggaaaagaaagaggaagaacgaacgacacgcatcgtatcgcccgattctgtcttaacatcttggtgagaagtcttgatgagcatcttttctgataattcctttgactgttaagtttgattctgagctacgatgtgtcgagcttgacagtatggtatctgtttgtccggcggtgagattgatgaaagatggccgcgagagattcacaggatagataatgatgaatattatttgggctaaagatggaagaaacactacaactactggttccgtcttctgcgctaattcctcccaagcgcggtttaagaccgcgcccattccgctttcgtaatgtagacttcatttcgtttcatccccctttcaccacccttctctttctcatgttctcagaagacacgtctagcccgcgacctgaccgaatggctcttttctcctttttctaatcttcctttttgttttcacctgtccgagattggaaaagagcccgattcacatctattccaagcgttcccctttgcaccattgggtgcgatgagccctggtagaaaggaaaaggcagtagaaaaattataccaacatctcaaaaaggaagcgacgagaagacaaaaagaggcaacaacacagaaagtaaacagaaaaccaaatcggaaaagcagtaaatcgagatgtctagaaagaaaggatataaatgaggaggggtgaggtggaaagagtgaagttgtgataatgacaagtgagacgaaagaatgggatgatcatttttctgatagaagaagattagactatgatacaccgttttgaggaccagaggaatcgtcgtcagtaggttaatttggaggagtgtcaaacgcgagcatatgtgtactaaccgtatttgccaaagaacggaatcaaagtttgggcgagagtgtacgagaacacgagcttgggtccgacgaccaagatctgaaagcaaggtagaaggtaaggggaaagattgatcagcgtctacagccctgaccctgctcgagacaacaaaaacatcgaacgaaccttgggggtcaatcccttgaagaaccctcccattccctccttcttgatcatatccttaatgaccgtcattccaccgacggagctctcgaaactagcctgctgaactctggtcttgacgacatccaacggagcggcaacggtgatcgaggcaacggcacctccgatggaagcgacgaagttctgagcgaacgtagcctgagagtagtcggacagattgaagaataactccttggtcattgcggaacctccgaagagctaccgagataggcgaaagattatatttagcatcgagttgacacaggagtggtagcagaagcaagccgaaagtagacgcagagaaaaactcacagcaaacgacccgggcgcgtttcgggccatggtccatccccatcctcggtagagagcgaaaccttcatccttgacgatcgagaggaatcctcggtttcggaacgcctcggggttagtctgcctgaggatcttgagaacatccaaaggaagaaggacaacctctcccaatccagtcaaactaaaatgtcgagagcagaaagaaacaatcagtttgtggaggcgatcggatgcgcttttgagccaagaaaaccacttacgatccagcagtggcctctctgatcatctttccgttcttctcaccaaacgttctgaagaagaagccgccatcatgtttctggatcaaatccctgaaccaaggctgaccaccgaacttgtaaactcgctgggcaaccttgtatccagcagcataaccgagtccggggaaaagcgataggaacttcttgccgacggcagcctgggcgtgctgtcggaagatgatcgagttgacgtttccgaggttgatctttgaggagaggtatagagaagaccggaagcgcgacagatagtatggaacatgagcactaggtctccaagcgttcgatacaaattgaactcacagcttccttgtgggtcatcaatcgcttggcgatagtcttattaatttggtgtccaaatgagtgacagaatcggcagtaccgcaaagatgcgatcaaagatcagtacagaacacagtcagatctgaataaagagggaccccgacggattaaatattttgaaatgagcttgaatactcacgtccacagggtgaaagaccatgagctcagcaacacctacacaaagcgaaagaggagaaagaagaaatcacggtgcaaacgttagtacgaaaaagtagataagaaaaaagtgagctcggaaagacactaacccgagaagccagatccaagaactcgagcagttccagactccttctttccagtcatagggggagacatgatggctacttagtaaaaagagggatcgaaagagaagacggaagacggctatagaggatgatggatagaaagagaaaaaagagaagagacgaaaaccaaggtgagaagagcaacggaaggtaacaaaaaatcaaggcgcagttatttgatatctttttgtccgacttcattgcgacgaatttccaccgaccaggtctttttgaatgatctgagagcgagagccatccctcactccttgaatctgttgaactcatttgtcctcagtatgggaaacatctcgtctgtttctctcacatgggcgatatgcattctcaccctgggcgacttgattctcaagaacaaaatcgcgcgcgtgacataacttctggattgccgccatctcctctttctatatcttgagttaaactactcaatccgttccgacctttcatagcaattctgcaagagtgcgcatctggtgggccactaacatccaggacaatattatcttgagcttgcgtttatcagatgccgaacaagcagtggtctagcttctacctggcttagatccaccaaggcaatcggctggccacggcctgataacgcggccgatacgatgcgtaacgcactgcgcgtaaccgcgtaaatttgttgaagctgtctaatctaatctgtgttcgcaacatttttgctgatgttccatgcttcttgaatcatatcctcatgaccgacttgcccactagctatatcgacccggatatcgtagcatcgctcgtcgttgagacctatctatccttccctgcgtcctgtgtaccatcaaagagatccaacggcgtccaagagtggacgcctcttgctggagtcgttctctctcgaacgaccgatagttctcccatcctcaagctcatatccgttggagcaggttccaaagttgtgcccacaattagaaagtctgctagaggagacattgtcaatgatctacatgcagagattctgtctatcagaggagcgaggcgttggattctggaggaagtcggtagatgtttgaatggagccgatgatgattggctcgaacagatcaccaaggaaggtagggtgaaatggaaattaaaaactggagttcaggtccatatggttcgtcctgggtaccacatcacgttcccgtatccaggattcaggctgattgtccgtttgttcatcacagtacatctcgacccttccttgtaagtcgcacagctcgactgttcttctttcagtattccttgcgctcagttcatcgaatcgttgtgttgtcctccctcaaaggtggggatgcctcgactgtacacctagccaatcaacaacaaatactcgacccagatatggctgctctcaaatcttctcaccatatgccctcagaaacatcttctgactctgctcctagcggcgtgaatgcaccgcgaaagtcatttgtcctcgcacgaggacgagacgggtactccagccttggtgttattcggacaaaacctggtcgggcagactcttctccaacaacgacactctcttgctcagacaagctagcggcatatactctactaggtatacaagggtccgtcttatcaacagtcgtcgagcctatctacctaagcactatggtaattggtgatatcaaaggactggtggacaatgggttcgaaggagagaaaatcatacacgaagagttagacagggctcttgtgcagagggctagaaatacatggagtagccttcaatgtatgtcaaacatattcctctcagcgttctttgaataagggtgtatgtatcttattcgttcttgcgcttgtggcaacagccgaattaccaaatctatcatatcgtcatcaccctcctcgtctgaatctcacgaaaattacattttcctactcaaaatcccttctcctccgagatacgccagatttggctatagctacaccttcaatatgtaagctttcatcatcgctttttccacatctgtcaatgtcatcttttaacaagttcttcatgtctacttgtgtataggtctcgtatacacagcggatgacaaaccagagcgtctggttgctctgggacatctc

SEQ ID NO: 1346 - DNA, 9827 bp, Xanthophyllomyces dendrorhous
ctctgggacatctccatggatctttcaaaaagagcatacaagccgctgggggcaggctacctgacaaggctgtatccggcgtttgcagaaaagtcttgtttgcgttgacgctggatattttgaacaaaacgcgtgatgagggctttgacattcggtgggtcattccacaaccgaagcacacttctttaccatctatcacttgctttcaattgattacgttctcatcgatgtacaacctcaggcaatcataccgatccctcaagaagtctttcctggcattcgagtatcagcagaccaaacagatcctccggacgcatccgatgtctttcttgtgcggctgggaagaaggagacagagagcagtgggaatcctttgattcagctggagacatcgaatccctagatgttgagaaatcgacatcgagttctgtatcatccgaaacgcctgtagagaagcggcagcgactgaggtgatggagtttgacttttgatatctccgtccaacgttgtctcccgtttgtctttttagctatccgaactatttattttatatttttgaattattatcgtcgagcatgtggactaattttgtttttattttgttaagagcgccattctatatattatcctacaacctgctctcttgtacatcagctctattcattgattgcagatgtatcggtcctgaacagatggctcgatgtaacccaatgattgtggtttccactgtgattgtactcacgtgactacttctggtcacattgtcaacgacacgcgagttccaaccctgcactttctttctcttactacttcttcatccctctccttatctcaacctcttcccttgtccttgtctctatattttctactctatcagtggcctcgtcctctgcagggccgatactattagaacgaattgtcaacaacaaagagaggcagagagaaaaataaaagatgcaaaacactcatcaacaaaatcaaggaatgcaacaacagcaacaccaacagcaaaatccttctccccaggctcctcccgcacttcacaatggctatggaggtcctgaaggaggaatgaccttagctggtgttctacactatctacaaaccgaatggagaaggtgggagagagatcgtaatgagtgggagatcgaacgagcagagatgagggtacgtaaaccgatttccttctcctgtcgaacacaccagacataccgtccttcaacctagctggtcgtatcgaggaaccgcttgattctgatgaactcaagttttttcctgccttttcggtttttgttcgcgaatttccgtttgtctggaatttgtaggctcggatagcgcttttagagggcgagcgaagatctgccgacaatctcaaactagatctctctcgtagggtcaagatgttggagtttgctctgcgacaagaaaggtacctattccattctaccgttcgttggttcagtcgagagagttgtcgattgacagtaagctgcacaatgctaaatggacttgatccgctcacttctatccttgatcaacataagatcgggcaaaggccctgcttctggagttttggctggaggagctgctactactgctgttgccgccatccctccgagtaagctatctactttacaagccgaagacagcaaagagaacggaactagcggcggaagcgatgctggatcggatgatggtcgtgagttcatattggtttgcttctgttgcttgggccagataccttctcttcactttaaatctgctcgtattgatcaatgtttgagtgattttattaagggcttccgaatggaagcgcctcacctcctacggtgaacaagactctttctgccaaaaatagttcgaccggccccccgtccaacggaagtaatgcgcctttacccagttggaagaccggagtggctgctgctggacgagatcctaagagtaggcagcgaagtcgcgactatcttaaacagtatgtactactctgtcattttgttttattttacttgactattctttcttttcaactaagcacacgcttgattgatttattgatttttgtctctttgtaaccatcaggtgcttgcaagaaatctcctacctgacttcacccaacgcccttaacccgcttccaaatagaccggttgctgttcctgccgcacctgcctcagcctctggctcttcacagggtgaggctccggctaccaagcttcctgctgttgttcagtcacgtcagttttctggaacatcatcaagctcggagatcaaacctgacgacgagtcacttatcgtgtcatctgctttctcggctcctacgttgctgcaacgaccccgaaagatgctctcgactgctcctccagattcacccaatcaaggtatcccgccgtctattcaagaggcgaaggagaaagagcagcgatcaagagaggaagctcggaggaaggaagaagaagtagaagaagagcagcaacagaaagaaccgaatgagagaaactctcacgcgtttaccgaggctccttcagctcctgctttggaacaaagagccaatccattgccacccgttcctcctaccgtttcagaagactcagctccgaaagatacgcaggagttgacagaacccaaactaccagcgacggaaccggctggagaggaaatggaggatcgagcggaagagggagagcagaagggaaaggccgagctccctgtatcaccggttcatgatactgtagaatcattccctgaaaactctacagttcttgcctcggatggggtgactgatactgagccagtcgagccagtcttggaagaaaagcaactggagaaggaagttgaagcagaggagaatgtcgatgtggcgcaggagaacaaatccgaggataaggatttggaggaagaagcgagcgtcttggaggatgattctatattagaaattggaaactcgaccatcgtgccggttccagaagtttctgctctgaccgagccgaggaaagagaaagctcaggaagcgcttgaagtagaagagaaggtggaaccggagccaaagcacgatacggagaaggagaaggtcgaagagttcgatgaggagacggtaggcagcggcgaagaacaaaaggctgaagaaaacgggtcaacgacagaatctcaaccggaaagcggggacaaatggaggaacacatcgaaagaggatggaaccaacatcaaggtgagtttgagctcttttatcatggctgatgaaaccgatacttgagctgatgatgtaaaccgcctctgtgtcatcagtctatgagcccaacaacaggtcgatctggtaagcggctgtcgtccctgaggttttgtatctacggaagatattgtgaacgagtaactgaccagaatatggaataggcttggcgcaaaatgatgaagaggagctaacggaccttgctcttgagccgcctctgcttgatgacgaagacgaagtgaaacgagaacctcccctgccgacaacgagcgataagggattgtggaaagctcgaaacctgcttcgtgggtgagtcgatagtcacttagtttcgaggtcaacgatttggactggaggttcctaagcaaatgtatttgtgaatgcaacttacgaaccgacagacatgtggactgtgtgagagcggtggcatttcatgagaccgagcctcttgttgcgagtgcttctgaggactgcacgatcaagttatggcgagttgatctgtctgaaattgtctcggagaagtgagtattttgtgctttcccttgattgtcttgttctttcttgcttattttcttgatgatcacgaaattcacatcaatcaaggtcaagttcgtctgagatcgagccgttgacgacgtatcgcggacacaccaaaggcgtgacatccgtcgtgtttgatgcgcccaaagggttgatttactctggttcattggattcgacgatccgagtgtggaaagtcccttcttcttcacagacgctattcagtccgcatgattcgtcggtgggcgtgaacacgcttgtcggtcattcaaattctgtgtgggggctcgcgcttgtaggtcgaccgagcgagggacaagtgttggtaagcgtgtcatccgatggaaatgtgaaagtgtggaacacggagaaggaaggctgtccactggttggcagctggccatacggagggtccagtttggaggggcagcaaggcgacgacagagcagagggaataaacaaggaggaagtgatcgtgccgacgtgtgtgagcgcggtgggaacggatgactctttggtggccgtcgggtactcaaacagtgtagtcaagattttcaacgttcacaccggtgagcaggtcaagatgatcgagagtgaacctgttgccggtaagtttgtttccttgcaagcgagcaattgcacccactgtcggtctgaccagagccatttgttttgacagatgaacaagagtcaacaaagcggcagatcaataaggtaatcactcacccgaccatgcccatgctcatcaccgctcacgaagatagccatattcggttcttcaacctcgagactggtttgtcacaataacttttttgtgatctgcttgatcgacgaagttttctgctaaactggcttggcatattttatttgaaaaacaggcatccaaacttatgaccttccggctcacgcggatggagtaacttctttgtttgtgtctcggcttttaccggagatgatcgtgtctggcggtcaggacgcgtcgcttcggatttgggattctccttcgcagacgctcgaccaggagttgacgattcataagaagaacaaggacatgggtgttttggacgtggtggtagggacgagagagaaattgatggctaccgccggagctgacggcacggttcgggtcttggtttgggaaggcaagggcgaagaccagagaagttgattgagctttccttccttccccccatgtgttctccttaacatgtttcctttgcctacttttattttcttctagatcgcgcttttccctcattctgctcgctctacataatgtgccgtttcgtaaccataacttttttttttcttgttcatgtttgagttgatatacccattgattcattctctctcaccatccgactggtcttccagctgtctttcgtccttttcctttatcgtcctttctttttgccttgatctttgcttcctcttttctttagtttctatatgtttttttttcactatgtaacaattcgtcgatgtgctctttctcccttcttctattcacctgagacaaaaaggaggaaaacaaaccccatgactcttgcaagctctaccctactacctcccaaaatgaacgaggagaaacacaaaatacactaaatcggggcgagcacttgcaccacgagtcagctgacagaaatctgaaacgagctggcataacgagtttaaagaaaggtttggaaggagcaactagacattgagtacggaatagtcaaatgtggatgatgcgtggaaatggatcgcccgatgttgaaagttcgagggttttgatttgctctgcatgatggagaacgacgctgtttgtacggttcataggatagagctcgggcttgagcctgtttaggccggtgccttgagcacccggacctcaaaatctctggatcctgtttcttctcgatttcgggaacaaaagatcgatcgagtaagataaaataggagcacggtgacataaacaaatcataacaagccaagaagaaagacatgaagcaaaatagtaaaataatctctgccgcctgggctaggtttgcgttagaataagtttattttgaataatattttgatcacatttaatctaattgttgcgcgttcttggaccgatctccatgtttctttttttcttcttaatcggcctgaagagttcaaacaaaggattgtcgaccatctgagacggcggcgggattaacggacgaaaaagccgggataggtgtgatgcattatccagaaggatatcaggaaaggaagggaaagagagtgtgtgtatgtgtgtggggtgtgtgtgtgtatgtgtgctccctgttcggatcgtgccgctggttctcatgcgggtattatctggccctcgcttggatataaatccagatacataaaacagagaacggaaggatatgtttcaagtagcgaattggcaagtcctgcagatccattttcggcggagtttctcatgcaagtctctcttcaaaggaagagattagccgtcagggacagaagcagaaggacgagatgaagagaggtattgtgagagagagaatgtgaagagcaaaatgagaaaagagagacaggtgtacgatagatctgcagaggaattaaagtttggagtaatgtgtttctcatgtcgccggtggtgcgcagtcgaaaatttatgcttccatcccaatccttcagaccatcactttttgttccctcgctgacccggccttgccacccccgagattgcgctcgcggtctcatcggaacatctttctaccgtccctttgatggcctcccccatcgtacacggcgtaaatttaaagtttactcactcaacaaacatcttgtaaacaaagcccgtaaaccgatagacatacggtactcatgaacacatccacaccgcacgatatgcgcgtgctgatcgccatgatgcgccgcgccaagcctattaattgagcacgtgccgccaatgaaacccttttgtctctgttgggtgcctgtattctaaattagttcttttcttcaagcttttgtttattatttcatttctaattctttcgtatgataaggtaaaaaagaaggcccatcgggggaaatacacacaactacacagaacacagaggacggagaaaagtgacaaagagatgatggataataacaatcatccaagaaagatcacaaaaacctaccagaatgattctcttttcaactctaaacagtgagatatgacaatgacctgatcggcccgatcacgatgtctgttgctcttggcttttcgctcttcgctcgcttcccctcattttccgtcgagaaattcatctatgctgttactattcttattaatattgttgctgctgctgctgccgccgccgccgccgctgcgattgattgcgcgatgtatttatcccgtctcgatctgtccgaggatttcagcccgatcatcgaagcgagtggcgctcgggctaggtttgatgttaccgaactttaattggccgaacaggctctcaggctgaacaaccttccaagcagagcgtattcagcccgggaaaaacaggagctgaccaagaagctcgtactgagtgcagtatagtatcaccggtgagtacaggagaggaagaataagattagcaatcaggacgacaggccaggtgggataccttgagacacagcccgtccagaggactgggtacgggaaagaggtctctcatggatgaaagaaagcgatgcacggaagaaagagcagggaaaacaaaagaagaacaggaatcaaagtgaaaggaggaaagagcaagagagagaaaaaaggaggaaaaaaaaagtcctgtcctagacgggaaatcgaagtttggaatgcatcgtgggggaaaccttgaatccttttaagaggaacaggattcctcatcataaacccatctgccttcttcttctcttcgtgctttcttttcttcctttcctcttctcttgtgtccttccctcttttacatttctcactcttttcatcttcatcgctataatctctacgtccttcccttcccttttctcgtcgttctagcagtttcgtccaatcaagacgaaatcacagaaccactcagcacgttttgtcaactcacctggcagaactaccttcttctcgtcttcttcctcttccagaccacttttctccttctcggatgtgtgccgctcctcctgtctatcttgattcgcggccagtgcccatgtcggccgattggaccgatcggtccaactctcagtcatcatcatctacatcggcacatctaaacgagcagaggaccttctcagttgatattcctatgcacggtccggattggatacatatatgcaaaggtggttgggagtctgttcgtccgatcggcaaccatgacgatgacagagcgcaagggtcgattgatggaaagatatatacgatccagcgagcacacgacgaatataaagcgaagactggtcaggtagggtttcctttgatcgatttttcattccccatccccttcttcctctcccttcttcttctccctcttctttccatctgtttgcttgtttgtgatcccatatcatgtgcgcgcgctaaatcagacttgtgttttgtttgttctcttcctcatcataaaggcatgcgagccatgtcgacgaagaaagtccaaggtaagtgttccggtctcgatggagaagatatctcgctttgaagcgcatacatgcgctcgtatgctttaggaacgaacctgtcggaagaaccatctcgctaatcatcctgatctctgcccgtacgatgacagtgtgacggaggggcagtatgctctagatgcatcaaccgagggattcagtgtgtctacggccagcctcgaaagcagccgagcggcagacgaccgagccggataatccacccctcaacgacagctgccgctagccgttccgctcgaggtactaccgacaacgcaccgaaaccgacgagacccacaaagatggcgaaaccctcggctaggacaccggtcatgacgttcaaacctcttgagactactcacgattcaccccaaatcgaacgtacctcgctcgcttctccatcattggggcaaccgactcttccatctacttcgtcatcatcgtcgtcgtgtccgacagcgactaggccggtcgttcctcacatgcgtttcgagatgagccagctgtctatggtgccggcagctccggcctccgctggactggtaccgatttgtaaccatatcaagcacccgggtgagcagctcgtcagacgaaactcgatgggtaattgggtcccttcaacttcttttgaaattggacaaccgggtatgtatatacctaccagatatgagttctctcaggctcatggggcgaccggacaccgttatgattcgaatggcccatgggtcaagcctgagcctattgaccaaaatttggtgctcaaaggttggaggccggtgggacccaatcgatcaaactcctctccatcagtcaatccgccagcatcgacctctctcacgacgtcgacgccgaccctggcgtcgaccccgttgtctatgtcagtttggtcagatgaacagaggagcgagcaaaacacatcaaatcaatcaactccgtcaactcacttgtcccctctgtcatcaatctcgaccgaggccacgttgggcgagacgacgatggctcgattcccaacagaatatcaggcggcagggatgtggaccgtgcctcactatgactatcaccaaacatcttaccatccgattggacattcctacgcctattcaaacccttacaccgagtacggtcgtaacgtggcatacgatctcatcgaggggaaggccacggtccgatcggatggtcatggattctgcggaacgacatctggaaggactctcggactgggcttcggggatagttcaatttcaactccagcctcggtaccgatgtcgacggtcacatcggcgctcgatctacctatcgagtcaagagagggacaaccgggaatgttgttctggggggacccctgagtggagaatattgagatgtgagaagccgatcaggttttgttctgtatatcttaccaaatttcgacttattcg

SEQ ID NO: 1347 - DNA, 25273 bp, Xanthophyllomyces dendrorhous
catttcatttctcttgacgctttcatagtcttagtctagtctctcatcattcggttatctatttgttagtttctatgttctttccccccccctcggattatgtacctcattgtcttatatagtcggctcgccattcatttcttcaatctctgtagactcttccgtactcgaaacatcatacaatccatcctgtatatattcacaatcaaaaactcacagcctatatgcactctcgtccttttcagctttcttctctatctcttgtttctcgacctatgactagcgcgcaaagggtacttcgggctgttcaagtgtatatatatacctcatgtttattcgtattgcctttctttctgatcgtgttttccctcgctttgttcaagattcttttgtacctaagttgtttgtgttggttctctccagtctcatagtcgccgtaaactgtttcttgctccagtttttttttcactctcctcgcagtcgttttgaaatgtggtcgttctcattccagttatcgatgtaaatttcttttgcttggccatcggtcatcatccggccgttcattcttatttttatttttatcaacctctcctttgaatctgttggctcgtctgtcgtcatagatctaaattgaatccgtctccagaacgtggagggttttcattctctttcctactgaagttccctgggatactcagcccgcatttactttcactgtcttcttctttccttgcccccgatcgaattaagcaccgtccagatcgtaaaatcgcggaacaaaaaaaaacagatgaagagaagaaggcaacgtgaaaagagagggaaagggaaggctcaagatagagggattatcatttatatctgtagcctgatgcatgttccgtcttggatgaagtctcaattaaagttgaaacaaggttacgtggaggagaagaagaagaacattccatgtgatcgcgtatttcagactacagcgatcaatggtttccttccaggtgtgtgtgtgtgtgtgtgtgtgtgtgttgattgaatgtgaattgatccgacagaccgaacgatatgagccggatgggagccctccgaggccgaaggcctcatgtcaatgccgaggtttcgatttgactgctaaattacaaaaagaaaagacagtgaccgcgatcatcaacggacgacaaattcagctgaaatcgggttttccaacttttctattaggtttcactgttgatattctgacggcataatttttttcttcccgtttcataaaaaagcgcacggaacaacccaacgagaatcatgagggataaaggtaaaagaaaaaagaaaaaaaaaagaaaagaaaggtaagcaaaaatgaatacaatgaagtataggttgtcggccgggaagaagtgacgggacgaagataggatcccgaaagatcaagataaagcagataacattcgaaaatggaaagatagatcgtgtttgttttccgtcggattgaatgtttcaagtttcacagtctacagtgactaccccttatttcacgcttcgacagacaaaattgaactcaaacgcattgaaagcaagcagattcgatcaactggatacatttcagtccaaagttcagttccgagtattctcattcccgttcccgattcgatttccgcttccgtactcagttccatccgaatcctcgtatccatcatcaaacacttcatcatgagcatgctcgtcatacacttggagaggcatcgcatcgtggaccgatagaccgttgtctggttcgtggttatcgctcaggtcgagggcctttccgtctgaagaaacagtaatcgtgacagtatccccgtttctgtcgagagttaaatcgagtgaagaatgtggtaaccagtcagataaggtcctaccggtcacacttgaagagatgaagagacaaacctgattcggccttcgacaagctttcgagcaagcttcgcgagaagttctttcgagatcaacctagcgatggacctagcgccataagtctccgaccaaccttccttcgcgatccattctttagcctcctctcctgcgctcaacacgatcctcctatcggccaaccgtctactgatctcgcccaatcgaaggtcaacgatcgacaggatcgcctttcgggacagcttgttgaatatcaacaggttgtccaaccgattgaccaattcaggggggaaatgacgagaaacagcttcgaggatatgttgttgtgtctcggcggtcggtcgaccaagagaatcggtagagccaggaatggccatcgcttcgctacccaaatttgaagtcaggcaaagaatcgtgttcttgaaatcgactgttgagcgggacaagcgcaaagataactagatgagcatgtctgaagagagaaaatgagagacacaggacatgttgaacccactctctcgtccagaggaatctgtcagtcgaccctcatccaacacttgaagcagaatgttggacacatcccgatgagctttctcgacctcatccaagttgatcaccgcataggctaaaccaccgagcaaccagtgaatatcaataagatgcgatcaaaacccgcgcgccagattaaaacggcagaaagaagacttgtactcacgccgacgtcggacagcctcggttaattggcctccttcttcgaatcctacataaccaggtgcagctccgattaatctcgagacagtatgtcgatcgtgatactcgctcatgttgatcgtcaccctgaacaaacgatcaagggaagaagaaagaaccatcgagttaagtaactgataagtcatgcgaaatcgaacaaacactcgacttacagtgcatgcttctcgtcatcaaacaaaaacccagccagcgcctttgcgagctccgttttacccactccggtcggtcccaggaacaagaaagaagcaagtggacgttgcgggttttgtagaccagctcgagagagtctaacggcatccgaaacactacgcgcaggaggttatgagaactcgataggtagtcagtccaaaatacatgaatgtgcgtatgcgtatgaggtaaataggcgtgacatacgcggtaacgacgtgttcttgaccaacaacccgctctgtcaacgcgtcctccatctttgaaggacatatgagaagacaactgttgtaagctttgatcatgcgacatctaaagataactcatgcaactcacatgtatcaaacgttccttctctcctttcagcaaggagttgaccgggattcctgtgcttcttgctacaacctttgcgacatcctcgcttgtcactcggtctcggagtctcatcattcctccttctcctgcaggcgaagaaccagcttcatcgtctctggggatttttccttgtaagtttggaatcacgtcgtatcgcagtcgggaagcatcttcgtaggagccattccgctgagcaatctcaagatcgatctttgctttctcgagatcctgtagaatcgcaatagaggaggaaaggagaggatagattagaaatttggttagtctgttaaatgaccctcaaagcagaaaacaaaacaagtataaattccgacgcacaaacttcatctgcttcaagtccttcaaccaattcttctccttggcccagattccctccaagtctttacctttctgcttcttttcttccaactcctgcagaacaatctcattacgatcgatcgagaacgtatctgtctcatttttgagtgactcccgctcgatctaaattcatattcaagttgtaaaatatcagtcaaccaacctactcttgaataaaagaacagaagagacacaagtggacagacctcaagagtcatgatttcccgctctagggcttccaactccgggggtttcgattcctgggcgatccgaagcgaagaagctgcttcatcgacaagctgttagtaaattttaagggaacggagatgattagcttcgctaactacaagacccaaacggttcatcggaatgaaggttaactaacgtcaatcgccttgtcaggtaaaaatctatccgggatatctgttcgacaaaaaaagaaagaaatgtaagctccgaaccctacagagtaatcggccatgacagtcaactggaaggaaaaaaaccaacatctttgagagtacacggcggctagtaaatccaaatagcgaaagagcaaaaagaaactttgagaatcgttctggtaaaccatgcacgacgagggatgagtctaaggaaaaatcatagaccaaccagtgacaagcgcagaatcagatattccgactccgtggtgaacttcatacctccctttgagtcctcgcaagatcgagatcgtcgaagccactgttggttcttcgaccttgaccggctggaaacgtctggaaagagcagggtccttttcgatcgtctagtatttcccaaaaatatatatcacaaacgatcagactcggttcttgctaccaacgcaggcaatgatgatttcgatagaaggtggaaaacaaacctttcggtattcatcaggtgttgtggctcccacaagctgcagccctcgtgcaagagcctttgcaaagcatgaatgagatgtgtgatcaatacaggcggctgatgacagcttgtagcgaaggatagatacttagtgaacaaagaaaactcacaggcttgatcatgtttccagcgtcgatcgatccctcgctctttccaagatttagaagaccgtgaatctcgtcgatgaaacatatgacctgtccagcttctcgatcaatgtctttcaagagcgccttgaatctttcttcaaagactcctctgactccggcgcctgcaagaagcgctgaaagatccaacgcgagcacccgcttgttcaacagggactgaaaaagacgaaagttgttcagtgttctgttcttttgaagattgataagagtgccaaagacttggaaagaaagtcatacttcaggaacttctccgttgacgactgatgtaaggtgagaaaatatataaacatgatgtcagtaacaatcccgttagttagaggatgacaccaatcatcatacctcgttgagctagaccttctaagatggcggtctttccaactccggcaggaccaaggagtaccgggtttgattttgttcttcgactgagaactgtaagttgcacccgatcgatcagctcagcaaagaattgaaaagtcaagacaatataggtggcgcttactttgaattgttcgcttgatctcatcgtctctgccaatcacagggtccatttttccttctctagccatctccgtaaggtctatactctatttgagattgatactcagcatgagccacagtgccgccactcaacagacagaacaaacgattgaattagcacacgaacaaattgcttgagagcttccccttcttccattcctcctcccattgggttcatcttgaatcctttaaatccgccacctccagatcctggcttgtctgcataacttcttctaatagagatagaagaaacgactgattgtcgaccaagaggtactacgcggccagccgcgacggagggagcgagaaggtggagggtggccctctgctgaattactagcggcaatggcgacgaccgaaccgatggacggagcggaagaagcctcgatgggattttggatctgatcatgtcagtgtgcgtgtttgagtgtgggtgtacgtgtgagagtgtatgagtatgagtatgagtatggatatggaatgatgtggttgacgatcagtcaaaggctttttggtcgctcaaggtgattccatcttgaatctgacgaattcgccgagaactttccagcgagttctcccatcacgctaaccatcgcgacctctcagattgaccgtcccctaccatggcagcacaaccacagagacacagacagtatcaacagcatcagcatcatcagcagcagcagcagcagcaacagcatcactcagcccaccaacaacatccagcaattaaccaggccggaggagcagccgggtcaaataacccgggtgggccggcagctagtgcaaatcagccccatccacctcaaccaccggtacctcaacaggatctaagtgtcattcttgttacgggtggctgtgagtctgtgctggtaacaaaggcctattgagagattcgtactgatcgcgtcaacttgacctgcactacactatcttgcggatgacacagatgatcatacaatcaagttctgggaagcatggtccggaatctgtggtagaacgattcaaaacgcagattcagttagtcttactcgttccttctcttgatgtctgctttcacatgtttggttgatccagcttttcagactaaacagtactctgttgacctgttcaccgtttcgtctgtcttgtcttgatacaacagaaacaaatcactcggctcgcaatctcacccgataagaagatcttggctgtagcaggccatcatcacgtcaagctttatgatatccaaaacccatccaataacgctcctgttcgtattgttatgtcgaccacgctgtctgatcctctgtaggcgtaataggttctcaacttgtatacttgcttttccgtataccaaaccggttgatcgtcatataaccgtagctggccacattcgaaggccacactggtaatatcaccagtttagcatttcattgtgaaggtaaatggatcgtcacaggtagtgaagatggaagtctcaagatctgggacacaaggtaagctgccaataacccttgtctcgtctgttccaaagttgcagatccaaaattaggctgattggaagatgaaacctgatgtcttattcaagaacatctcatattcaacgtaactacgaccatcgctcgccggtcaacgatgtagtgatccatccgaaccaaggagaattggtatcatgtgatcaggatggcagtgtgaaagtgtgggatctggcggagaatacgtgcacacacgagctggttcgtttatactgtttctgcaaagacgctccggatgatgcaagttgtggatttctaaaaggtttcggtttgcctttatgggacaacaggtcccggatgcagatgttcccattcgaagtattgccatcgcctcggacggttctatgttggtagcaggaaataataaagttagttcaactgcctgctctccagatttgtgttttgcatttccgaaccctgtggttgtcacaaagatctggaatcactcttatcccgttctctctttattttcttcctcatagggaaatgtttacgtctggaagtttgagccgggatcggacactgatttgcagccagtgacgatgtttcctgctcatccagggaaatacatcactagggttcttcttagtccagatgtcaagttcgttcttccccccctcatccaaaattttgttgtcctgtgtttttgagatatttcacctaacatctttgcccactcttgtaatttattattaccttaaactgcgatcttcacctcaaatcttcaggcatttggcaacgtgttcgtcagacaaaagagtgaagatctggtcaacagagaactatgagtttaaactcgaaaaaacattagatgatcatcaacgatgggtgtgggacgcggctttctcggcggattcagcttatttagtcactggtgggttcacctcggttctttctttatttcctcgtgccttcacttttttcctttacaggccgctcaatactctttgttgttttcaatgacaaacagcctcgagcgaccatatcgccagactttgggagctcgccactggtgaagttgtcagacaatatacaggtcaccataggtacgttcttctcatccgctgttctctgttccccactcctttcacagcgcatcacaactgacatcttatgttatttgtgaccgtctctgttgatttgtgtacggtacggtgaacgacttcatagagcatgcttggctgtagcattgaatgatataaatcttgcctaatcaattcttttcatctttgtattcttaactacgaacttcacgcggcttcactacttggtgcttgtaggataataaaaaagcaaagcatgcatccatcatacacaagatagaatttgaggattaagttagtcaagtaaaataattgatcaccattcctggcatatacacatgcaaacggaagagtttcagacgtgaactgtcaagattcataattctctctacttcttagccttcaaccagctctcgacgttctccttatccgtactcaaccattgagtagaagccaacacggcctcagaggtttgagcgagcgacatatcgaattgagatgtatctttaccagcgaaaaaggattggatactatccagatcggctcgagtactgagtttgttgtacgtgatgccaaccagtcggtttagagactgggataacgcaagagtgttcatgaaccaggtagaaagaatcagtaagagctttttctggattttatattttaattgggaccaggagaaaaaaagaacgaaccatggtgttgttaaaccgcttgtagatctttaaatatagacatcgaaacaaagtaaaaatgcgacctaatcaacgtcggctcgatgatgtatacgatttatcaaaagtgcagcaccacgtacagcgtcataattggtttggaaatagtccaccaaagcccttctagactttgtattttgagcgagacccataaagaagaacaggacgtcctgatctttgacttctgtaatcagcatgctgaacgttctgccgaggagcgcgttgtcggtgggagccgtcaaagcgaccatggcgtcaaccttcgtacttggattagatgggttcttgtaaacctccttgactatatcgtaagcctcttctccaaggtggatgatggcgagtcggaaaattgcccgttgaatatcgggggcaatcgcattttcatccccgctggcaaactttcggaaagcctcagtcgcaaatttgatgacaggttcgtagccggcgattccagcctgagagaaagcgagcgttcggagttctttgatatcggggtcttcgtcttcgataaattcgaatctcagtcgatcgatcagaggagcaaagatcgttcgagtaaggtctttgatagaatttcgaacgtcttcgggctgttcccaccagacgctggataaatcagaaagggcatcggcgacaatagaccagacaactttcttttcctcattcttgaaatgcgagatcagatcgagcattccggttgttgacgaatatccagctctggctagcttgtaggcatcagcaacaagaccgactcgatcctcaggagagaatacgcttccttgcttggaggattctttgccgagaacgtcaagatgagaggaagaatatgcgacactggttcaagttcaagttcaaaacagagtgacacggtcagagatatgaaccatcctcattaatatagaagacgtgagcctataccggtagaaaccagtggtatcagcattgagcttataaacagtagctccttccaagtcgatggtgatctctcgctcagaaaggaccaggtccttcttgatttccgcctttccatctttgatgagaataagtcggaggggaatatgcctatgtaaaaagaggctctgagtgaagtcaccgaagatagtttggatagcgaataacacacgattaagcttagacttaccagatggtctcgtcctcctcaggttgaacgtttccggtagccaagaatcggttctgctgcatgtgaagcttgccgtccttctcagtagcggtgacgagagggtgaccgatctagatatcgaagcacaacgcgagcacacatgttcaggagaagggagatgtatcttgatgtataaaagtacataccttttgaatccaagcatcggcaatcttggggatatcgacgccggaagcctcctggattgctttccaaaggtcctgggtggtagcgttcgagtacgcgtgggttttgaggtaaaccgagacccccctcaagaatttatcctcccccacaattccagcaatcattcgaagaacagatgcaccctatcgtgaagttgtgagttcgatcaaaccggaaagctcgaagacattaggtcaaacatcaagtgtagtctaaatagagagttgacttgccttagagtaactgatggcatcaaagaattgactgatcttgttggcatcttcgaattcaacctggatggggtgacttgatcgttgtgcgtccaaatcaaacgctcggaagaggtgatcggttatgaaaacggatcggacgttccattcggggtaaagtctgatagatggcattgtgacgataagttgatagttcagttgggtagcgaaaccagatgatagatgcttacctatcaggaatgatgacctccccacacaaagtagctacgagcatagcaagaagcataatcagtaacgcgctgctgacgagataagacgatcttatgcagcttgtaattaccgaaagcctcgtttaaccagagctcgctccaccactaacaaaacaaaagatttgaagcacaaattgagaggaaaacgacggacagatatcggtttttcagccatcagtcagacagcattgaaagaatagaacgagagacatattctgtaccttcatggtgacatagtttccgaaccactggtgagcaatctcgtggctctgcacactggccacctgcttcttggctgccaacccactcttcttgtccaagagcaatactgaagttcgaccgagaatcaatccgtagttttccattgcctctgttgattatataggaacaagaaacggcaaaaggtatgatgtatcagctctatttcgacttcgcgacctgttcacatgagagaatcgtacgagcgtcaaagtcggctgtgtgaattgaataagagggaacaagagtgggaccagggatatcagtcaatagctatcaaagtcgtgaagaaatttaagatatatgacccactagcaactaaagaatcaagcttaggaagagcatagggaatatcgaagatttcctcgtatagtggtgtggctcgcttagtgatctctaacgcatagtcgacctgatggataatatcggaggtagctacggtggcgaacgcgtgaccaaagttgaccagatgcattaggattatacacgatgatgagaagacttctcaatcgaaaaaacatcaaagacaaaccatagattcgaagaggaacagtcttgccggtcagaggggagatgtaggaatcttttcggtactcaaagtatccgttagcaaacgctaagagataagtcgacatctatgcagcgcaggaagccatcggaatcagcatataggtctcctcaattgaattaatatgtgaagacatctggagagagaaagacagaacataccagaggtgatttttcgaacttggtaatcttccatccgacgttggctgctttttgatgagtcttgtcgatagtctttccagtcgttttagcggccacgtcgccttcggtcttcccagccgtggtctttccaatcgtcttgccttgatcgccttcagtcttgccggcggtagtcttgccgtaggtctttccgacaaggttgctgtcctcagtcttgccaactgaagaggtcgtggtggtcttaccgatcaagtttccttcggtctttccaagtcttagatctccctcggttttggccatgatcgtcttgcctgtcgtcttcccaactcccagatctccctcggtcttggccatggtagtctttccgacagtcttcccaactcccaaatcgccttctgtcttagccgaggtcgtctttccgacggtctttccaacatctccctcagtcttaccaagcggagtctgatcagtcttcgtctgaccctctgttgctccctgcgtcttcccttgcgtctttgattgaccgctgatcaactttccatatgtcttgctctccaatctgtcaaacacaccctctgattgaccctctacccaaggtcgttcgatcgtgaccggcatgtttgacaagttgacagtgtcggcctgagagatcatggtgaccgagaacgaagccttcatttctggctcatcccagcatggcatggcttttcgggcgtcggtcgcttcgaactgggtgagggtatagatggcttcttgtttcgtatctttatcaatgtaggtcgagatgtaatatccctgaatgttcgagttgaaacagataggaaacagagtcgaggccattttccgtttagcgtgaacgctcagttgcccggagattgggtgacaatcatgaccaagggaaagacactcacgatcatactctgacccaactctgctccccatcccaagttcaatttgatttcatctccgttcctccaattgaagccttgaagggcagcgatatcgaccacgacctgttcgttcttgtcgtctcttttcacagcagaatccgggatattgtacacggcctcggtctttgcggcgaacgattcaatgtgaagggagtgtatatggagagatgaatgagcgttgaagatgagccgcttgtcggacgcatcctgaactttgagtctttagaaggtgcgcatgagatagtccagaaaaagaaatgaagagagttgtccactttgtatgagcatgcctgggctcgatgtttctctcgaacaaatgacaaagagatacagggagatgaatgatggaagaaaccctcacaaaatggaagatgatccctcgaaagaacgatcacggagagacgtcttcagaatgatgtcgtaatgcaaaggcttgacgttcgtaggaagccggaaggcatcggtaatagcagggttcatagctaaacgcaatgaagagagatcagttctgtgtgtgagagagagaaggatagacgacggaacgaccaatgaatccaacagaagaggagatccgaaagaaaatttccaggttcatcccccgggtctatgcccgatgcatattgaggatacacgtggagaaacacgcgtcaagtgtctcatcccatcgaccctcaggcagtcgaccgatctcatacgtctgtgtttgatgttctcgaacaccctgtgctagtgcatgcctttctttgtgcatttaaagattctatgtcgagcaagggtgcgagtggctttgggaaatgttcttttctcctctttcttctttggccccttcgtccttggcacgggcgtcggccggatccggtctttctgatcgagggaattccagatatctcgaagaagatggacgatctacagataaatgatacagaaaactcgataaaaagacacttactcgaataagacctctttataacatgtacagtagtgacgacaagattagagtgaacgtttaagattctggagatagaagcccaggtggggatcaatctggtcatgagtaaaaaaacacgtgggggtggggagagattttttttaaaaaaggactggtaattctaataagagaccgtgtgggggatgtgagctcggtatcattccatctctttcttgtcaactcctcaacctcgctcatggatctaagcagctcattagagacattttatatatggtgaagtgaagaggatataaaacaaatacaactcggaaaaccatcacagagtagaatatagacatatgtatttctcgaccttatcgagccatccatcctccatcaacctacaaaagcacgcaggcatcaaccgatctgtcagattttgtcggggtcacggataataaacgacaaaggagaatgttcactcacagtcacacactctccacacacgtaatccgatccttttccggcgaggaacaagatggcacctgagaaatctgcggggagaccccatcgcttggaaggaattcgttcgaggatctgtctggaccgagttggatccgcgatgagagccgtgttcatctcggtcgagatataaccaggagcgatagcgttgacattgattcccttgccggcccaatcgttagagagccccttggtgagtccgaggataccgtgcttggcggcggcgtaggcgggaacggtcatgcctccttggaacgatacgagcgaggcaatgttgatgatttttcctctgtcttcgccttctttgcgagtctcgatcatgtgctttccaacatccctgtgtacatgaaagagagtcatattggacggtcagttgtctgtctaccaaaacttgatgaagagtgaacacgaacggacctggcgagggtgaaacacgtgctcaagttaacctgcaagacctcgttccaatcttcatccgggaagttttctgaaggatgtcttcgttgaatgccaccgcagttgatcaagatgtcgatcctctttccatctttcgtaacttctttgacgatctgaccgacagcttcttttgatgcaagatcagctacgtgaatcgtggcttgtcggcccaaagctcgaaccgcatcttgtgtttcggtgttttcagctgaaacagatatagaaagatattttttaagaaccgtaaagagaaagacaccatgattgcaaagattgagaacaatatagacctactggatcgctgaatgaggattatatcagctcctgccttagccaaagtaatggccagatgagcgccgattcctcttgttcctccactacaaatggaatgagataaatccgcttgtgtcaacactcgcgatatcattgtcgtagcgaagagggaaagagagaagcagtagagatgtaaagaacaaagattgaagatgaacaggacgaacgtgatgagcgcggttttacccttgagcgagaagagagactcgagatattcagacgtagacatgatgctcggtatagtagaaaagattcgatggagttgacaatgagaataagaagaaagaaagaagaagaaaaagaggagcaggaggagcagcaaggtttttatctttgaaaagacaaggcgggggaacggtcacttttcccggtcgccggtttccggtccggactgccgaagcttggttgttattcctttcgttcattcacctttttgagtacaacttccacaagtatcaggttgcaggggatcctttgtttgcgagaataagtgataacacattcacagctgcatttaattgcggatagagtcctctcgacggcaaattctgatacgcaaatatttctccgaagcctgcattttcctagggaccgtagatgaacatcattgagaagggcgggatatctcgacagtggaaatacgatgaaaatacatagagtggtcataaaaacaagacggtcgatccagatcaaagtgggtcatctatccctagttccttcttggtccagatccacaggtcctcttgaagagctttgtcatgactctgctcgctgctttcaatctctttgacgtcgatgacctgatagtatcttccacttgttcctacgtcttgatccgtcgccaatttggtcacactatcagcgaccttctcgacggggaagaaatcaggaaaccaccatcgagagaatggattgctcagaaagaaccggaagatcacgccttgtatccccgcggcccatcgatacagctttgtcgacatgacccccggatcgagtgcgacgaccgtccaaccgacatgtccttcggattgtgcgtgatgatgaagggcataggcaaacaagacgttacacaactttgacagtgcgtaccgacggaaaccttcaggctgggtgtccagtgccggatcggtaggaggatgagcggcagcctcggccgtggtgtagttcggcggaggaactcgcttgagcttcggatcatgagtcgaactagcaatgagaacgatccgcgcggacgtcgttaattgggatcgaagaaggaagaacaagtatgcctggttcagatgattcactgcaaacatctcttcgtacccatccggtgagatatgaaccttgtcgacaaattggatcgccgcattgaggatcaaacaagagattggagggaacccttgagagaggtactcatcgacaaacgatttcgttccctgtttggttgatagatcgagacggatatagaccacgtctgtttgaccagtgagtttgttgatctcgtctgccacttggccgttagatcgggagcaaatcacgatgaccgtccgggaagatcgttcggtgttggctcgggcaagtgcataggcggtcgcttcacccaggccggtcgttccacctgtgataaggatagtagatgtatatttcgtgtagtccatggtttatgagagtacgtgtttaggtgggcgagcaaaggaagagagaagaatgaaacaagattgtaaaaccccatcttccatcttacatcttaaacgccaaagttgatagcatgcccggttgtatgcccggttgtatgcccgatgtgcagtggatgtatccaatcccaggaattggtaatcgggtttcttgtcttcctttcctcttggcagactcgatatcagtttggatcaatacccttcatcctgtaatggaaaacgcaaagctagatggatggaaacatttgagaaacaaaattctatcgagaagcttctaacgctatgatgatttgattgtctagatttgaccctgctaaggtcttttattcggtctttccctttttttctccattctcacttgtagacgagactccgtcctccgctttccttttcagtccgccgttcgtacttgccgtcgtagagcttgtgcgtgtgtgtgtgtgtgcgcaaggagattcacaaagaggtgaaaggaatgtccaaccataccgggttagcaagccaaggacaagataagaacaaaagagagcaaagtcaaaattccattttcttctaatccaacactcaaaacgctttccatccaaacacgaacgaagacgtctaaagaaaagaaaagtctaaggaaagaaagggggttctctatgtccaaggacgaggaaaacttctaatgatgtctagtgttcataacaaagagaagaggcgaagaagaaaaatatattatacgagatagaaaagagtgatcttacttttgagcagagaagtactcgagctgtgtgaggtttccccgattacatcaaagttgttcagaaccagttcagtacaagctacgccgacggcgaaagagagaaacgacgtacgctgctcttgggatcagtcttgatggtagagttgttgctctcagggtcccagttggcggggcagactacgtcagaagaacgaacaagtagacaagatgatgagcaaccgcgtttgtcgacctatgatgaacggcaaactcaccctctccgtgctcgtctgtaaactggaaggccttgatcaatcggatggtctcctcaacggatcgtccaacgggaagatcgttaatggtgatcctagataaaaacgaaaggaacatcccgttcagcacaccaactctggaatagaacctagagaagaacgaaaggggctcactgtcggagagtacccttgggatcaatcaagaaaagacctcggagggcgattccctcatcctcgagaagaactccgtagtctcgagctaccttctgggatcgatcagcaagcaaagcaagcttgagatcaggtccgagacctgtcgttaaagagtgaacgaaaggcggaagtcagaatgctggatattgtgatataaaagaggagcgagaaaagcaaacgcacctccctcctgtcggggaaggttagcccaagccaagtgagagtactcagaatcacacgaaacaccaacaacctcagtgttcaactcagcaaacttgggaagagcagcgttgaaagcgaggatttctatgagaatgaatgaaggggtaatgattttcgtcaatcatcaagtcaaaagctgttttttgtaaagatgaaatcaggaaccgtaccggtggggcagacaaaggtgaaatccatggggtagaagaaaaggacgagcctgaccaaagaggaaacccaagtaaacaaaaagttgatcagacgtctagaacagtttttatcaaggagcaccttcaacactcctgatccctgatcctaagcctggaagactttatcactatcaacagtactagcaaaaagataagcgaacgcaccactttccctggaaatccttgagggcgacctcttcgaaatcaccgtctcggacgacggtacccttgaagtcgggggcgggtcgctgaacaagagccttggacattttcgttttgttgatctgagattggtgaaaagaagagacgccgtatgattgaatgaagagaaaaggaggaaacagaaggcaagagaaggaaaaggaaaggagaacgaagagggaggaaattgcaaaagaggatatttaagtcagtcatgtggctttgacttgagagcatccagataatcgacacaaaacgttaggctagtaccgcatgcttacttggagaaaggggtagatgtggatggtgatgtggatgaagagatggatagacgagagaaaaatgaaaaaacccggatgggcttataaagaaaaacaatccagtccgacgaaatcggaccggtctagttgaaagaagtgtggcgcgacttcttgcacctcattcgtcgaccggtcgaaatattgaccctttgagttattttctttcttggtaacaaatgacgttcacgattggaggagtagaggtagaagaaactctctttgtatacacacacaggcggaatgaaaaaagaaagagaaactaaagagacagaaacaagtagaaatagatcgagacttctcattcagacatgcttatacatctcactctattcatccgaatgatcatttcgaggaagaaggcacaatccatcatttgttagttttctccatacactttttgacatacgaatttgaacataataagggaggaaaaggtaaccccaactcaccaatgtctttgcgttctccttctcgagctcatcaatcttgttctgcgctgccttcatctttctcaacagatactctgacctagcgacgaccggatccaatcttgactctagtccaagtctagacctcaggcttgctacgaatggtagagaaaagctgaagatcgattttcgagaaccggtatggctgatttctttgagtgagagaagttcagtctcgtatgatttgatatcggccgcgctgagcccgatcagctcggagttaaaagagatcgtctgggaggcgttaaagacaggatctatcagacagagtggtatagatccagttagcggtatgctatgcagccaaagagcgagaaatgatgagtatcatagagagatacaaggacggaccttcaacctgtaagatggcaggaagtgcgaacaaaaagtatcagcaaaaaaagtcgcctcggctttcactccgattctacgaaacgaactaaccagctttcggaacgtggcatgcatcatcggtttaccaggcttgaccgtcgatggccagccttttatagtgtttggatccaagaaatcatacgtgagacacattgaccaacgtaacaaaggaagagaaaggagagacggaccattgacgagagtaagactgatgacttcggctgcttcaagattctttagcttatcttccgctccctctgatggcgggatcgaagaacagatgcaagtaagtcagtgaaacaaccatcgatataggaagcaggccaatggcaaaaactaggcttcactgaaagggaacgacatcaacagagactggtatgggatctgtccgattatcaataagttcaacctcacaatttcgtcaattcaaacaaaacatcacagataggaaaggaaggaagactcaaacgtacatcagatttcttagctagagagctaacgatcttccaggcttgagctcgagaccagggtaaactctttgcttcttcagaatcatcaccaaatacggattttcgaagttccacctgagatctctgtagaagatcttcgacagattcgctctgtttgtaaatcacatctcctgttgtcagctgaagaagggagggagcatgaattgatctggctcgaaacgtcggatactcacaatcgacagtccactcctgactttgttgatcaatccttccaggtcatttaatcgaccaccaaacaacccgatcaaccttgcttcctcaggatcaatccctcttcgttgtccacttaataaaggcccagctgacgatctgtccaaattgagtttgtcagccacaaacgaaagtgaggtcgcttgatcggcatcggctaaagagattgtgttaatcggtttggaaggtagagctttggccagtgattttgaggcggacgtattatcacacaccacaatcacttgcgcgatctgagttccaagataccgatttaatcagcagccatgtgagttatgtagaaaggaaaagtaggaagaagaaaaaggagagttactctgttttctaccagggaagcactccactctgcaatcgtgctccacaactctggctttcgatcgcccttgctagcgaaattcttcaagacaacgacaggcagggaattgatcgaatcgttctcactctccaactggatccgatctttctccttttgagcctccatggccactgctgtcggtgaggagagagatgatggtaaggcctgtccgagaggtgaaccaagtgtggtcgagccaacggtggaaagagagaggaagagggcatcttcctcagtaggtacatccgtggggagaagtcgttcgattccgtagcctgtgcatgtatgtgtgtgcatgtttaaactcctcctcgtcagcagggctcaaaagttgtatagcagagcaacaaggcgaccccatgaggagtgaaagaaataataaagagacgtacccaactcgctcatgatcccattgccagctagatcatccaatctaccatcatgccacccaattctcttcagtctttccgcaagctcagttctctctgactctcttagcgcacaaagttctttgcgtttgaccccgcttgttcgttcaagagtagagtcttcggagacatgcttgagtgcagaggacactagatcaaggatttgtttgagctgggtagggaaatctgtactgaagccggctgtgaatatcagatgagatgagttggaatgaagggcagagtgcgagatcgggcgtcagtgatctaagaggtttgtatcaggagaatggtcaaaaataattcctacttttttgaccgatgagaccgacggccgccagatcgatcatctggttgaaagatgccaagaatccaaacattggccttgatgatgatatgggcaggagtggtgagcatcagtatgaaaggaggctttcgaggaagataatgatagagaagaggaagaaacaaaccaataaccagtctgatgagcaagaattgaacacatctcgccatcggtctttcctttagctattgctttacagtcaatcacaatggattttctttacgcggacattgagagtaagttcaatatttataacattaacatccgctagcttcattagggaggcaaagatatcacatgcgcaagagagaacataatggacaaacttttgctcggcagagaggatctcgtctacgagagcattctttccagaccctgctggtccggtgacgaagatgaatccagagggatattctttcagccatccttccgtctgtttgacagcttcctgtctctccctccaagcagactgattgacaggttcgcctctcataatttctccattaccggcgtcgataccgacgtttgcgttccgtccatcttctagatcaaggcctgtatcagctaggttgaccggggaagagatgatgaaccgatcggttggttgagtaccaggtgctggaggagagatcagccaggcgggaaggactgaagacgcgatttttctagagtactgaactaccgaataacctggaaagtgatattaggtaaaggaaccggattagctgagcagtgaaagaaggcaaagaggggagagtgaggaaggaatatacgaagaaagaaatcttaccctccagatcgaaccggccgttgactttggatacaacaaagaactctctgatagggtcaaagaacgtgtaactcagggttcctagcaaggcgactagaatcgggagagcaattctgggatgggaagagatccagtctctagctgcatgtgcctggataggggattggtaggtaaacgctaaccgagttaacgtgcccggaggagcggatgaagagggtgggatagaaattccgtgaagctagttggaagatacaagacgatgatgagagttgaggtctagaggggcaccatactacagaacgagagaccttggccagatatctggcgcgacaaaaaacagactcacacaagaaacagcggcggtactagaccgtaggcgagaaaaaacgagactagcacttctgagggttaacgggggcacaggtgtgggtggtgtgatggtggcaagatggccaaatggtctcaacaggtcgtacagtctttcttggttgacgtccggtccttcgaacgagaccgtcaactgggatgaggggaaccgattcaggtcttcgtaccatggatgaccaaggaccggatggatcttgcccttcccccaccatgcccaggtgcgaagacctccgaactgatcgattgcttgctggaaagcgtgttgaatttctttgagggtgtgtgcccggtcagaaaagccttctgattcaccagacgatcgcccttgagagattggccgatcataggaaaaggtgagaaaaacaccacctgcttttggctgtctttctatcttgagcaaactaaatccatgagcattgacgttggaagcgatcaaggagaactggtctaacaagtcgtcctttctgagtgaagccagtactgggcgagggctaggaataaacaaaaggtcaatacggtcgctagaactactttagaagatccatatggactcactctgccttcccgagctggatggggaatataccggacgcataaaactgagcttcgacccgttccaccggcggctttggagtcaagtgaatccgaattgattttgatcgttcgatattgaattagctctaggatttctattgaacgctggtagagacgattaaacagaatctcacctcataggcttcgtcgccaccaaacgattttgaattggtctgagttggatcgtatgacgagccgaattgaccgagtgacgagctctggctttgtggattgatcgttgtctctactgcttcagaagcaaacgttctattgaacagaccaccgagtggccgagaaggccgatatgaccgagaagcaaaccgggagacgaccactcggtgcatgtgattgtggtcgtggtcgggaagtattcacgttggacaatcagatctgtctttttaacaagcgaattacctgaaagcagagtaaaagacaacgatctcgaggtagagataaaggtgaaggtgagtgtagatgtataggtgaaggcgaccagagattaataaaaaaactctggtgacgtcatgccttgttttgtccgaccggcttggcccaaggaatcagagaagaagagacatcaaagcagagtgcgcgacggagagtaaacacaacatccgagatgtataagttgatcgatgacaacatcaaaagagagagaaggatgccatagatacatcaaatagagagatacacatgcacatgagggagagatgactaaagaacagttacgccatctttcccacggcgagaagcgagtaagtatctctgttgtctcttaaatctcttccatctcatggtcatggccagggtcatattaaaccctttctctcatctctctcgatcctttttaccatcactcgctcgctcgcactcgtatctgcatctacatccgcactcgtattcacacttccctttatcaaactctataagacgagctatggctaacgacaactccaggtcgtgagtttttctctgtttcatctttgggcgacacgatgttcatctactcttgtctgctttcctctctcaccatatgaaaacaagcgatatcacgaaatgggccagcagtgacggccagttcaaacgacaggtctcttcctttagggacgttatcgaagagggtggcaagtttcagccagaagcaggcagatatcatctgtgattccttttttcttttcctcgtgcataatctcaatcgctaatggctaaccatttgccatcacctctctcccatactcgataggtatgtctccttggcctgtccttggtaagccctttcatcttgcaatgtttatccatctatttatccatccttcgcctgaactggggcacttgctttttttcctgatattcctgcagggcccatcgaacgttgatcgtccgaaagcttaaaggactcgaggatattattggtgagtcctattcgttccctctgctctcggtcactctttgcctattgtattcatcttctctggtctcatccgctttctctcatcagacgtttcggttgtccatccgcacatgctcgaacggggttggtcgttcgaaacgtccttccccggtgctacaggtgataggctcaagctcggtggaacccatctccgggacatctaccaccaggttcagccagactacaatgcccggtaagtgttggtttctttcttcttctcccgctcttgtcttctccctcttcccgtctgctttatcctttcttccttcttcactttcttctcctccgcctcctgtcgtctaccctcacttgagtattcaataatctcttcttcctctttttgctcactgcagatacaccgtgccgacagtgtatgacacaaagacaaagacgattgtcaacaacgagtcgtctgaagtcatccggttcctcaacaccggcttcaactctattcttcctgccggctcggacaagcaagcactcgatctgtatcccgatcacctgaaggcccaaatcgacgagatcaatacgtggatctacaacgacgtcaacaatggtgtctacaagtctggtttcgccactacccaggaagcctacgagaaaaacgtccgacctctgtttgctgctctggacagactcgagcagatcctcgaaggcggaaagctgtaccttgtcggagatcagctcacagaggccgatgtcaggtatgttccgagcatttcagttaatcgtaagcggccctacgaaatttactttgatctggtctttcttagactcttcactactatcatccggttcgacccggtttacgtcggtcacttcaaatgcaacctcggcaccagtatgtctacttttcttttttgctcgatcatcctcgagcg

SEQ ID NO: 1348 - DNA, 16041 bp, Xanthophyllomyces dendrorhous
atgagttggtccggcaaggttcgttctcattttagaacttttagtctggatgaagccgtcagaattagagacttgtgctggatttccagagtcagcgaaagtcctcgacgggcaatgaacttgtctgagagggagagttatctagcatttggatccaaatgagagataactcatagaagtttctaatcaagcttctttgtatctcacttgaatacatccttggggatttggaaatagatgttcgaacttaaagtaccggagcaagataggtccgttccttctcctcttcctctatcttccatatagtttaatgcagtggtaatacataaatgagaagatctatactgaaaaaatcatccgggaaatgaaaattaggatatgggacctcaagaacctgatctggagtctgacggaagtcccgttggaaagaatcaagctcatcgggctgactacgacgaaggcaggaactgggttggaagactcggtcgttataaaaagtttagggctgaagagtgggaagaaatttatgatgctcggttagttcctttcttcttcatgtatccttctgctatgggactctggaggaagaactgccggggttcgttactgatgaagctctggaactgtagggacgagtgtggagaacagttttaaagagtgagcctccttccctgtctaacctgatgcaataataaaatctcagagattaatgacgaattggtcgtgtggaaaaagtccgacgaggcttcaacaaaaggaaatcatcgatgattttgatatagattattcaagcgcgcagatccctcctcacgaggttcgtgctgtgtcttttactttcgaatccgtggtcacaccgatcctggatggagacgatgttgcttgacttatttgagaggagtttactcaattagcatgtattataaatttcataggatcctagaaatcagcggaagatcaaggaaacattcgagaaactccaaatcaatgttcgatctatccgttcaatttctgtaacttctagaatgatgaaagagtatcttttgaagctgatccagtgcgcacatcttccctttcttgttctcaagattatcaaccctcctcgaccaggaaagaagctcctcgtattggacctagactatacactcgtcgacactaagcctctcatttcaggctcgctccctccgctagaatgcgctcgaccgaatctacattcgttccttcaaagagtctaccaggcatacgatcttgtgatctggtcccaaacgagttggcgttggttagaaagcaagctgacagagctaggtatgctgggagatgaggcagagcggatgggattcagaatttgttgcacattagaccgaggttccatgtttaccgtctttggggaaaaagatggaaaagaatacaagcgtatgtctgagcgaaagatggattctagatttgatcatccgaagccgtcattgactaagtcttgactttgaaaattcattgttgtttgtttcccacagatgagtaagtctggagacagatctaatttacttttcgttgtatctgttctgaacattcgtaactatttttgcttcgtcattactcatgcttcagggtcaaaccgtgagttctatacacatacacagcaacaagagtttctcttatctctaagtactccattctttctggctctcttgacaaatccgacaaaacagtctagagcttctctatctccaatttccagagttttcaccggcaaacacgattcatatagacgatctcagtcgaaattttgcttgtaatcccagggaaggattgaagatcaaagcttataaatcagcagaagctgtggctgctgaggctgcgggagggtcgaatacatcgacgggagaggaacatggggagccgaggagaaagagggacaaagagttggacaggttgggtggttatgtacgtttgccacattttgatttctctcttcttccttctttcgttccgttttccttgacagtcaggtcgagagggaaatgatgtcggtgaaggttgatgctcttttctttcattacgtgattgggatgtactggacgtccgatagctcatggcgctctctagatcagacaactttagaagagatgtagaccacaacagggtattctatcttttctactttttcttcttcttctcgttatctatgttcttttggagagatggaccggtcatgttgacctactgatcctcttccattcattttgtgtatgtgtgtgtgtttgtgtcacgagtttaggattggccggcatacagaagacttgacaaacagaaacaacttccaccagacgggaacttccgttgagacggtttcctattcctacctgattcctttatttaattctgtttctcatgtcttgacaccgcaatgtatatataagcgttctggaagacgtttggagcaatgtattctaggtttggataatgctgagaatcggtttgctattgcatgaaacaaaatttctctttggctccattaaataaaggacccctaaaaaaacccaaaaactaccatctgggatctcagatgagacaacaacaagagaagaaacaggagtgcagcagtacagcaggtacagagagaggaaaacggatggagcgaaaaattagatctcgccaacagatttcagaccggtctccatccagactctgctccgttctcgatcagctatgtcctgcgcgctcgctctgaaaaaatgtttactttcgtttccattcgtcgattcatcagtcctgttcgttacaaggattttttcaaaatccaaaaccacaatttaggcatcatgattttagatggtatgaagggcaatgagggatataaggagaacgagagcataagataaagaaagcagcgaattagaagaaggacgaaccatcggacatgtttggcttctttgtcgaggataactttgacggtactccagctgaatctgacgagagaagggtatccaaatatcgggtggagagtttgacgaaggaatgatttggtcgttgggtcttttttccgcattattgcacaaaataaaacaatcaaattcaaataagaacgagatgcaatgataggtgaaaacaaaggtggatggaacaaaccagaggggtacccggaacccatagcaatctcttcgcccttccctacttcattctccgactcaaccgtcacctcgaccacgacgttctcctcttccttaccatcctcttcctcctcttcatcatcatcatcttctatagcggatcccttcttcttctttcctccctttcttacagctgcctttcgttttctacctacagttccatcaagtccagatgaagatgtagatgtcgcagtcagaggtgccgggttggatttgatcctgtatggaagattttcctctggatgaatccaatgggttatccatcgatctcttgtgatctgatgttgaaagaagatgtaagaaaatctttcagcaaaccaaagagcagagagaacaacaaagaagacatgaataaacagaccttggctgctatacttgcggcactgacgatcttgaagagagagtctgcctttggacaaactgtgaaagaaattgtcgggaagagcgcagaaagtttcgcctggtatggtccacatgcacctagcgcatcgacgtaacactgacaaacgggaaaggaacgagtaagcagaagcacgagaacacgaggcgtaaagaggagcatgaccaacttcagctagatcaattccttttcgcaagacatcacctataagccctatagtagcttcctccgcctgtttgttcaggttcacaggagctattcctcggagcatatctttggagatatcaccaggtgataaaacccgtgtagcgtaatgcaattcgtggtaccctccttcactatcctcgccgcctttgtcaaccgagggaggatcgttcgggttttggaaaagatcaaagagatagtctcgagtggaatgtgaaagaacttttgaatcatcgaacccaagcgtgtcgagggtagagacaaaggacaacggcgcataggcgcaagcgtataccataggacctgagcaagagaagagtgatctagtagtcagcgatcaaaaggccaaagggtctgatgtctgatgtctggtgtctctagattttctgcgcgcacctagaacaggacctcgacctgcttcatcgatacccatcacccatcgctctctctctcgtttagttcccttagtttgagtctcgctctcggctttggtgagttcggtgtccttctctgtgtctgtctcggaggatgaagtgaggaccgataaggtatctctctgatccggcaagtcatatttctgacgagtccatgtcgaaattggagaatgatatgtataagagaaatgcagaggtcgcacaggctggggctgaatcgggtcagtcatgttggaatggatgtatagtaggtctaacgagatacagaaattaagaggatagttcatttaatgctctacgcctcacgcgtcaactcttcaatcgaacgcgtctgggagacgcgtctaacatggtaacgactgacgtcatcagtctgtaacccacggtcacagcgttttcctcggctcccctatcgtcatcggtcgatgggagaagagatgagccagtcagacaaaagtatccccatctctttcttttcgttcttctcctatcaactatcatcaccctagaacttcattcgcaatctatcaaatctcataactatgtctaacaaggaagccactgatatctcttctgctgctggatccaagggtaagtggtttacttgtgtctgtagagaacatgcgttggtcgtccgaccaggtgctgatcttactggttgcctctcatttttcttttcatcttttggttgtctatacatcaattgaatttccttcctaattctctcatttgttgttcattctattgaaccaaacgcttcattaatcaggactcgaggctgccggtggagtcgccggagctttggagaaggagagacagtaccgaggagccaccgagggcgagggtggtgagtccatctccggacatatacacctacgaatcaagttatcatactgacattcaagctgattcggtcattcttccggatttctttcagagatgaaaggtcaggatgcgcacgctcaggaccacgatgtgactggagagcagggtagcggaaccggagctgccaactaggcggtttccttccctcattctgatttttaatgatcgatccattgtaatctcttattgtctcattgtagctgttaagatgcctatgcgtgtatcatgaatgctggcctttgatttgatctctccctatcgttattcctcttgatctcacacgatcacctttggggagccacaatatctactgcggaaagctagcaatgacatctgatgagtcaagcaccgcgagttcacgccgcacaacgtccgaaatcgttcatacctgtcgtcgtttcagtcaacagccactttgtcctacttggtttcctctgcctttccctttccattcataccatactattctctgcagtaccagtattagtaccagcaccagcatcaccatcactgtcgccaccttgactgccacgttagccaattacatcatccttaatcccgttcatcgagcctggacaatcattcttccacagacgattgctgccagaaccatatcaacattcaaatgcaatgaattacctttcatccctcccgtcatacttctcctcatttggtctaccttctttcccgactctgagcctacctcagaacattcaaaaacggttgtttgcatatctcctcaatagatcgataggtcatctcgttaaaggcggagaagttgacccagaaaggttgaccgctcaggtcagacagggcaaggtggagattgaagggttggaacttgacgaagaagtacgtccgttgtttctagtccaccatatccttgatcagtccgttatagctgatatgccaactttgggactgtatcaaatattctttgtgctgattatcacctcggtaggctatcaatcgattgattccactttctgtgccactggtgttggaatcaggttctctgggcacattagccgcacttatcccttggtccgcttcctccgccaaacccacttcagtaaacacagcagatccgtcttcaacaacagcttcctctccaacatccgggatatccatatcgctttcccatctacatctcaactttgtagttgcgtcccctgcttcttccacacctctatcgaaatctaaaacttcagcttctcaatcaaaaatagaatccgaaccgatcgatctgactcaaagcgtcataagcgtcaccgaagacttcttacagtctgagctgaatccccaggagtctagggatctggccaggagtttcgcaggggttcaagatgtatcgattgatctttcctccacaaccaagaacatcgatccgtttgccttggaagaaggcgaaggattacgggaggacgaggaagaggaggaagaagaggatggggacgaatggatgccccctggcgctatgccaggctccaattcaaaggccagagggggtggcaaaggaaagtctaaacttgcagcagacgtaagcgaagaaggaaccaagacctttctcaaaggcgttatcagcggcttagtaaagcgactgaaagtcgatgtgaaggatatcagagtcaggatcagatacgccgatatgccagaggacgactcggggatagaattcgagtttgcggtcggaggagtgagatatggtgaggaaggagagtccaactcgggacccttgggttcggcggctcaggagttgagagttagcggggtttctgtatctaccagacactcggaatcttctctcagaacatcggattctcactccgattcagccgtctctgcatcatcaccctttacgtcttctactgaatctgattcatcagaagatgaggatgacgaagaggtacatatgatgatgtccaaggcaacaatcgaccttcgacagagccacctgagcgaaaccatctttgctagtgcgcgagggggatctttctttgaatcgagcgcacagatcacaagagaacattcttcaaacgtcggagagaagaatgcaactttgtggggagagaagtgggaaagattgatatacgttggaggagataggaaagaagaagagcagaatggaggagatattgtgttctccatcagatctcaagagagagggggagaagggagcgcacggctttccgatactgggctatcgatcaaggtgaccatccctccagtttccatcctcttacttcctcttaccatacaatccatactctccatcacctctctcttccaagcccacgcgtcttctatatctccctcacctgcgcccacttcatcaccagcaccgtcttcatccatcaaagcccttgatatccatctctccgtccatcttcaaagtttctctacaggaatcgtccactctgccaaatcaccttcggaaagttcgagagccacattctgggcgtcgaacggaaaggcaggtttagatgtggattggctggagcttggaacggatgaaacggtcgtcgagtgggattcaagaagtttgggactacgacccgtagccgggtctagtagtcgggcaaaaattagagccactgttcaagacgtgtatatgtgggaacatagggaggagaaagaaaatgaagagatcggcgataaataccaggggggaaggtatagcacgatctatccgattggagtggtcaacccggagctcgaaagagagtacaatgtgacgggactcggagggtttcctcagtttgcttttagaaacgaaaagacagcaggcgattacaactgggaagaatggaggagcaggagaaggggaggtagagggagaaaggcaattgttttacagcaaaagattgaggacggagctggttagtggtcctttctaagatcataacagtctcgctttcatctgttagtaggcactgatcaatcaatgtcttgataatctttggtatgaattgtccgtctttaggtttcgagttgaatcttcctccaattcatcttttctgcgatctctcgttaatggaacggctcataccatggcttgaccgtatttccgcctcttcttcgcctcaaccgacccgcgcttcttatcaacccaagcctgttcgaacatcccgtacacaaatgcccgcttacaagaaaccacttcgggtgatcgatgacttagaagcttcaaccgagctcaatctatccgaagaagtcgaaactgatcggcctccggctctgctagttcatatctctgttattcgcgtagaggccaagtgtccaacagcgtctactcattatccatcgacagacgctttcgacaaacaagaaaaacgaagggcgcggtcagggacattggttttggatcttcaccaagcgtccttgagcatgtttgcgtcccatccttctcttttgccttcatcaagctccgtaaaacaaaacgggtatcttcccagattccgcgctcatggctatgagcaacctaaacttgaaactccaccttgggtgaacgctgaatggacaaacctaaccttgttctttgcaggtgcttcggatgacaaggctagagcatttgtgattctgggaccattaagagcgggaaacgacggacttgacgaacccgagctatcaccagcaccggtggacgaagatgctttgttgcccagaatccaaattcggttggatgacttaccatcgaaccgatctggatctacggtcaaccatcgatctggaccgaatcaaggaagacgatccaatccaactccgatcgaacttgaaagaagggagaaaacaaaatcgatcggttttcggattccttcagtcaagatggacttgaagaagtcgacgatggatggcctgcagtactttgcagatgacctgaccaagtggtcagctgagactcttgcatccgtatcagcaaacgacgcagcgaaagaagagggtgtgtcggaaggggatgtcagattgatgggaagtaagttttccggaatgaaagttgttgaggaggaggacgaagactcggaggctcgtggttcgagagtcatggaagagaacgagggagatgtggggttgaaagttcagttggatgttttcgatggtgagcatgtgtggttcccttcctccaatacatcagttgagcccatgaacttacttcagatctacggtatgatgtccgaatctcaattacagtggatgtactgttgagtgttttacggtcaacccaattgcctcaacttcaaccagaccgaaagcttcggatctggggtgctgatttgagcgtcacagccgaagtttcttctgttgtcaaagtatgtaatgtcttcgttttgcttcggatccaaaacatataccgacaagattcccccttggttaaattttcagaaaaagacgttgatcaatatcaaaatcctggatgcgttgctagaggacatctcggaggtgatgaaaccagtcactatgttcgcgcgcacgaccaatcgaagcttggtatgtcgttttcaacatctgttgttcatcgatattatctcaaattaactttattcgcatgattttctgcgtgtgtgtggcttcttttccaatttaattgatcaaaggatcggctttcaaagccattgttgtctattcgagccatcaacacttcaaacctggactcatcttccaaagagacagatctgcagatcgtctcttccaactgtatattgtttgaaagcacagatatctcatggcttacggaactatcactcttcatcaaaccaccggaaggggtgagtcttctgtctttatatttgatcagctcacacttttctgaccttgtctcacgatctgtgtatcatataggcttttaccgatgtagaaccgactgacgtgattcgaataaaactcgagatggaagacacatctgttcatctacgagcgccatctcttccaggcgctctagttctgacatttggcaacgtcgcaatttctacgaaacttttgggagaatcttcgaaaaaaaccgtcgatgttgctggctcttcgatccggctgttcgtgatcgacgatgtcggaacttctgttattgaacgtgagggagacagttcccgaccaatcaatgctatgactcactggacggtgcgcacttttataattttcttactattcatctatgtagtcgactacataactgaggtctactctttcattgcgttcatcatatgtctcatcacaacttttccacctcagaaactggggtttgctcagatggctcatctctcgacgatcgagatcatcgtcgacatcgctgaagaccaccctcggatcaaagtgggttttttagattctgttttatgaatagagatagttagaggtttggttcacgaaccggttgccttcttggtcgcttgctgcttactttcaggtcgatgttcctatccttcgattgcaagttatgacttgtcctgactctattccaacaattggagctataattggagatatttccaacgggtttgccaggtaagttaaataaaatgtacatatgacatatgactcaagaccaaactcacaacacatacctgcctccaccagcaccgataagaacacattggaaacgaacccttctcctgccacaagtagcatcagttctagtcggccggatttactttgtaagatacttcatcacccagtgtcaggcagaggctcgtgtgatgatctcatatatgatttgaaataccacagcgagtattgatgacgaagcgttccgtcaaccaccctctctggtcgtcgatgcggactttatcaaagatgatttgcctcagaacgccgactatctacatacgtatcggccacctaccgagcctctcgaaccgttgtcatctttcgagacgattggaccaggtcttcccttcaaatcaggagtcatttcaaatatcgatggagagacgattcgtattctggatccaagaggtattcagatcgtcgaggattattggtcaaccttgttaacacagcaacgcgaggaggtagctgagacgtgagtacaatttccgtgaccgagaacacctaaatctcttattgatcacactgtttaaccttcattcgtcagaactgctattccaacattaaaattccgacttcgaaattgtgacgtgtccttttgtcttcacgatgggttcgattgggttcatactcgtaagacaattgagcatgaggttaaggttgttcgtcgtcgactggagaagattcggcagcttctcgcctctggtcaaactccggacgaaagcattgaacaggccgggactacactctttggatccatctatgtcggagcccctcagttctctactgactttgatgccagtggatatctgggggcgcttgcagacgatgatttattgcatctcgacctcaccgataccgcaagtcaggctacctcgttccaatctatcaaaggccgaccaagaggatcttcttcagcaccatccaaatctcgttcgaaaaaacccaagcttacccgatccaagcatgctaggatcgtaatcaatctacaacaagtcagggctgtggtcaagacttatgggttaggttccgaacttgcggctaacatccaagttacgatccaggatttggatgttctcgatcaaatcaaaacatcgacttggaaaaagtttttgacgggtatgcgatcggattctagggggaacactagagaagcggactcgcatatggtctctatcgagctgaaaaacgtcaggccactacctgacaacccctcggaggaaggccgtctcaaggtacgtcgatctattgcaacaggtgctttcgatatatgggtattgttcgactaacgtatcgcttggcttgcatacgttacaggcaaaaattctgcctttaaggctatacgtggaccaggatgctcttgactttctcaaacggttcttcgctttcaaggatacccgatactcttcttcagctcctcctgattcaaaggagacttactttcgtgagttcgctacgatcaatgactctgccttatcaaattgtcctaacataacctttttgtatcgtcttgaatagaacatgtcgagatcttccctgtagagcttaaactggactacaagccgaagagagtagattatagaggtctccgagaggggcgaacgattgaactcatgaacttctttcattttgatggagccgagatgacactgcgcaagattactctcaatggggtccgtcgccctctttttccacacagttctctacattattgttgctgaatcatgctgatggttgtctgtatggcttggtacaggtcactggatggccgcggatctttgataccctcaacgacttatggactccagatgtgaaagcgaatcaactagcagaggttatttctggagtcgcaccgattcgatcgctggtcaacgttggatccggtgtcgctgaccttattcttcttcctatcgagcaatacaaaaaggacgggcgtatcgtccgtggtgtccaaaaaggaaccacttcgttcgtcaaatcgaccgccatggaagctcttaaactcggagcgaagcttgctactggtacccaagtcattctcgagaaggctgaacacgtccttggtggcaaattcggtcaacccatcgaaacggagaccctgcaagacgatcctttacgtcattatagatcagagaatgggggcagtagcgatgaggaggctgatgaagtcagtcgatacgctaatcagcctgccgatgtatccgaaggtatctcgactgcctataaaagtcttagtcgaaatttcaattcggcagccgagacaattttggctgttcccatggaagtttacgaacggtcaggtactaatgtaagtgaaaggaatattttgtgctattcaatgtctgtgccttttgtactgaactcgatcccttcgatctctcgcttttttcagggacctgtacgtgccgttgtccgagcaattcctattgccgtcttgaagcccatgattggggctagcgaagctgtcagcaagactctcttcggacttcgcaacactcttgatcccaatgccattcaagaagcagaggataaatacaagtaattgcatcctttgttcttttaacttattcgctattttcgcgcactctttttttgtttcctatattttctctctttgtctgatttttacagtctcaacattgttgagctttcatagggtttatgtgctttaccctacattccctctttcctgtcatccactgtctttcactcattttttcaccaatcagttgtatcatccaatcacgcttctgccctaacgaccacaatgagtatctagttcatcgtttacgtatttgtttccccacagtccactactcagttttgcattcgtttccatcaaccagcactctggctctgcttgccatttacagtttcttttctcttcgcttcttcaagtttgagatgatttcttcgggatgtttgttgcgatgaatataaccatttatcgtttcgtaattcttagagtgtgaccgcattagtctggactgagagccggtcaagcttcgacgtgactgaagagattagttttgatctgttgacgagagaacaaaaacacatatttagaaaagcgctccacagagaaaggagtatggattgactgatacgagagcaagaaagaggaacattgacttactctgtagccaactcgtcttccaaccttgcaagctggtgtcgtccaagagctgcattcctacaaaacgaaagaacatcattttctcggttagtagaacagtcacttggtgccagccggaatgattcgtcgaccatgaatagaaggtaagagggcagatatcaaacaaactgtttttgcttcatttctttgtgttcgagagctcgagctcgcatctcctccaactgaggccgaaggacgttcaggtgattttcaatctgatattcaagtatgtgatatgaaagattaattcaagttagcaaaatcgatagcggtctgtcgataaaggaggagaagacacgcacggtagcgactctagatctcaaaccgccttcttcttcgcccaacgtctttccaccgacctcctcgttcagttgtctcagctctgcaaaccaagccttctccatatcggaaagcatcggctgatgacgatccatcaatccctgcaacgtcttatcgactcttgagatcaattctttctgaacattcctgaccctttcaactctagcctgaaggccctcctttgatccatgttttgatccaaatctcatcgaagctgtgagatcttcaatcttcatcactttatccatctgtctctcgagctctttgagttgaagatcgagtctggcctgaacagctgagccagcagagagaatttcacgggtagatgaccggaagctctggattgtcttgcctagatatcgaaggttatcaggtgtgatgctttccaatgtcttggtctgtccggacgggggaggcggtagagcaattcgtgctttgagcggaagtgaagatcgatcttcgagtatggtcgggacgacaaacggatcagttcgaaggtaggatgtataatgagacgaaggggatggaggagaagaggaagaaggtgtaggcgctccgagggcgagaggtacaagagcaggtgaggaaggcgtggcaactctgagagctagttcgagggccaccagttgtagtgacgatgttaaagtcagaagagagtaagacagatatacgtcgctgattatggcgaccgactggataggagccgacgttctggaaaggattcgcaaatatacaagaagaaattacagatgagcatcgtcctgaatttttcctctccctttccatttttccgttgatcagatatgattttgaaagtatcaaaacactcactggccatcctctgagaccgaatccactacgcagccgaccaaactaccgactcctcttccgacgaccctccctaattcgacttccctcttgtcctcatcctctagccctaatgccctacccaacggacccatccagctcttcataacgatacaatgcacaccaagcgcatggtgtacataaacggtgtcttcgtacaaggggtccacaaagaatgatggggatgttgctcggagggctgttcggagagatgaaggtagggatctaggagaaggaagcagagtgatggattcgtataccgataatgtagggtttgattcagaaataaccttaagggccgatgaaaggaggacggccgtcagttcaaccctagtttgtaatatatcaatctgttgacaatcatgagatgagcacgtaccgttttgcctccgctccatacaccttccatcttttctacctccagacagacatctactcttccatccttccacacgattcccaacacccctaaaacttcgcccttcttaccaatctcttcttcagcagtcccatcttcccccaacccgaccatgaacaaatccgtcgcacttcctgtcaagtcctcctccccctcctcgtcatcgatttctttcgggggcggatcaaacaagaatggaccttgcacggcggttcttttgagcgatcctttcatgtcctctagcttcacctcaacaggttccccggacgtctcttcgtcagatgcatcttcgatgtcggccgaagggatttgtcggatgagctggtcaatccactgtttttgggcgtggtaacgagcaagaaggatcggatctggtagaacagtcgttatggatgaagtagaagaagaaagtgatggcgaatgtaagaacgatagcttttgagcggtgacagttgacaacgagtagatgagcgatcgtggcaatcgacttgaaattgacagcattgaggcccagaaggcgttacgttaatcatcttattcaatgacttctaacgtttggagaaggtgcatacacaggcacaccaaaggatgagcactcacgcaacgctaggtaggaa

SEQ ID NO: 1349 - DNA, 17222 bp, Xanthophyllomyces dendrorhous
ttttccattagtccgtagatactgattgaaccccaatcgccctcgcccctaccgagcgcgaagctaaccgcctccctactcccgggttcttcggccgcccagtatcctgagtttctgcctgacttcttgtttaacatgggaggtagtagtgaaacaacctgttggggctcctctgcatctttcagaggatcgtactctcgcagctgaccgtccaaagtcaggagcagcaacgaagagagcgtggaggataagggatgccagagtgccttggtcaagggagatgacgatggcgaatgatgataactgcctatagggatagatctatcgatcgagttgtcataagagtaattagttgatttaccgttcttgttcatagatagagatatgaaagggtgccggagaaaccaagtatactacataccggcattcgaccgtcggagtgaccaagttgatgtatcctggtcggggaagaacaatgaccacaacctgacgagatcccagaactgcgagaagtttgccagtaggcgaagggacgagcgacgtgatctcaaagtttagattgggggttcgaagtgtctgcacaaacagatgaatcggattgttcgaaacattcagtaacagattcaagttcattttgaaaagacgaaagaatgaaagcaaagacagaccttgaatgaacctcttcctccgctcttgacctctcccaagctacacatcctgatctcatggtcgacggccactatcagatctcctcctctgacaaccatagtggaccgtttggcatgcttgcccagtcctcctgttgggttggctgctgtcgaagaggaggctacgccgaatgcttgagctggcgcggagggaagagtaaagatggaatgggaaggaagagcagtcgaaagccaagactctgtactcatcttggaatgggtgagagtgtgtgtatggatgtagatgtggatatgctatggctcgaccgataaaaacgagaggtttgatcagagacgagatgacggttgaaggcagactcagaaggaaacatactcaacaccatcagttcgttggacctcgtttacagatgagccctccccacttgacgatacatcatccactcgaacatctcacagagtacagaatcaatgcgcctgacgatcgttcgagtcagggattccttcttcttttcctggttggctcagtcgttggatctgtagcatggagctcaagggtacggtcgattcgtccatacgaccttcttgctttcgaccaacaagaggtcagcctttctttctgttctcactcgcttcatcttgttggtaaagatgatgggttgatacgacctcgtcttatctcattctcataaggtatctttttgaatctgatgaagcttcttttaaaacgaacgatacgtcaacaagcagatcattctacctatgggccttctcctgtttctctctgcagtcttcatcttgatctgtattatactcacacataagtctcttctatccggtaagtcttccttgtggtactcatctcttcgactttatgtctcgtgattgagtgttgtttgcttttcaaaaactgaatatcacgacagaatccataatgcccatacctaatctgggcatccttcttacctcgcgctcgcgttccctcctcgctccaactccaattgagaatgagcgcctgttcattcccatggaagacgtagagcatatagtgatcaatgaagccctatctagattctctgtgattggatttttagagattctaagaagaaaaggaagagagcatatcgttgtcttccctgtacgtactcccgctcccctctactcgctcactatcagaaccaggatcgtaggattttgaccatcgttctttccctgttcttctagacgctactgcctccaacaaaatccatcatcccaatctaccaagatctccaaatcattatttcatccaagtcctgagatctgtcatgttcatcgttctgtctggtgcgtgaatcatttgccaccatcctttcagaactccgccatactatatggcttccgcctattcagccaccgatgttccttcagcgtctttcgtgtacaatgccaagagcatggcgacaagggagaaagatattttatcaaatctatcgactgatgtaaagaagagggatactcggcgtgaggagcgcgcgcttattctacaataggaaatcggtgtggttgtatatcaagagactagtccaactgattttcagtatataaaaagatgaaagaaagataaaaacagatgaaaggagagaaatgtcaagaacaaaacttgacgtgaatcatattactgtgcgaaaaaaacgctcagaatcaacagttgctcagatagagatatcagcgttgattagtccggctgtcaaaagaagggatacagtccatcagaatctcccgtgtgatttagaatgagaatagtaggagataggcaagaggatttgaaatcagacgaaccctgagaagccaaagagtagaagatagagtccttctttgacaacaggttctccggtgtatcaaactctgcaacctgacctttgtccatgacgaggactctggtagaatgcataatagtatccaatcgatgagcaatggtgattgtagtcgtagctgcaaagtcagggcctcgaaggatctcctgtacagcagcatcggtctcaagatcgatctgaacaatcaaattcgtgaccaagaatcagtacgaatgcaaatggcactcataaaggagtagaaagacatacagcggaggtagcctcgtcctgagtcatcatgggcagggttatggataaaacgtcagattgaacctgtcccaaagtaaaaaaaattgaaaaggagaagcgtacaagaactaaaatcctgctctctacagatacaaatagtacaaggacgaagacacaggatgagtttaacatctatatatgaatacatttggagcagactgccaacaaacttacttcgaagcaatgcccgggcaaagcagatgagctgcttttgaccactggataggtttccacctccttcggtgacagttccgtcgagtcctccgttggcctcagcgtatactctaacatagatcagtgtatcagtcagatgcaccagtattgacaaggttatcctgagcggagaactcacttgagatgtgcgtggctcagtgcctcccaaattagcgtatcagtgtattggcctagaatgattaggagaatatcccaaatacaaggttgagagaatagcgatcagatcttcgtttttattctcagaaattgtagacatgattcagacgaaggcctaccaataggatcaatgttctctcgcaaagttccttcaaacagttgaggatcttttttttggcaagcgcacaaagtatgagtatctttactgtatcaaaactgggggatataactgaaaagacataccttgaggaatgatcgaaattttctatggaataaccatacacgatatgagaagagtatgaaaatcagatttcgatgtttcggactgaaaacagacaaacgaacgtacacttcgcaagtcatgtaaaccaattgtgccgatatcaactccatcgatgaagatacttccggcggtggcttcgataacctatcaaaataaattacagcgccgtatgtatctcagtacagttcatcacctaatcatcaggagagtaagaaaagacttactcggaacagagccaaagtcaaggatgactttccagcacccgttcgtccacagacaccgatttttctagaaattgtgtttgcaaaaatatatcataagaaactatcgttcagctataacgcacaagccaaatcagactcactctgcaggcttgatagaaatagaaacatcggagacacaagcgggtaaatcgggtcggtaccgagtagtataattgttgaactcgattgcgccctatttacaaaattcactcatgatttagtgtatactcgggcgtgctataggaacagcatgggacgcagacgaacctcttcgggccacgactctctgggagtggtctccgagatctcgtcaggtgcctcggcatccaaacgggtgtaattgatcatcactcgctcaacggaaacaatgtttgtctcaacctcactggcagatcgaacaacccaattgagcgaaccctgcagacaggtacgaaccaccgatcgacaggttaagttatgagtgcagatgaaaaaattaaacgatgctgataggagacttaccgttacagagaccgcgtaagacatcattagacccacgagaccagcgtcaacgttacgagagactattaaggcaaccacagagaccaaagcagccgccaacatgattaacgatcccaaaaactccagtcgtacagccaaccatctgatacggatttcggaaattgaatgtcagttgtgaagatagtgattgatgggaaaaaatatgcaaacgtaccgattgaccgacacagaaggtagataacaagcgttgtttcggtcgaggaatctgttcagacgataaaagcaagtagcaatgagtaccgatgtgaaataatacacttgagtcgatagaccacatggacctacgcttcgttatgagcagagaatcgagcggtttgggaataagctcggatggaactgagtccacttagagtttcaccgaaccaactaaagatcggcgctcgggacgtagagtctaatctcttcagctctcttgatgaagcaagatagtatcgcataatctttcggtagatgaagaagattgggatcacaccgatgagaatagaaggagctccaagaccgatgacaaacagaacaccgccaacactggctaaagttcggaaaaatccagaaaacgttcgaatcaagacttcgtcctatcacagttcaaacaaaacacaactcgatcaggactcgatcaggactttctgtctgaaaagcagagacgtacgataacatagatatctcttgagaaaacattaagaattcgaccctgaggagttctttcgaagaaactcataggacttctcatcaaagcgcggaaagcatcatcatgaagcttctttgagcaacgaacagcacagaaagtccctgtttcgcaacgaataaccaaatcagtcagttacggaaacaaaaaaccgtcctccatcagatgttgtagaagtctcacaaagcagaagggaggaaatcatgttcagtactgaagcggaagcaccagccagtccgtagaagaacagatagagtccgatggaagctatatgcaacaacagggcaagatcagttgaaccgcactctaggtatatatccgttttttaacattttacgtactagttcgatgttcgacaagattggcttcaccccagttccgcaaaattctgagaaatcgaggaaaatcaaaccattctttagttagctgcgctgaataaagcgcccatgatgaatacccatgactcacaaattactggcgatctgacttccctgagctgcaaacgtagcaaacaagaatgcgcatactccaacaaagctagccgaagagatatatcctttgtatactgaagagctgacttgaccacgctccatagcttccttaggcttagtcgaatccttcatgcgccggatggcctgggtcttgctctccttagcggatctgagtggaaagagaaaaaataagataaggatatgtaagccggaggtgaattattccaatgtgatcaccgagcctgaaaaatacttgcaagaggaccgcgttatcatcattcaagctcatcttggtctccagcttgtcggtcagagattcagtatcaaccatcgtggagccatcggagctgtctgctttgggagtcccaggcgccgagttaggagctgattgttttccgagggtgttgatgagattgaacaaagcggagtttcgctcctccataacctgcagagtgaagctgttatcaacatcttacagcaaccaagtgtgtcgaacaagaatgacttacctgatcataagtatcttgctccaaaacctcaccgcctctcaacatcaaaagtcgatcagtctttgccaagaacgcaacagagttggtgcacaggactcgagctcggtctttgagcaagcccttggggcctaaaacatgctcaaatagatctgcaaatagtcgagcatgataatcagtaaatcgttcatgtatgccggcgatagtgatgagaaacctatgaacttacgagcagcgacatctgaaaaaggtcgcagcaattagtcatcatcaatccagagtgattacagtcgcatatcttgaaaaaagtttccgaagcactcacggttgtcgacagcgcaaagaggatcatcaagaaggtagatatcagctcgcgcgtaaacagcacgggccaaggcaattctcgctttctgtcctccagatagagagactaacagagagaagatgaaaggatatttgacatcaggaaccaaaggtaacaacatgaacaaaaacaaaaacaaaacgaagtctttcaacatacctcctttctctcctacttccgtttggtctcccaagggaagaattgctaaatcaggaggaagcgcacaagcgtctagaactaattgatagaatttaggatctataatagaggcatacctatatgttagtaaacaagccttgatctaagacaatcaacaaacatgtagatgtagaagataaagtaccataggcgtgtccaaataggatgttatccttgacggtggcagagaggacccaagattgttgagagaagtaagcgatcgatcctcggacagtgacctgtccttctcgtcttgtcatttctcccaacgctgctgatagcaagctcgactagatcggaaaccaagaagggagactatatcgtcaaaccagataccaacggaccaagaagaagaagaagaatagacaaacctttccatcgccgactcgccccaatacagcgacaagttcaccctttcgggccacaaagtctactttcttcagagttgacgactcagcattcttgttccatgtgaatgtcccgtttgtgatctcaaccaacgagtcgcccttttgatactctgatggggatttaggaagtagaactgttcggctgtctttctgaagctcttcagcgtctaagaagtccacgagtcgactttcagacacaagcgcctcgatgatggatgagatgatcatagacaacatggccagtgctgttttgaaccggatcagagatatgctcatgagtcagttcaatagcgcatcaaacaccttctgtgtacactcttcactttctgttctttcaaatgtataaaaaatcgagaacatgatactcacggaattgaagcaaaccaaagagcgaaatagccgggaaaatcacatcactcgtcaagggtttcttactcgttaacgaatatgacgagaaggtggcgaacgccacgaggaagggggtagatgcccagaaaaagttgctgaatgcgttgacaataccaatccttctaatcatgacgagttccaagttgtttcggacgtccaagaccttttcagagaaagatttttccctataaaacaaaaagtgtaggaagaattttaaagcacagaaaccgtcagaatggatgcttgattgaaacttgaacataacaaactaaccaagcatagagtttgatagatttgatgtttgataataattcattcatcaatctcgtccttttatccttgatcttcatctgcttgacctgaagcttcttttgatatctgttcgatcacgcaccgttcggtcagttatgtgataagcttattaagcttgataccgagacctttttcagttgggacaataatacatacctagcaatcatcgcgttcagaggcagagaaactaccatgacagccacaccgcagaaagcagaccatcccagcaaactatacaaagattgacgctcacatgttaaaaccgagcctattcaaacgcgttgatcactcgaatataaacactcacttgtaaagcgacacaaacgccaagataatctgcaagggtccagagaagaccatctgtccactgtcaatgaagagatgtcgatgaaattcagcataccattaacaattatgagcaaagtgaaataaaaaataaaatcaaaaacgctgactattgcatcagatcagcgagacgcatagcatcaaccgactgatgattccataacagtgttgagtagtatgaacacaatggccagttaggacagaggtcgaaagcagaagagaaagggagtttgctacacgagcgtacctgcaagttaacgatgtctcctccagccctgccaaccttttctccattgctcagaacgagtgctttcctatagatcaaccagacgattccagtcttgactcgcatacccgtagtgaacgctctgtcaaagtattgatgcaacaagcaggtctggatgacagccgctaggaacatcgtcaaagagatggcgattccttgaatggcaggagcaggcgtcgaagtttgatacgtagcaacgtactgagacccacagcatttacgcgattgtgttagtgtgcagatctctcgtatgaaaacaataatcacacgccgcgctattgggagagaagcataactaacccgaagaagcaatctcaaaagctgaggctgggtgaatgacaagaggtcgtttaagattttcaagacagtcgcagtgaggtaaggccctccgtatgattttgcgagtacaacaaacaaagacggatgtttggccttttgaccttcgacctgtttgacgggatgttgagcatgatgcttaacccgagcggcctcccagtttttatataacttctctccgagaacatcggccttatcgtttggatccactgttgcagatgatagacgattatttgcggtagccatagccagaaagagagatggatcagtcggccgctcagcattagcgaaacttgaagaaacagatagccaagggtcacatacgatcgaatatatcatcttcgtcaatgaatcgttgactacccaacttcattaatggagtcagccaactgaatgtcaagatctcgaagaagtttgccgtcaatttcgggttctctttccagtcgctcgtccctccatcctgaccgtcctcgccctctggcaacttgactccaccactcttctccgggcagagacattccaaactgaacgccaagaggccaacaccaatgaagccgaagaagggcgcccatacgagagcggtgctagggtggaacaggaatccttggagataccaagttcggatcgtcagggcagacgcagccagaaaaatcggccagaacacgaggaggagagttgacgattggcgagttcgagagtggttcacatatgttagaggaatagaggcgagggaaaacaagaacagggtggccgaagacaacgtaaagatcgacaagaagggaacagccgaggtgaatatgatgcctatcaagtgaaggagagccaggatggtcgtgattgatagaagggcctgtggagcgtcgaatcaaagatcagccttaccgtcgtcaaatgatcatcacagcaagaagtaccctttcttgtatatggtgtgccttgcaagaaacgtgaacgtacagtcttcgcgtataggactcttcggcttctaccaactcttttcttcgcagtctgcgtcttcaataatcggagggtgagacccacagcggtcaaccccgcgatggtacacaatccggctctaagagcttcctcggcacaaggcgtgagatcagcctgtcgaagggaggagaacggaccccaaccttcactcgaagggcagaacccatcgggtttggcatgttggtgagaacgagtaaccaagcgatggacgctcgacgaatcgatcgatgcggcaagggacgaggatagattgagatatgacgggatgaacggatgaatgttgaacaggggatcgatccacgattggaaagaaggatcgctcatctcgactctatactcctagataatctttatatgcaggaactcttgactccagtatgagtctttgtcagtcgtgtagatgcctttttcttcttctcttctcctgttccctctgtcggtcgatcgaggaaagaactgaaacagacggaaggagctcgccaaagaaggcaggatagaaaggccgatatgcggctgagtaataattgatcaaaatgactaattggcgaactccgaaaagctgtacttagtcagctgtttagaacccttcgaggtcggctacacttcatacataattctgatgaacgtatcatcaaactggtgaatggatactcttgacggacaatctattgacgtaggtgtcaggaataggtcagtggcttggaggttgagtcgtcttgagcgtctcctctgatggacagtccctaccttatggggtacagaaatataaagacagccttcttgctaatgatattgatcggatgcgtgcagagactcgatatccaagacgaacatatatactgtttcacatgtatcttccatagagaatgttggaacaatatggcatagagaacaaacttccaacctgttgaaatccctctgattaatttttcggaggacatgctacctccttagacagcttcccaactgactccacaaccacacccactgcctttcgcctgagggttgtccttgattctgaatgccgagccaataagctcggtcgtatagtctactttgcatcctttgagaagcttgagtgacggcgggtctatcaagatgctgagtggtcggtctgatattgattcggaggagagtgaaggaaatgactcggatggatatggattgaagacgctatatattgtcaacagaggtagaagtcagcataaaggggacagaaaagacgatcgatatatgctccagtgaagaaaatccgtactaatcatctagctctttgtcattcgtgaggtccatcttgtattggtatccgtgacagcccccactgtccactgcgactctaaagtagagcgttgggtccttctctcttcgtgcgatcgctgtcagcctctattgaatgttgaaggttgttccaccgggtataggtagtaaaagaaccgagagtcacatagaaaatggccaaacctcaaacggtcagtgtttctgttcctcaacacaacccttgggctgggtacaaagaaaagagaatctctcgatggagaagaacgtacgttccaagctgcttccgaaacctcaatccgtgcctcttcccacgggactagctcagcctctactccattctcttcttccatctgcttgatggcttcttcactaggtggcacgacctcgatagaccattttgaaggtagagttgttgtcgatattgatgtcgatgttgttaacgaggatgctgtagagaatgtggacggcgagggtgagggaaaagaactacggagagctgtgatagcaaatgaacgagaggacaccgtagccaatggcttgagccaggaagagcgggcagtacaagaataagatgatcgagaaaggattgaagggttgacggatggtgcaagggtagaatgtatcggtaagaatgctcgagcgatcgttcgtcgatagacgagaaatcgagggatgctcatggctgattaatgtctgacttggtatcaaacggttgtgtgcgagctgttggagactaagattaaaacctgatgtcttgtgtatgaataatcgccagagaatggaaaagatagagaaatgatgtggtggtagatgaaatggattgaaagaaaggaattctaatggaggtctctaatcacagttcgttccgtgccaaaacggcccaattaaaccggcccaataaacatcagccgaatgtatcaattatcccccaaaccttcgccgctacaaaacgctatcttttatcattgttctcattcgaacccagagtattgacaagataggcttttaagtcgacatgtgagggtttgcatcgttgagttcatgctgtatgtactcgcgcggtgttgaatcggacctcattcacgattaacgccgagcagatatattggagctgactctcaccgcggtgcgctcatccgctcgtggttgtccaatcgtgtcgactcttggcctgccatcatgtcctctgccatcttcttttttgtttcgtattgggcaacttaactagtcgggctctatataaagcatcactagcctctctacaaattcttggaagtctgatatatgccttcccatatttccatcctttgcacttgttatcaagtttatatttctctttgtcgttcgtcgcagtcctttcacaacgatctgtacttttcacttttgatgatcgtttgactacgaatatgtcctaagctaggtttcatgagcttcctttgtccactctcattcttctcgatctatcgcagttcggggcacttctagtgtaccacaatcgagagagcatgatggctcgttgtagttctgttcctcagccgagtcagtgaacgtcatcagagacccgtatgtttgacattcgcctctcttgaaaagagaataggtcgcatcaacgagcagctcaagatgtttctaaaaaaattattgtatctgcatcctgattcagaaattgttcttcaataaatcttccagccctgccaatgaacctgctcaaaagatattggaaagacgtaaaaacatctttttgagaaggaaggacaaagagaggaggagtataaagtcgggaagatacctacgaagggagaaggttggttttggttttacttgacaggagattgttttcgaagtcgaaggtggaaaacggtttggacattttgccgcatctagacggatcagatatggtcaagcagaagaaaaagataggaaagatgagttcaacaaacagtgacaaatgtggatcctaaagaggaagaaaaaggggaaacaatacgaacagcgactgcgaaatgcctcatccagtttgcccttctgatcctcgcccgtttcacagggtttggttcgaaccactcgtactttttgatatcggttctgatcgagtttctcgcgacgataccgttaagtttattcatgtgcctcgtggcggttccaggctcaaataagaccgttcgtccagtatacggcgtggcaggcttgatgtttagagcttgcctctcagcagcggtggaagcagacacggtagaccaacgggtgaatggatctgccggcggaggtggtggaggaggagccgggatagatagagccggagatgacacagagctgtcgaacaaaaggtcaccagccgtggaactggaagggaaagaagaggaggaagccgttgaggatgaggacgatgagggcgaaggagcaggggtaatattgatgctgaaaggcgtagcagtagagacagaatctgctggagggagagaagcagcatcgacagacgaagaagcagatggcttctcatcttgactcttgttcaaggactcgttgacttcttgcttcacctcctcttttggttcttgcttcgagtttcggccaagaaggtaatcgagaccccagagagcttgacgagaaggcccagaggagatcgatcggaaagagacggaagtaggagaaggaagggatgtccggggtcgaacttgaacgatggccggttgaaggaaccgacggccgcaagatgcagctagcgcagggaatcgagacatccttacttgtgtgtttctagaagagatgaagaaacctttttgaagaattaatgagccaaaagaaaacaggataaagtaggtgtacttcccggttggaagcacctattctctttttctttacccttcgttaatggttactcgaagtgggcgtgacagcaagggttagtaacaggtatagattcacacagcccatgtcacgctttgctcaacgccacatgtttagatgtgagctggcatctgttgatctttcatctcgttttctagaagaaaaagataaaaccttgcatctccatcacctcgaccattctcgtcttgcctttctttactctcttcctatctcacgttcatcgtaaagaatcatgaagactgtttctacgcttgctatcttgtccggtgtggccactctttcatcccaggtggctgctgagcctgttgagtttcaggtgggtgttgacttcgttgttcaacataaagattatacagtgaaagcagttgagatgaattgtcaaaaatctcacaaacgcttcgtctcttgtttataggcctctacgatcaaggctccttttgttgagcagttcactcctgagtgagtaccgaaccaaacatagtccgaaagcaatcatctcgtcctcgatctgaccacggtgctgtctttgttctctcttgttttcagctggcggtcccgatggtccccgtctcacgccacaaaaaagtctcctgtaggctctggtgagacgttctcctacgttggaacctggtcggtcgagcctccctcagtttacccaggaatccctggtgacgatggtttggtcgttaagtccaaggccgcccaccatgcaatctcagccccgatcgagggtggaatcaaggtcgaagagggaaagcctttggttgttcaatatgaaaccaagttgcagaaaggattggagtgtggaggagcttacgtcaagcttctctcgttgggaggagagcaggagggtgcagagttttctgacaaggcaagtctttgttgttctcacactcattactcgtcaagaagctcgaagcaagtactaaccagtacagctattgtctttatactcacgaacagactccattctctatcatgtatgattcttggttatgatcttatacttggttgtgttacccaactaacttgatcttgttacttcatcaggttcggacctgacaagtgtggtgccaccaacaaggttcacttcatcttccgacacaagaacccggtgacgggcgagtttgaggagaagcacctcaaggccacccctccccccaagatcaccaaaaccaccgctctctacactttgatcgttaagtaagcaaccaaagagaatttgtctcaggattacaaaagtcgtatactgattcttcttacctctggtacagccctgacaacactttcgagatcaagattaatgacgaaaccctgactactggatctctcttggaggactttgagcctgctgtgaaccctcctcgagaaattgacgatcctgaggatgtgaagcccgaggattgggtggacgaagccatgatcaccgactctgatgctaccaagcccgatgattgggacgagagcgccccggcattgatcactgatgaggaggcaaccatgccggaaggatggttaatcgatgagcctgatttcattccggatcctgaggccgtgattcccgaggagtgggacgaggaggaagatggtaagtggttattccattcaaaccctgaaaacaaaaatcacaaccttttatcagatatactgactggcccttcgtttacttgtgttttgacaggtgattggatcgcacctcttgtgtccaaccccgcttgtgaggaggcccctggatgtggtccgtggaccgctcctcagattcctaacccagattacaagggactctggtctgctccgttgatcgcaaacccggcttacaagggtgtctgggctcctagaaagatcgcgaacccgtccttctttgaggacaacgagcctgccaagggattggagaccatcggtggtgttggtttcgaggtctggacgatgaccgaggacatgctatttgataacatttacatcggacactccgtggctgatgccaaagctttcgcggacgagaccttccacatcaagtaccctattgagactgccgcggagactgccgctttggacgaggatgtcgaggataaggctgttgcccgaaccggactgagcaaagtcactggcgtcatccaggacaggatcgattttgttcgagacacctggcctgaattctttgaggaagccgtcaaggattggaggagcgctatcaagacataccccgagtttttggccaccgtcgtcctttctgccctcaccatccttgcaacccttgccactttgttttcgtccctctttggaggagctcccacgacgatccagtcggcgcccaagacaaagaaggttgctgtcgtgcctgctactgaggtcgagcccccgattgtcggtgtggaagtcactgcatccggagtagagcgacgagaggaagagctaaagcagaggaagggcaagggacgagagctctaaatgaccgaattggccttgcccatgatctgatcctgctttctctcccctttttgacgtctttgttgtgtttatgttttcatgttttcaagttttcgatcaaaatatatcttgtgcttggaccgtcttgccgtttctttgctctccatatgacgcgttgttcgtgtttctcttgatcatttcctttcgtttcttttgtccttattttgggagatcgggcctctgtcctctttatttttctctttttacccttacaattctcccttcctcccagtagcttatcatgtgaatgaagatgagaatgcttgataaaagttgtgtgaatggtctgatgtcatgtgtgaaacaaggagaaaacatactagggactatgcggcgggcaggttccggaactgattgcccgcttgtttttttttgccaacgtttctttttcttttcatcccattctctagttcagttcatctcttcaatcgtgtagccggtcctctttgcttttcaacctttgctctctttcattctttttttttcttcctcttctacccctttcctttctttctctcttatagaaacgatagcctgctatttgtgtcacattaatctaaatagatctgcacaatataccggtaagtgttttccttcaagcaactactctgtaccctcggtctgctcgcatgtggcacaaaaggggtattccatactctggtcaatgtgccatgcttgttgcaggaatgcactccaaggctttttagcaaggacatcgcaccatacacactcgcctgtaggttggacacgcagccttgtgcccaggaatgagatcaggcaagggggagcaatgtgggaatgaattgattagcttgcgtttttgagactgagctgatcgattcggcggccgatcaaaccgatcgagtgtatctcggtgtgtctgtgtgtgaagggtctgatcactgacttttccttcctcctcttcttttctctgtgtgtgtgtgtg

SEQ ID NO: 1350 - DNA, 7025 bp, Xanthophyllomyces dendrorhous
gtgtgtgtgtgtgtgtatgtcggcacatatgcttatctgtgtgtctatgtatatgtgtctggttgtatccatggtgaaccaaacagggacaaaatagaagatttggattgttggtctctgttcaacttctaggcatcatccatcgaccttcgcatccacaatcgtgattccggatacctcgaggcatgttcccagcacttcttctggttgaaaattagttcagtctccaaacgcttccttctcactaaccatcgtccttgcccttgctgtctcctgtctctcgcttcctctcctccttccttctcccttcttccctcttttcatccttcccctgaaacacagctagatctttgattgtgttccttctccgttcctgacatcctctcgatgggtctatttttcaagaggcgtaatcaacctacgtcctcgctgaacaaggacgcgagtctctctaccagcactggtcatagcaacacaaacaccggcaacgctacgcaggtatcgacttcatcagcggtgtaccttcacccgttaccaccgccgccatcatcgatctctacccgatcctctttttcgggcagtccgtcgtcgtcgtccttctcccccttgccttcacctcgagggcccctgaattcaatcccattggacggtcctacagaggttctccgatcagcgtcatacgcccagtttacttcacactcatccttgtcggtgaacgaacaccagaacggattgagtgatgactctcgtgaaaaagaacctgcatatacccaaccatctcctgtgcattcaacatttgtgctacctgatctttccctctcgcctccaaagttggctccgttcaggttgtcaagaagctcgctctacgtggacgacagtcagagttcgttctttggagaaggacggtcgccgaatgaaggctcgacctcgttgggacttcaggtggatatgaatcagaccgaacgtgttgtggttgaacctgaacggagagtggacgggcggttggataagagaaagtcgttcgatgtgacatcgagaccaaggtacgagtgagtgcatacgttctatgatttttgtaatcgaaaactcttggatcaacacactgacatgcatacgtatagaattaatccgccgccggtgagcgcgccgataccctctgttacccctcgaacacctcttggccctcctaccacttcatctctatcattgagtccaccacgaagccatcctcctctccgaacgaccccttccttcccgcttccagctcgaccaatatctcagagtcagccgatgctaacccagcgatcgtcgacccctatacttcgattgcacgtcccttcgtcgccttgtcaagaggacgaagatactcctgtctcgggaccttcagcgtcaacaacatcggtcctacaaggcaataaactgaacggccgtcgtcggtttttcggaatgttcggcgaggggaacactggtaaagaaggctctgtcaaccgtctcgcagaccctccttcgactcggttcgaagatcttactgctcagactgttccgagctcatctcctgtaaatactacctcaaaaattgcgccctctggaaccacagttgctatcccccgaccgttaccagctcagccggccccaccacgaccatcaacatcattcttcggttaccctctgaaactgggacattcctcaaagccatccgcttcagcagccgctgaggatggacgaccgccaagccccgcagaatcctttaaggttatctctgctaggaggattactacaccggacgatgtgaccaaccacttgtcgtcgtcatactttccgagcacaaacatactgacgccacctgtatcggcagtctcgccagggccgggaacttcccttccgcccacgtctgctacttatccggggctcaggatagaacaacccggaagtcagttaaggaccaagtcaaacgagtggtctagggccagaaaaagtagttacaactcagtcttcatgccggatgatgaggaaggagaggaggaggaggaggaaccgatggaggttgttggagaacgaaaagtctctgtgggcatctttagacgaagaagaagttcaatggggttggaagatctagcgagaggtactatcgaaccgagtgagaagatcgaggagcccgataaaagaaagaacggcctgccgaacgtcgggtcaaatgctgggggtgaaagcaatgatgatgatgaccgaccattggggctgatcagaaaatccgtcgcggatttctcagaaattagtgccccgatcccgagggccaacgctacgcgaaaggatggcttcatcgtcgcctccagagaacgaaggcagagcacgttcacagccgacgaatcggacggtccacctactcctgcgccttcctctacacccgtcccggtatccgctccctcaacgtcgataaacccccgtttcccaccttccatgaccctctctgctccttcggctgtagttcctctcccaaaatttgcagatgattggacgcaatctccatctggaattgatcatcccggaacttcgttcttcagaccgtccaggtcagtctccccttaccggcctctaccgtcgccaaagtccgagtcatcttctccaggtcgaccttcgacgaacgcaatacccagacggtcgagtcctttccaaccgcctttgcccgtagaaagtatgtctattggcaactcaccaaaagaactatcgaaattccaagggccatacagcgtatccaaaccggccgctcctctttctaacaaaaacgcgcgtaggtcgtctgcttccactgtagactcggaaaccgagtcggagagcgacagcccaaacgaggaggccgagttgtcgtcggcggatgctcatcattattcaaccgctcgaaaatcggtacctgctcttgcctcacccgggcgcaacgttaagaattcaagctccacggctaacttgtcgagagtacttcctgcccgagctaaatcgcctgcaacgtctatgctttcatctcgtccgaatgtctcaggccgattcacccctaaaccactagtgtctctcccggataacatgacaaagccacagttggacagagaacgctcacttgctactcgaagggcttcaggtggggatatcgatagatcaatcgatgcaagggacactctgcgacctcctacgtttaaacctgttcctgcgcgccgagggagcgagtccgtattaacaacatcggccaatagattgtctgcaatggagatcgatgaggatagcgatgggtacgggcacgacgatgatgttgtggctggccaacgtttcaagaaaagctttttgatcacgaaacctggagcagtcgttgttaatggtggggaaaatgtagagtcggcttccaaacctatatcggggctcaagaaggacaacaaagcaaagaaagtatctgcagaggtggagagcgattcggatgacaatactccgttgggaatggtctcccgtaagcttcctaccaagccgacaccaggtcctgtcccttccgccagcaaattgtcgctcaatgtgattgcttctacgcctcaagccgaaggttctgctcggtcagccggaacttccacgaccaccactactcctaccatcaagaacggatcaaaatcaaagttgacatcaacctcaacgtctagctcgaacgattcgttatcttcccactcgtcccagccctcggcctcatctgcactgaacttgtctgggagagtaacgaccagtaccactgctcaaccaaaatcaattcttcggaaaccgtcggcttccacaatatatattgccaacaatgaccagaagatcgcacaatatcgaggatctcaatacgacgttccagttctcaatcaagccaagccgccctcatcctctttgtctacttctccttcagctaatcaattcactcccagatcgcccaacaacactgagtattcctctcagggatcggccgtccttggaaacccaccccggccggcgtttcacaattcctctcaccagatgacttcttcgccctcatcctcatgcgcgtccgggataacgactggggattctagctccggtcaaatgccgatgactccgaaagaagtgtcattggacgacatacagaaaagtcggcatattaaagaggttggaagtgttaaagaactgggattgggaaaatctggtctgggagagggcgaaagtttggatgagaatgagattcagaagagaaggaatgagagaaggcggaatgaagcgagaaacgctatcaaggtacgttctattcacttttcatcgttccaagtgtgggattagttctaagtctatttgtttcatattctcccttatgatatctttctggcaatgtagctcggacagattgttaacggtacccagccgatcgaggaaacagacgatgatgatatgaccagtcgttatgctcccgttgatcgttccgcttggggaggtaatatgatgcaccatcctccctttccgatgtacccccctcaaggattttatccatctatgcctatgatgaatggggatccgatgatggcattccaaatgcaaatgtccatgcaggctcagcaggctcagatggctatgcagatggcgatggctcagatgccggggcagcaaggagaccctcacatgcagtaccaggcgatggttcgttctctccactttcgttgatccgtttgtcgccctctttctgacttgtgtgtgcttctacagatgatggccaaacagcagttccaaagcatgatggcagcacaagccagtcagctcgcagctgatcaatgggagacgatgagcatgcatatgggaggtgccgcttccgagatcggagggcccacatcttctttgcccagaaactcgatgcgaccgatgggcatgggtgtgcctttcggcgatagtgtctatggtgggggttatagctcgtctgcttatggtggagaagactcgcatcgacggggtagtgcatctgcaataggaggtggaggacctgcgatgtctggtgggaccgctggaggacattggtctgggtctagatctgaatacggagattcttccagacgaagtcgaagtccaactcttgtacaggaaggctcggccatgaggacgtcatcctacgacataaatctatcagttccttcggctcagcctcgatcgcgccgaccatctggctccggtgtggctcggttggttgatcagattccctctcaaccttacgctcctccgtcctcttccgtttcttcatcttcttttgcgcctgcgcatcgacctataccgggtcaacgacagagttcttcttcaaactctcaatacggacaaccaccggatcgatctggcatcttgggcgaatcaaaacaacctcgagcttctttgcctgatccatctcaccagcagcagcggtcagctaaacaccgaacaagcagtggttattcgctctcgatggaacctccaatggctccatttgcgaaggaggaaatgcgaagtaggtctccgggccgagttagtccgagaagtggttcgccggctggtcggaacccacccacatcttggagaggccctccaacttgattttatttacaactttcattctttcaagttttttctctttttttttccttcattctcgcccttgcgtcagacatcttttcagttttgcacatgacaacttgtcttttcgcaaaaggcctagtctcttctatacatcttgtttcaaacaccatattgcattgttcactcctttcttacgttctcatcattcctgttcatctgctttcgttttctttctttcctgcgcgatgcatcaccacggacttttctctatttttctgcttgtagaccctcattccacattcactctcattcgttcagccgttggacggttacctcaaagcatgcctctctttccgtttctttttctctttgttttctgcatatggatactctcttggttaccaattgttccccttctctccttttgtatacgttctttgctttgtctctatttcatcgtttaatcaatcttttttgattttgtcttaccatttaggtctctattcattctcttaggaaggaagaaacaatcacaacactcggcaacgagagaaagaaacatgtatattcctcctcggactaaaaactcgaaataccttctgtttctaaggaccgattcccatctgtttgtctatatatcacgaccgaaacctggcattagtcttgtgctctcgtctaaaaaacttcctcaagtgagaagagaagaggaggctgaccgtttgtgcttgagagagatttgcgatactttactcgacaccttgtcttttgcccatcgggcggatcttaaagctttgtattgatatttgccttcgtgctgtttccgtgacattcagggtcaatcaaggaagagaaggagttgttagcgagcaaagtcgcgatgaagatggcgatgataaggaggaaggatcggaatggaagaaggttggggaaacgtactgttattcttttgtttgaacttttactatagatgagagttttcaatcggccccagcccaagtcgagaacacacaaaggtcaaaggttaatgaaacccacacacacagatatgaaatgaatgagaggaagaaatgggaggcgtacgagctggtgccatcgtaaaaatcttcttcctcttcttcctcttccttcttcccgccttcgccttcaacgctagttcggccatctgcggcgcctagtgcattttgttctatatcatttgtgcctatgtctatacctacacctgaaagcgagcgatttgagatgtaagaagacctgtgatctctttggaacccgtttatcggcgttgtgttcgcccctgatatctcgtctgctctggtgggttgtacggagccggattggctcttttggctgatacgactgtctaaacgctcgaggggttcgacctccatcagttgatggcttggcatatccgatgtcgatcggagaacatgctgttttataccaagtagggt

SEQ ID NO: 1351 - DNA, 7602 bp, Xanthophyllomyces dendrorhous
agaggtgtgaggacaattgggcttgccttcatgtacgaggttgagcgatcggtctttctttagtaaatgctgatgcgccttgatttaccaaaccccattcagattgattctgtcagtggtttgaaaccaatcgatcggcatctcttcataaggactttacctttcccagcccagatctcaatgatatacctagaaggattacgccgatctccttggccctgttcgtctcgtttctggcatctttactgaatgcccagagaatagcttctgctgggtcggatgttgcaaatatcgggatggcaacgttcataaggacaccatcaggtacgtctacaagtctcaatacaccgataccctagcaggtagtgcgaaagatatgttcagctgaagatcacatcgaacctcttaagacaagtcgacggttgagaaaagggtagaagaacctagacgtacccaagtagtcgtttttcgttttattgatccttgcttgtttgagaatctgatgatcattgaggtcgagagtctgtagcagaccgccaacagaagcggtggttgttggatctcccaggcatacgttcccgaggctatcgcagaatttgcactacccgatctccgccgcgactcgttcgcgttcgtagattcggaagctgctgaggaggaggtagcgtaggggtcgctagagattgttttggagtctgattcagtatcgatcgttaccgaggacgaagcgatgtgttctgaagggacgtttgacaagtcgattgctttaactgaatgtatttccgcagagactatatcaaacccgctgattcctttagggaggctgatgtcaatgggtttccatagtagtgaaagacgtctatttggggaaagaatggaaaagacgtgatcaggtgaatccgtcaacgtgagtaatatatgcatgttcaactcttacaggacaccccatccaatacctccagcctagacaaagacagaacattgtcgattatagcagcgtattaagtctctacacatttcaccctgaaagcaagagagaaaagtacatactagaggataccacctataaaaaccaagcgaaaatagaatgcattagaacaagttttgaaccagcatcatagaaggacgttacacacctcgtgacttcagatttgtttccgaacacatcgcccagagttgaaagatcaattatccctaaagagaattcgatcaagaacaccgaggttagaccactcgatcaacaggaacgtcgttcgtgggtattcagaagaaacccctctctcaccaagaatagggtcatgttctctatctctttcatctctgacaacgatcttgagtcgttccatggtccaatctctgatgaatctttcggaagcagcattcacatagggcgcgttgttatgtcgtttcgttcttgttctgaacactaatcgatcgttgaccagaacctgacatccgaagaaataatgaatagattgatgtgtcaattgtgaagggtgtggaaacgggatcagagatctgacaaacctcgacataggatgaaaccggatcttcttgatcagcctcggtctcttgtttttcagccagcgcaggttttcctccggctgatgaccgagcactcttagtgaattctccagatgaaggtcggacagcgagctctggtatcgggtggaaaatcatgcgcgcaagcgttaggaattttttcttttgatgcatatatgtatagaaaaatggatttatatacctgagagctggatgatgttccatcttagaataccacctatccgatatgataaagccacccatcgttgtgagatatccatatgccttttgtgttctagattttaaagaaaaattagggaaggaagaagaatcaaacttacttcgaaatttcttatcgagggcgagatgattttcttggacctctctgtcctttgtacccaatagccatctgaccgcgtcctttctcctggcaagtctttctgtttcccactcgaagggttcaggtttgagaatgtccaacgctctagtcgcccattctgtctttttgaggatttctcctaaatgaaccaatggccaggctgtcgtcatcatctttcttcctacatctctttcttcctgaaggaaatccttctcatcttctttcgtctccgcggctagctggtttgctgacatattttcgtcgcctgtagcctgtgaagaatcagcctgggagggcccatgagcaaactcgggatcagtgaaggtggccaaggggtagaatcgaatactccattgaaggactccttgtggtcgttgggatgacttgtgtctggccggttggaagggtgaagagaactgatcaagttgatgttcgtctgttgtgggacctcgagaggagtaaagcttgtctcctcgggagaccatctcagccaaatcaacttcgacgatgcctagctgagagagatgaagaagatgtattcatgacggaatgcatacaaccgatgtcaggttaatagagaacgttctgtttctcttgatcggtttgaagatggatgggtataggaaagattcaagaaaccaaccgaatcgtctgcgttaaacctatctgaatcataaagctgtagcacgagtttttctccagtggtcacggcatcgcccggtaccaaaactaggtaagaataatagctgattaattaggtccctcttgttatgagatctatgtttagttgggaacgtttagaaactcactcatcgcagtctcttcccagacaggattcaatgttttgagcagagtcctggtggagaataagggcttgttcaattgttttccccatgcgatggcgatgtacgggtcggattttcctagatgagcatatgggaaaagagcagatgagaatgatccatgaatatacagacataagaatatgaagtcgcgcaccatttggatcggcagcccgaatgttctgtgcgctgtggagtctaatcatgaaaatgccgatatttttcgtccggaccatgccttcttgtccagagaggattctctgttttttgtaagccgatcgtttagttgcgtataaccagaatgaaaagatatattctgcaatacaatccagcactcacgtccaagtctagggtaaaacattctggttttacgaatgccttggctacgcgcgtcatactggaatgatgacatgagaagagagatcaatatcgaaggtatctgtctctgaatacaaatggacagtggaacgaaccagctaagaacatagcttcgaagaccgggaacgactttgatggcattcatggagccgagaccgtgtcgtttcaatggactggcggcgatatctatcactggtagagtaggaaagtagaacgttccagttcgaacaaaaggaggagatggatcaaggagtagacgcaatcggaggattccagtgacctggaccatgtcaatccagacggctgtgtgaacgaaaagaaaggcaaacaagaaatggtaggagatgagatggccattgataggtttgtagggagagtggaggacctacgcagttcgactcctccaaggcctttaagaccgactccaaaatagacaaggatgccggccttgtttgccggcttgtcgacggcggaattaagatcaaacgaaatctcgaagctctaagagatgggtggtggtcagcatttcttggcacctacaagagtttctaggtggatggggaaggaaaccccaaggcttaccacatagctacctccttgtacagcattcttcccatcgagctgaccatcgttgggtctgtcacccgggttgtcgcctcccatcccgtccccccactcgtggtctgtcaacggtctgagccagttgatcttcatcggcttgcttcccaagctcaagctctctacccggacgctatgaacgacagcaggacattcgagctgaagcgtatcctcgagaagatcaagcaccggtatgaagagatcctggttgatcatcggccagagtgcttcgatcgcatgattcacaaactctggaggcgggttcgaccgggcggtttcggactgggtctgttgaaccttggcggcttcgatctgttcctgatgaatatgtttctccttggcttccaggtgaacgatatacagagcaaacgagacaaagctcaggatgatccatggagatagttggcagtatgctagaaaggctagaaaggaggagaacaatatatgaggtatggtgaggttgagatgagtgaacgtagagtagcccatccttttcctttgtagattccagggccaggtagatggaagtgtgtgagcaactgatcggaactgtccaagcttatgaggtgtctgatctccttcttcccataagcatctctgtgtcttccggtcgacctgtacggaactctattggatgtcaaatggattcggttgatgttggtggctatccgttttggtgccttgagggattaacggctccggccggcagggcaaccctaacacagtgacgtcagcattgctgcgcaaggatacttaggcaagcggggctcgatcggatatttgatatctgtgtattcatctatttgtggccacccatctccgtccctccatttggccatctcatgatagccagctcacattgctggcagcgtacacgtatacatacacatacacacacacacacactctcacctacctacatctatcaaagatgcctaggctgatcagatcactcgtggtgctcggcctgacgttcatctcggtcgtccaggcagggacgttccaaaaaccggtggtggagattgggatcaaggatttcaaagacaaagttctcaaaccagatgttagaacaaacctacctctcttgtgttttgtcctcgacagtttccttactgatccttcgtatcctcctttttctgcttacacatcgcacttagagaccttctatggtggtgttctacgcgccctggtgcggacactgtaaaagccttgctccagagtatcaagccgccgctcgaggactcgacccgctcattccgttctatgctgtcaactgtgaagaagcggcgaacaagccgttgtgtggccaataccaagttcagggattccctaccatcaagagtttctccagaggtcaccgatctccaccaaaggactacacaatggagaggaagaaaggaccgttgggaggttacgctggtaatttggtcaccgacaaagtcaaaaagcttagagttccgaacaagggtggtgtaggcgcgaccgaaggactcaacgaggtccagggttttatgaacatggttcgtcgtccctcgttctttccttcttcgcctctcctgagtttccgcatcaacttatacgtgctcttgttgtatatatatacgtatatatatataatttaacttgaaaccccttaggaggacaccaagcctcatgcgctcctcatccacccggtttctgcaacaattcctctcatgtggaaagttctctctcaggtacatgctggaactagcttcgggtacatccgggatgccgatggtgagctcaaaaaggcgctcggtctatctgcaagcgagggagatgataaaaagccaaagattcttctctgggagaagggtggtagctctacagaaggctggaaactctacgaaggtctgtttccttcttttcctttcgctgattctgttgtccctcttcctaggaaaaaaaagaaaaaaaggaagaaacaacgactgggaaaaaccactagattgagtgttgttccgacttaagaaagattcgtttaaaatccgtttgacaggcctgatgaagtacgatcacctctccgcccatttccttggcacgtctcctcctccctcatcttcctcttcctcttcatcaacccgatcctccccctccgtatctgcgtcatcttccgagcctgcgtcatctcctccaccgaatgcgatcaacctgagacgagcagaagaacgcgcaaaggcagaagcgaaatgggctgccgaagaagcgaaggacgcagctcgacgagctaagcttgaagcaaagaaactcgcggccaaactcgccagagaagccgaagagatcttcagccctgaaccgactcctgaagcggacggagatagaccgacgggaacaaagccggagaaaccggtcgtaccagaagtccctgcgagaccgagtgcgattgtcgatgaagactcacaacctgccgccgagcctcaagccgctcggtctccttctccttcttcttctgaaaaggcacatgtcgctgatgctgatgtgaatgctaccgctgccgccgctccggaagaaacgaacgatcgaaagattctcgactctgcccaagaatcgcccgctcttgtggtcgatgaaccgataggaggttctcacgaggaggtcatacccgaattcaaagtcgacgacggaacagtcgacgttcctccgatctccgaggagagaaaacgggacgaactataaggacgaaaagtaggttgagaacgagaaaaagagaagaaggaaaggtaaaacatatagcgtgtcgatctttcttttcgatcagatgttgttttgccaaaactcttgttttgtttctacaccaaacgcattgccactggtttagctactcagtcagccagtcgattagtacatgagaagtatcttggaaaagatgttactcttaagaggagatgaacaatcaatgggttttggaaaatagaaaatcgacatgatacatagatccagatctcccattgaaataaaagggggtgcgtggtttttttttggtcttttctcgattgtgtaattgcctctccaagaactgtccaaagaactaatcttcgaagcatggaaacgacttgatttgggaaggggaacaaacgcgcatgacagatttgaacatatgggtggagacgacgggggatgaaaacaaccatttagaaagagatggcggctcctgagaaagcacaagtacagaggagaaagaaaacgagcagaagaaaaacagtccaacacgatatatgataatgcatccaaagaaaagaaaacaccaccgatagaaacaacatccgaaccaaaaaggaaacaagtacgttaggaacataagaagtgaaccagagaatatatggacaaaagacgaacccttggtcttcttgtctcctccaagctcgaagtgcttgcatcgcttgagggtcatctgcatcttgtactctgcggaaaaaaagagagaacaccgaagtaagatgtctgtttatgatgtctgtagttgaagttttggttggaaggaagaacgaactgcagacggagcactctgtttgaagaaaaaaacgacagaggagcataatcatcaaaagtctgcatacacaagaagaattcaaaataaacaaaaacgtacccaatcgaaggacgaccttcttggtggtcttagccttcttgtggaaaacgggcttggtctgacctccgtaaccggactgctttcggtcgtatcgtcgctttccctgggcgaagatggagtcctttcccttcttgtactgggtcacctacagaaacagaaacaaacgttcgcaaagaacatacaaggaggtcatcagggaatgtggaaaccgagagcaagatgaactgaagaag

SEQ ID NO: 1352 - DNA, 4846 bp, Xanthophyllomyces dendrorhous
gatatgtaccttgtgagggctaaatacaggtgtacaatcaaatttcacaggtaagtcacttgtttcaaaacggacgcgttgtccagtcgttgacaatataccatgaaagagtggagaggatgagcgacttacgtgtgcttcttgcaagccttacccttgcagtaggttcctatgaaagataataaatcaagccgtgtaagcttttccatacgtacaactttcggatcctcgaatccaggccggagattcccttccaaggcgagccatatcgtccagtttgtcttgatcccactatgatcaaacaaatcccgacttcttctgatgagtcctccgccacgtgatccccaagttccttgaccggctaagtcttccaaatctgtccatcgactctttcccttgaaactgtcacgtttatccacaaactctttcgatgcactggaatatttgtcgtctgaagagttgttgaaattgctataactcacgtcgagtcttgggaacgttgaccatcttgactatgagtgtgaagagaaggagggtagtcgaaagcggattaaggaaagaacgaagaaaaggagcaaggcggcagtcgagaagagatttttgatgataagtttgacggagattgatcgaacgttccgagggaagaatttatcgattgtcgttgcgattttcaagagagcagaaccagagcagtacggagggaatgaatcgttttgtcgagtttagaagatgtccaagaaaagaacattcagggttttccatccaacacaaaagataaatccgatccaacccaacccagcaaggagaccagcgaaatacaaggaaaaaaatcacaattttttgttcacactttcgtcagttcagcatgttctttcctctctttcaacggacaaatccatcaagacggtaaatccttgcacacaaaaagctagacgaacctgattgagacgagacttgaagggtggtgctgtggcctttctttcgcctgacaaagtgcttgaacccgtcgacgatcgagcgtgtatctgactttgtgggccaatctgactttttttggtgtgaatatatgaaagtgttggcaagtatttgaaaaattgagatcagtttatttaagtaacacataatcaaggccactcatagaacaccacacagcctcttggcctttggtatactatgctcaatatgatcgtcactcttgttgtcgtcattcaaatagctctttcttgcgcagactgacgctgtatggttctccgataataataagaagaatcccctggttcccagttgatcgtcaacacagaaagcatatctagttccaaacatacatatattccgttgatcaaaagccacagagaatattcttttaatcatgctaaactctatgtaagaccgacaagatggaaagagaagaaaaggaaggagaggacaagaactgattcgcaaggtttacataaagtcatcgtcgtctccgctgtgtgggtcatgcagagatagaatgatttgtagagggcaaacgtcagttgatactcttgtaggtacggccagttaagcaagcaatagacttactcatcaagcgcgtcggtgtaggctcgagtgtcagccctgtggtgaagcaggtgggagaaggcggtccatgtgttagctcatgcgaccagataatcacaatgtaacacgatgaagacacaatccaaacagaaaatcaagccacgcactgggagatgttcttgcttccacccaactgaggctttccctttgccggcgtcttcttctttccactagccttgtccctctgctcttgctgcttaatatttgccaacgcgttcaaaccagaggcggtctttcggacctcgctatccttcagagtctcgcaaagcgtcttggcatggaactcgacaaagtaagcaaagagcgggttcgagctgtgcttcgagtagatctcggaatacaaccgggcggagaatgcctcgagatcggccttagtctttggcttggcatccgcgagcgaaccaacggaagcatctgataagtgtaagtccgatgtttgtataagacaaacgagttcaaaagagcgacaaagggaaggaagtgagtcagttgagtgacagtacaagtgggacagggggcgctcagcgcgcatatggaccacttgagttgcttattctttctgataaatagcaatacgaaccaggcttgctggagatagtggtgtctcctaggagatcagaagcgtttgccagatcagcatcgagctccatctgcttctccaatcgtcgtcgctcctgaggtgtcaactcctcttcgggatcaatgtctccagcctcaatctagatatgattttattcatttgtttttgaatgagaaagagatatcaagacgaacagaaacaaaggctagaagtcagagaaaccggtgaattgaaagctagcgaatccatacaacaacgaaaaagagacgtaacgtacagctcgcgctcgctcggcttccttcgcggccaatctctgcttaagagttcccttcttcttaggtggggcgacgacggttggagcaacgactttcttcttgtcagaatcggaggcgtcccagtcgtcctgaagagttgataaatgagatacaccaatcagacggtcaacacgtcattcacccgacaccgaccaatcagccgctcgtttcagaccttgttcttttccttgcgacgcgaaaatgaacagggcaaggatcagaagagaaagtgatgaacggatactcactccctcgctctcctcttcgtcctcaccggcaaacctagactttctcggaattatcaccggaggcgtgttcgacgtagacttcacagctggcttgataggagcagcggtctcctcgttatcagaagcatctgatcgtttgtcaaggcattcagtaattcaatcgttcagcgaaggttgaagccgtacagaatagtatatgtcagttgtggttattcagaagaggatggagatgaacgcgagagcagagcgtttcacgttctactgtattcctctctccctctgttcttgccttttgcatggaaacagcacaaaggactgtaaacacagggagagggacagagaatatgagaaggcatcatctaatcattcactcaccccagtcagacatatctttatccttttcttttattgattgattttcttttttggaaagctaaagagtgttgattgttcttattatgctgacaataatcaagaaagctggaaggcaatcttttttctcttttttctttttccagtgagctggaatccattgtaacagccatgacgcgtgatacaccacgtggcataaagctgtacaccgttagtcacccattcttgaccatcactttcccgacttctggtcgttcttctcatttcttttgttcctcttcgctcgaatttcttttgttctgtcgggtttcgatttctgttctatttcacaaaatcaacaagtcgaagcaatgtcggaaggagcgtagcgaagagcagatcaaacgccgcaaaaccttttcaattatcctaccaaggaagatcttccagctcgatcaacataatcttttgtgcttatcccactgacggatgatggttctgagacaataaactcctgggacgtacagccagacttgttgacctcgtccatttgcttttgtctagatccacacgtttctctctagcccacagatatgttctatcactatttatgaacgatctctctttctttttaaactgaccgtagacaatggatcgaaaagaacgagttatcaataactttgcctatccctttgatgagctaatgcgacttgtggtccgtcgtgagccagccagccagccaccgttcattatcatccgtcggatcggccttccatctatacctgattgtttaatacagatataccctgtagggaaccaattccgggtggtttatacacattctctctctttgtcccttaccggcccttactatccgctcatgtcgatcgttttctccccttaaacccaaaaaaaagtgacaggttcctttttgattgacatgccgacattgacaggtttttttccttctcttcctagcatacatgggttttctataaagacttcacaagagtggcgagtctgtctcgttctctttctttcttctctttctttcatccacacatcccttcagtacaactccatcttttctttctaccttgcctgtccaccagtaagacagcatcaacttcgatccatctcttctatcagttatcgccatcgacatcatcgttccagcacccgatcctttcaccatggccaccgtatctcgtgctcctcgccgccctgcagcgatcgactatcactcatccactcccaccagtcagcctatgcaaacacctagtcaggttgccgctagccctcagatgtttatcgagattctcaaatcgcttggagaatgcgccgagttggtcgagcataacgctcatccggccgatacgatgtcctctcttcgccaaattatctcgcttgtcagctctctgagcattgccgttcttatgcctagcaattctcagggtaagctgtttagaagttgatcctcgctcccggttttggcactgactttatcgttccatctctgttaatcgtctccaggccccggttcttgcgttacgtcccaaaagaactttcatcggagcgacagtagcgtctcgtttgacggacatgagttttcaacttctgaccctgggctctcatacagccacagcaactccgagtctggtatgttcttgagcgtctggttcggcactaacgaatgtttgcgccagtctattcgttgcgaacagctatacttacatgtgtctctttca

SEQ ID NO: 1353 - DNA, 19500 bp, Xanthophyllomyces dendrorhous
tctttcaaaaacaaaaatgaatatacaaacaaaacgaagattcttccgtctcctacaaatgggaacctccgtctccggcatcttcccctgcttctatggtaggcaagcatacggctcgagtcgttcccgggaccccttatcatgctcgaaaaccctctcgagccccgcttctcacgcccccaccttccgaccgtcaggtttgcaggcagctttctacccacgactctcctctgtttcctgcactgccggaaatccaagatcgcgaaaaggtcgataactcgctgggattgaagttaggattcgagtcgggagtgcttcctctcgggtttggttcgtttgtctatcttctcttgtccacatgtatgactaccttgctgacggagtgggaaactttacgaccaacaacagagtcctcctctattcctcaagcctctgacgccgatttcaatcatcgagcgacttttcacaggcaggctggtcgtggtatctccgaggcttatgatgtgaccttaaccttgactggatcgactaccatcgacggaaccgtgttccccttcaggatcactgatgcctattttaatcccgaggcgagtgatttcttttcaacgttattaaagtatcaacttggctaacactcagtgatcattccatttgtttacaaaaatagacctataactatagcgagagtttatgccgaacggatggaacaggtatcacgggttatagatacgacaaccggttagtgtcttctcttccacgcaggatgacacaaggtctatgtaccaacaactccttacgtacactttctcccaataggaacggatcaacatatattcgattcgatgagccaaccggtcctcgaacgtgcttcatggtgagagcttctattatgtgttctttgttgcaatatgaatataccatgactgatatgacttcctttttcatataataaacttgtaaagcgtcacacccaccctccccatactattccgccaacttcctcgtctagaactctccactccaccagctccccccagctcatccggcgtgcttctgacggttccgccaagggcaacatggccgtctggtctcccttgccacggtcccctgctcagatgtccctgactatgaagccgccaaaattcactttaagctctcccctggtgggtaacgacatgggcggcagtgcccctatgggtctctctgtgaaagatttctggcggtaggtactataccagccgctttgagacttgcatattcactctgtacacgttcctttctcttgctcgcgttgtagtccttctttcagtcctttccctctgtctctcatctttcttctaattggtagccctctgatggttcctctcatgttatctcaatctgctttacgatcttgcctgtctcttcccatatctgcccgaccttaccattggaggatatcttcttgttctttcattttgtcatctctttatctaaaacgtcgactcgatatgtcctccggcgacgttttgtagctttgcccattcatacctcgcactctgctgggttgctttctcgtgtgttagtgtttctcatggttctctacatgcaatctatctcattctctttacacaagatgtttgtggacttttttctggattagggaatggatacacatatgtatatgtcgtacaacgtctgatcggaaaatcaacaaaggggtgacgctctaggaggcgaaccgagaaggagcacagagagattcgaagaaaagggcaagactctaacggatgaaacgcactgtgggaacaaaaaaggtaggcagatcaacacaagcatccgaacaaaagacaaagatcgaagacggagaaacgtgacatactgtaggcgagtaggagagcgccccctcccgtggctgtttatttgtttgttcgtttgtttgtaggattgcagatatagtctcggtaagttgtacgattcaatggttagagacaaaagaaaggataaagaagcataacgtaccgacggtgaccatgtattgaaggatcgagaactatgtgtttcaacagatccgtaagagaaatagacagagcatgtttcttgtttgagtcccttacttgccggctttgggatgaacaatagaggatcgaacaaagacgaggaaggagatctataccttggcaccttgaatttgagttctcaaacctgcgatctcgctttctatccgagtatccacctgcgatcgtttccaaccgaatcacatgtccatgcaaggaaagaggagttatcactcagtgtttattcatatcggacggatgtagttagcagtctaaagaagaatcggatacagacctctttgatcttcagttcgtgaagggatgcttcgtctctgatccgacctggatgatcatcacacgatccgttagctatcgatcaatgacgacgagaaaagaaagaggaaaagaaagaggagacgaccaagtagaacagacctttttccagattcagatccaacctgacaccagcctgagttcttgtgatttgctctttcagctgttgtttcagcttttccacctcgttcatcaacctttcgttctctcccttcatcagattctggtcctgcttttccaagacctgaagttcagatttaagttgagagaaatcgacattttgggtgtaggattgctgtatacgtataagacaaccaagataagttcatgtcatgtacctgccaaaaaccaacacaacacgcatgacacaacgataaagacgaaccttttcttgctcacttctcgataccattcccgcactcatgttggtcacactctcgtcgatgacttccgccaaagcattcataatcccctctgcttgagttctaggaagaccttctcgttcaagcctgttgacgaacgcatgggtgtcgaaatgaaaggaggctccgggtgaagttgggtggaacgatcggctgattggtgtatgaagaagggaggaggaagacgctatacgaaagggctggttgagaagaggaatcgatcgacggagcacagggagcgacatcttgagtaagaggtatgacgaggtgtgtttaatataagactgaggacagggtagtatgagctagagatggtgagggtcaatatatattgtatatattgagtgttgggttcactggtcgatgttttagcgaaaaaggagaaagaccgtgtccaataacacataatacatcatcatcagcagcagcatccttagtcttaccatccagcactttctcttcctgcctctttcgtctctaaaaaaatctttgttcatatcagtcaaaagctaacgcagcaatgagctggacacctcctcgttcaaacccactcaagccgaaaccgtcaacgaaatcaccctggatcaggcgtcattcatttattggtttcggcggaccattcattgctttagtactgggaaccagtttactcatggtcaatttcacaagtaccaggtaaggttttcgctcaagctccttcatctagtagcttccagagcttatgtaaagagagagagagataccgacttgtaatcaacacgggagggaaactaaaagctaatgggcttgagagaactttttggtaagataatccaggtatgaactgcacgatcagaaacaaagctatgtacgttcaggtctcctctatatctcttttctcctcttctatctttgcctttcggtcttcacctttacgtccaggccctttatgtccgggagagagagagagcagatatatatatgaaatacatcatgaaagccgaagactgatatcaatggacatattttgccgcgcttagatgtcgaaagaggaactacaagcgatcgacgagaaaccttttgatatccgagaattctactacgttcgttcccttctctttcccgtgttttcttgtcttcaatgccggcttaaacatcttgttccttctctctcctgacgactacttgtatcagaaaatctcatcaaatacgcctatggatgacgatgtggtcctcccacctgctcgtccaatccgccctcctacaaagaggctgaagaaatccgagacattgttcgataaaccacctccggaggattgggaggtaaagcgagtcgaaagaccggttggggtggctcaatggggagagatgccgaagagcaaagaagaacaggagtttgagagaggaaagaaatgggtctgatatgtctatagtatggtgacttctcaactttacttgtcataggaatttggagttttcgggtttcggtgttcgtctctggctttcagacaaaaggtctaatatgtgatctttcaacattgcgatgaaagacaggaatggagatatataacaaccaaaaacaagccagccggctatgattgaaaaagaagatatagctaattgaattgtaacgaagaagaatataaatagagagaaatctgcatcccatcccttcccctttgggttctaaaatccctcgccgccatcgtcatcatcttgcctgttgatcaaatctttagcgatggcttccatgctttacttgacctccttgaggatcctgttaatgcaatcgcccaaacaactcagggtcagtcattctccaatagatgaggaggcaagacaagagaagaaaagacaactcacatcgactctcgggcagggccgtttccgatccactctacaggcacaccgaggtaagactcgatgaactcgatgtaggtcttgcagttctcagggagatcctcatacttctggacgctcgagatatccgacttccatccggggaaagtcttgtacttgacctcgaccttggccaagtactcgagatcggccgggaacccgtcgagctcctttccgtcaacctcataagcgacaccaatcttgatctcgtcgagtccgtcaagaacatcgagcttggtcaagttcaaggtatcataaccgttgatctggttcgagaatcgaagcacaacgagatccaaccaaccacatcgtcgtcgtcgaccggtggtaacaccccactcggcaccgacctcctgcatggtctctccaatggactgtcgagatagtaaaggattcgagcgcaacacacatgagcaatgcaagacatcagcctttgtcaaatgcttcaaacaaacacacaaacacaagttactgacgttcaactgctccgtagggaaaggtccaccaccaactctggtggtgtaggccttgacgacaccaatgaccttgccaatcatcttgggagggatacccaatccagtgcagactccaccgatagcggtagaggatgaagtgacgtaagggtaggttccgtagtcgaggtcgagcatcaacgcgttggcaccctcaacgaggactcgcttgggggtagtaattgccttgtggaggtaagacactccatcaacgatcatcggtcgcagtcgagcggcaaagacctaggtgaagtaagacccagaggaccgcgcgtaaaaaaaggaagagaaagacaaagagatgtcaaacttgggccataaaactgaaaggacagaagaaacatatacacgaaaacaaaaccgaccttatatctctcaatctcagcctcggtatcgtactcaaagtggccgtatcgcttgattcggccctcgacgagctttcggaacttggtagcgaagacctcatggtcgtacaagtgatgcactcgaagacccgatcgagaggccttggaagagtaagctggcccaattcctcgcttggtagttccgatgctgtatgcggaacaaaagtcgaccagatggtaagttccaatagataactctcaagaagagacaagcaaacgaacgaggatccaccgagctcgacctctttgaggccgtcaacgatttggtggaagtcaaagacgaggtgggctcggtcagagacgaaaagccgaccagcgcagtcaaggcctattctcagcccagatggtgtcattacaattgtttctatcagttctcatctttctaaaatgtccgcgatcgacaaacagatgtaacgaacccttcttctccaagctctcaagctcctcgaacaagctgggaacgtgaacgacgactccgcttccgatcaaagcctgggcatccgggttcataagcccactgggaagcaagtggaagtcgtacttcttcttagtctctcccttgccgacgacaatggtgtgcccggcattgtttcctccggcgcatcgagcggtcacgtcggcatggtgggcgagaatatcgacgagtttacctttgccctcgtctccccactgggatccaagactgtatagatgaaagatattagcttggcagtgagagaaagagggactcccataaccgagaggaacctacacgacggtgaccccggacttggctacgactgaatataacaggaatcacagagagatagttatgattataccaaggaaaacggaagaagtcgacgaagagagaaggaaaaaaaaagatagaatggtaaaaaaagaagtcagtgaagcaacagagagtcatcttacattcccgaaatctccgatcgagtatgggactcgagaaaagagaccccggctcgagagcattccgtttttcaacagctagcaacaaagagcagtacatacggttatcagccatggtgtcaagtgtgtgtgtttgtgtttgtgtaagaagttcgcacaccgagatggatcttcttgctaaagagaagaagagagaaaggaaaaaagtagaatggaattggaaaaaaagcgaaaaagcggatgtacatcatttggggaaatttggggtttgattggtcaaaattggggtaggtctgggcaactctagggctgaacaactgtcggttactaaccgcacgttccactagtatcaacatcatctctcggttcatagaacacatacacaagcacttacagtctcgatcaaggactatcagatctatgcttccttggatagttcctttgatcttgttaacaccgctagtggtattctatcgggtatggtacattttacctcgaggatatcttcctcaaccctcatccagtcgtaccaaggatgtcaccaacatcaaggataagcgatcagataaagtcgttggtgtcttcttgggttccggtgagttgtatgctgctagctcgttaatcgtctcagatgcattgaccccagcgttctaacacaattaataaacaaacaaataggaggtcatacatacgaagctttaaaaatactagacatcatggatgcggccaaatatgctggaagagtgtatatttactctgctggagactctatgagtcttcgtaaagccatggagtttgaatcatccttggcttcagctgagatcccatcacaccagctcaagaagagcaattctttgcaggcattcttgacaatccctcttccgagagctcgtcaagtcggtcaatcatatgtatcatcaagtacgtcgtgtttctggatgcgcctctatccgaatttacgtgtgtctcaaatttcgttttactgctctccaatgatcagtcttcacaaccctgcataccattgttcatactctctatcattttactataagtacggttatccattcgcgtcggtcgagtcggaagaaacctttcgcagatatcctcattctgaatggtccagggacagcgacatgccttgtcttggctgtccttacctctcgcgttagtcacattttccgtctcctgttgactccttcgtctatgcgctaagaccgtagtcgggatgacttcaattcgaaacctgtcatccctagtttctaggtcttccaagtccgaggacgatatatatcgaatcgttcgctagaacaaactctataagtctttctgggcggatcttacgacctctggtcgataggtttcttgtgcaatggccgggtgcgctttcaccagagaaggaaggcctacccccaggaagcaaaggggagtgtgtcggtgttgttgtttgaggcttgaatccataaactgggcgtttggtacaacatagccgtcgctctcacaaattgtaatcaaaataaatcataatggataggcaacagagaatcatgagggaaggcaaagaaatgagaaaatcgaaagtatgtttggtgctcataataagaatcgaaaacaatgaaacgtgacgaggtgtaaacagggtatatatcaggcaagaaagaagataggtgttgaaacttgagggatatgaagtaaggaagccagtttcaaatttcatactcctactcgatggaccacttttttctattgatgagatcagatccagaccaccgaaacgtaggagtcagtaaactggccattgacatgtctggaacaaatttggagggatagcttacctgtcctgagaatctcaacacctctctcttctccattatatacaacgttctctccaacgcatgactcgaatagccctgtccgctcacgaactccctaaccagacttgcataactcgtgctccatccgattggtaacctcctcctgacttctctttcaatcttctctacctcttcgttaagctctcctcgtgtgagaccttcgacagaaccagcagagacggcgtccatggtagaatacttgaaaagtcgaatcgcctcgtccacatggaaaggttgaactgacgtcgtgagcgtcatcttggctagagattcagagattcggatgatagcttccagttgtctgtcgttggccagttcataacataacggtcagataggacgatgtaggacgaatatgaacgaacgaaatagcaaaaaagaaaagaaaagaacgaaccgaacggtgatagggatggaacttcgctcatcgttgtctcgctccacctgctgaacttgttttctcagcgccacgaaatgactacttaacatctccgacgcttcctgggatagccgaggcgcacacctcgatttacagtaggcgacgtatcgtttcatcttgtcgatatcgatctcgcccacagtttcgcttcctgtcggtcggttcatgtggatgttcatcacgtgttttgctatcgtctgcagccggcgaaagcaaagcagattgaaaaggtaagaagagaaagaaatatgggaaaaaattcgtcagtcagatggtccgcagggaaaaagacaaaaaagtgagaagggcgcactcgatctcgggattcattatgctcatctttgacaataaagatcatatcgaatcgagacaagattgtcgtttggaaatcgatgttctgatttgttcgagtgcaccaacaacaattccaaaaaagaagaaaaagaaaaagacagttttgttcagctctatccatctcgaccaatgcaagaatcgggaagaaagatagtgtcctcgtacctctccaggactcttcatatcatcataccgaccgaagaccggattcgccgccgccaatacgcttgtcctcgaattcaagatcgtcgtgataccggcctttgcgatcgagatagtttgttgttccattgcttcgtgaattgccactcgatcctcgtctctcatcttgtcaaactcatcaatgcaaaccacaccaccgtccgcaagcaccatggcacctccttcgaggaaaaattccctctaatcgtcatgtccaaacgtgagagcgaaatttgatatacgacggaaaagaaagatgaagagcaagattgcagcagtacagtcagtaaaggacgaggaaagatgcacgaagtaagaaagacagacgaacggtgacagggtctctttgtaccgaagccgttaaaccagccgcactacttccctttccggatgtatatacggagatcggagcgacctatgattccagacgaacaagagtgccgatatgatcattttccatcagccctgttgccgttcttcacctaactatctaccctgcaacgaacgatggtaacataccttttcgacgaacttcaacagttgtgacttggccgttcctggatctccaagtagtaatacattgatgtctcctcttaaacgcatcccgtccggaaggatcttcttacttcctccgaagagcagacaagcaattgctttcttgatatctgttgaacacaaatcgatgtttttgagttatgtttctaattctttggaaagaaaagagacagagatgaaggatgatatattgagtcttacccaaatttccgaagatactaggcgccacacttctagcaaatctttcataaagcccttctcctcgactgatctctccaaactcttcttcctcttcagcggtgaatcctctggagccaggggaggtcgcgagattggtatctaattcaagacctagcactcggaggtaaggagttcgaagcgctggagcagatgcgtttcctctctaacaatcacatgaacagtggtgttttattggttattagtgatctgtcgaatggtaatagagactagttgagtgaggaaagaagaatgacctacagtcttgccagcttgataggtcgagtagattccggtgacgatgactctggatccaggaacgactttgcctgtcaaatatctgccattgtttttcattaaaagtccgtcgatcagctatatgtttctgatgccttcgttgaagaatcaaggatcggtaaactgaaaagcgacagcaagaacgaacctttcggcgctgagctgcatatgtctaggcaattctcctactggaaccgcatccggtgcttcctgaagcttgatcatctgttgatcgacaaaccgacatcggtcgtgcatgattacatatggatcgagcgggcagtctttcactgttcctggcatggcttctctatcattggatatcaaaaggaacatcgagtcgtaaatgtcagtccattcatttctcttgagctcatacaggaggatagagataaagataaagagagaaaagaaaggaagggctacgaacgcttcgcatttccttggcaaactcctagctcctccatcaccaatcccaccagtgacggccatgaccttggtactccgacagcctttgcattgcaggtatagacttgtcgctcgagaggaaagtgtcgaagccgaaatgacgatccctggcagacgaactaatgtagtcaatgtgtctgcctaatagttcgcgcgtatatcatacaagttgacgagaaagattcaacacatgagcaaataagacgaaaaatgagagaagtaatggttcgaggagaagggtgaaacatacagtcaactctctgaactgaatcatgttcattccactcttcaatactgcctgcatttctgggatctccctttctgcgattcccaaaagtccatcagcctgcgttgcgccaccctgcgtaaactgttccctttctcgttgttgttgctccctttgctgagcgttcattgggtgaagaatttgccgagctgatttaagaatagctgattccaactgtcaaacatcaggtgatatcatgataggcaattagccacgaagaaaaaggttatcactcggtctaacatggaaataagttgaaagatcaatgacgaacgagaggaagcatgtcgcctggtttctcctgaaccatctgggctaattcttcattataaacgacaagatcccgaagatctatctcgacgacgttttgtcgagccagaagggaagagcggattcgatctctgcaaatcagagtgttatgtagacgaaccaaagaaggcatcaactttcaattcattcgcctatttatgcaacgttaagagacctgatacaagacttaccggtacttgaactctcctccaactctaaatccttggataaattcgaatagacttctctcgattgctgcaggtgcatcatgaggaccttggtgcgaaagcaccgatacggaaaacactcggtttgaatcaaacccagacctagggaggtgatgagagattagatatttcattatgagcccggttgaaacaagcaaggcctgatgagagaactaagactcacattcttttttaacacaaagattgagagaggtagtgatgactcttcgagcagatatacagagagaaagagttgctcggtgacgatgttaatgaatagaatgagaacagcggacaaggagaaaacacgcgcactcagttccatcgatcaacaagtcgcgttttcatttacgcaacgcgacgtgacttgattaggtaatcagagcaaccaaagattctctgcacgacaaagagccaagcttctgttgcaagaaggatggaagagcttcatttgaaagcagctcgaagatcgttcaagatagaggacatgagcagattcgaacagtctttcagtcgcgttctatcacatagccgaagcaccgattgataccaagttggtctcttgtccgttacgtcttctccagttcagcgtggcaagtagtggtgtatgatttagcacgtgtagtcaaaagccttcccttcctttgtctgatgcagatttccttatggtgtagaaatctcatcactagacttgttctgttatttcagaatgtaagtgagagtggtatatgatcatatattcgataaccagcatctgttggtttggctgcttcgccaatcaacgtgagacccgaggaacgaagtatttgtatagaataatgctagacgttctgatccgtggtccatgattgaaagaagggatcaaaatttaggcagaacagagctcaatcatcaatatcaccttccactgcaaatagctcacacaatctcagttcagacaaatccgtaacaatatcgatggtctgtaaacttgaaaatgaggaccacttaagatagagagaaacgaagatgatgtttgagatacgatcaaaaatcagtcgatagccggtgatctagaaaatgttgatacagaaacatgcaagatgaattctgccagacgatcgtctgtctatcaaaacacatcgaactggttagatttactcatttagcagcttgacccacgtcaagagaaagacagatgcaaagatctaatcatgaatatcctggcggctatgaggaagatattcgtcgattcaagagcgtacaagatgagtgaacgaaggagcagagataattaaccaaaaagtgatcaacttctgcggcatttctttacttctctccctgccttctcctatcatcttccgagacatcgctttggtctcatcccccttcagatatatagaaatcaatgccgacgccggctcaagacccgctccttcacgatccatctttcatatatgcttcaactcccacgctctctcggacagcatccgtaggatcagctcaacctggctctcctgcactcggcaggctaccgggcgcattcactcccgtagcaagctctatcccaggaaacctcaagaatgttgttctcggtagaggtagcttcggtagaccaccctggtatgactcaaatggaaagacaagagagtgttatgtcattggaatcgccggaggaagtgcaagtggaaaggtcagttggctcaatctatcacactttctttgcttatcctatacccgcatgatagatactgaccatcttcatgttctgacctgctgcgaatcgttcttcctatattgacccttacttcaatagacaagcgttgcgagagaaattctccgccagttgaaccatattccaaacgtattaatcctttctcaggattcattctacaagcgcaactcgcccgaagaaattgttatggcattcgagaacaacaaggattttgaccatccagactccattgatttcaaactattcagagagtgcttagtcgatctgagaaatggcttggccgttcaggttcgtatctttggttttttattctctagatatcagtcaagacagcaccacttgtgacgctttccgagtgcgctgccaatccatatgaagagctgacactatcttcatcgctggtcatgacatcattatacagatccgtaagttcttcttcctgagatatgcttctttctctaagatcgcaagtttaaagctcacccgtcgaatttacaatgaacacaatactgatgatcaaacttccgggacaacttgtagctgtttactcctttgttcaccatcagcgtatgccagagacatcatacctctatggagcatctgtcatcatcgttgagggaatcctggcgctgaccgatccaagccttagggatttgtttgatctgaaaggtaggtcttgtacatatgtcagtccgctaaaggagtatgttgcataaatggactgatcttcgttattttacccttttaatgtgcagtgttcgtcaatgtacgtcgtcatcctcatcaattatcttacgcgcatctctttttccttttttttttttggagaatgaagagcgatcagggtgtcttatttctttcatttgtgtgccggacatacgacattctatagtgcgatgtgggtttatcctcttttgctcaaggaaagggatactcgagacgtcaaactgatattcatcatcctttcccgtcaaatctcttctcatcagaccgaccttatgctcgcgcggcgaattcgaagagatgttgtcgagcgaggaagagatgttatgggtattgttgaccagtatcttcggttcgtatgcttcccaaacattccttctaaatggaagtcgactaactatgtgtctgggcggaaacaaggtttgtcaaaccgagttacgacaacttcgtgttgccttcatctaagtttgcagatattgtcagtggtttcccggtctgcattcgctgttattgtctttctggtattctgaacaaaggtatcggcaaatatactgtactgtcttgatatggttgtcagatcgttcctggcgcgcaaaacaatgtcgctatcgatctgatcgtgactcatatccgacgacaactttccgagcgctacatgcgtttccggtcgacgctatctgcccctgtgaccctttcttctcaaccttcctcagcaaagtcgctctcttcttcgaccgacccatcttccacattatctccgtctcccctcgcatcaggctcggataagactgatccacaagtttctgttaacggtaaatcaagggatcatccgaacttggtcctggtcaaccaaacgtcaggcgtgaaaggcgtagttactatattgagagatcgaaagacgatcagagaagacttcgttcattatagcgaccgccttgccactatgttagtattcccatattccttcatcagggaagccctcatagaagtcggactaatcttaaatgttcttttccaccgtgggtgtgatacttcgatgacacagagtggtcgaggaagcgattgggctattcccttacaaggacaaaaaagtcataaccccaatcgaagaggtggctgtcggaaaggtcttagatcttgatccaggcgtgagttttagtcctgttatgtcgggatgacggtttcgtttcatatgtcggaattaattgattggtttgggtgggaaaaaattgagcagaaaatcataggagtttcacttggtcgttcgggaggtccgttggagaaaggcttgaggcgagtcgtgttggacgctcgactcggaacgcttcttattcatgtgggattttctttcttctcttttcgttttggtcacctaacccgccgactggatggaggctgtgtgctgatattgtgtcccttttaccattgtctttcagaatgacgagactacacaagagccactgctttataacatggtccttcctggtttgcaggagcggtctttcgcagagaaagcttgggtgttgctacttgactctcaggtgtgttccgattgtgaggatcggtaaggcctttttatcagataattgatcatccttgtcgtgtttgtcggatagatgggaactggtgcttctgccctcagtaagtctgcttgtctgtttgcgaaaagatcggaccgttctttctttgctgaataaccgcacatcttccttttggtgttttttttttgcattgacagtggccatacgagtcttattggaccaccatgttccagaggatcaaattctcttcctcagtttcttagtgtacgcccgttgatttccttctcacctcttaatctttcctcatgacctcggttctatcgtgaactcattttgtctatatctttccgatgaacctaggaccccgcattctttgaaagcgattgaaagggcgttccctaaagtccgaatcatcactagtgcgattgattacgagttagaacagatcactcatcaccgacgcgttcatcgaggttctctctctgaatcaggtcagggacttgcatcaggattgggaatcaagatgtctgaatccatgtctggagtacagggaaagaacaagtcggaggagagggtaaaggaattgaaagaatgggtggttagacctggatgcggagatatcggcgatcggttcgtttctttcttcttgttctctcccttgactctcttactcctctcgattatatcagctaattgggatcgttttttgatcaaaatagctactatctggtctagctacctcatcacagaacctaaatttgatatatttgccaatctgggtatacagatgaacacatctgctcagcctacatgagtcgatgacggaaggatctatgaaatatgactagaacaaagatggagatctcgagatcaagatgggtgtatttcgatgtattgaacttgatacatttgagaaacaaacggcccaatgagtaaattagtgcgcgcgcaaaggaatggtaccaagcctaagtataagcacaaaaacttttgaagaaacgatgagaaatatggatgagaaaaatgccatgatagctggccgaacgatcacctctatccctcatctctagtatcgacttgtgtgtggacctggtgatgtttgcttctatgtcaatgaacggaaagtcaggatatcgagttcgttcggaaactcattcaaatgaagcaaggggaatggacaaacagatgatcgactctcgagaatgatcttccacaatcttgaatcatacccacatgcggtttttctgctgtatgaatggatttaacatgccctttcaacattaaagtcaattgcctatcttctttcggagttggtagacaacctgtcgtaaatttgcaggacaaactgtcttaagtgaccacttcgtctagcaagaggtgtatgagagggacgaatctcgtcattcagatgttacatagaaacataatacccaagattaggagagcctacctaaaccatttctgacagccctcagtagtacattcgaatacttttctctcctcttgttccgcatatgtgatcgaacctgtgcttcttttcgaaataaatgacactgcgatagacattgctctcggcattcttccaaactttctctttctggaagtgttcgatccgtggatgacagtagtaattgttcgagtgtcgtcatcggatctgacgatctttaggttgatacgcattgggtctgctatatccatcgatttcatcgtatcggatgttggtgtcgaagcacgtgaggaaaaaagagacagagtacgctgccaaacttgaggttgtacttttctggcctattgggtgaatactgttgaatgaggacgggattgactgggattcggcgcgcggttggtcatgacttgaggtggacctagacgtatgactcgaaagactggcagtattgtcttgcgacatttttgataatgaaatgcagtgttgatagatgcgactatactcgatgggcgatgaagagcaatcagttggtctgtttactcaatctttcggttagacattagaattctcaagggagagtgcaagattagaagtgaacaaggaagacaaaagtgagtaagatagcgaaacaaacaagccaaggcaatgttcagaggaggtttcgatctcttcatataagtattcggtaacacaatcagggtcagtgtcgaatccaatccttgaagaagaagacatattctcaaaggaaaatcaagagttgagattcaaagagtcagtcgaacgtcgtcgagtcggacgaggaggtgagctagcatgccagccgtaaccaaggtttacatttgatcggtaaccaactgtagattgatctcattgatttccttgtcaccttcaatctctccctgtcatctttccacttgaaggacctcgagcatgtcgcctctaccggcagcgattctatcgccatcaccacccactcgtccaccactacaagttcagtcgcagtcggacgactcctttcggacagcttcgtcttccttctcctcttttgctcgaatcaaacaatccatccccgccgagttgactccactctcggatggagatggtcaagctgtgaccgatagaagccttccggtagcaaaagctctaccaatcgtggaaacagacaagacgcttgtatcagagagattggaggccttgctgaaatcattagtgatagagaacaagatcaaagatggcgcggagaatatgcttcaggtaagccctcagttcagttacctatacgccctttggatttggtggatcttcgagacctatatacgcatatgaatccatcgaaacgccttcaacttccgattgggaacactcagttcatcatgtcttcatttccttcgttctcaggtccttgagtctgctgtagaaacaggatcagatagaaacgatcttcggaaagaggtcgagggcgaactgagagcggccaacaagatgattgtcacaatcttgaacgaaatccaagaactcaaagagcacccaggtttgtgtttagacaatgttcactctcctactctgtagagctctaacgcctgtcttgtcttatcttgtcttgaagaaatttctcgcgcgcttcagaagaaagtatcacagcaggcgtttccttcgaatcagtcgacgcgtcgacttccgccgaaactcagctctgctaacagcagtagtagtactaccaacagtcataacaacgtcatcaatcacccagcttcaacttcttcttcttattcggctatgcaaaatatgcgacatccccgaccgattagtccagaagatgacttccagaccatcttgactgtcgcaagagctctggtgagagatcttgatgtgcaaagtagggatgacggaaagaagtttgaggacgcaggaagactcgtcggagtcctcaaaaagaacagaagggttcggtatgatcttgcaggtcgagaggacgtcttggaaatgtgagtcgactctgatcatgaccgattaaccatccgtcttcaatcttatcattgatcttgcgcgggcgcatgaatgtaaacacagaatattcgccttgatctcggaaacaagctcaaaagaactacgagccactggatatagggtgtttagacacctacttgttgattcagagggatggaaaacactcgagcggatgggaattgattggtacatcattcggtaagtgtgattgttctcatgttcagcttgcatctctgtttctaagagcgcgcgcatatatgtttatacagaagcatttgcatacttctacaagctgatttgataaacttcaattatatatggtccatc

SEQ ID NO: 1354 - DNA, 11359 bp, Xanthophyllomyces dendrorhous
attatatatggtccatccgatgtgtacagcacatttaccagagatgtctcatgcgctcctgaaaagatacaggcgctcaagctgatccgatcggttttgaacctcccgccatctccatttaccccaccattaatatctactccttcgaggtcaaaatctctgagtgactatcgaaatctcaatgatctagaaagacgagggttcaggagaagcgcaaaagttccattgagtgattcggtgataaggacgttagtcagtttagcagagaacggggatgatccgtttagatttgttagtttagagaccttggcagaaattggtaagctttgccttctttcgcagaaactgttcgtacactattcagcttacctatcacatatctatgcaaaagcccttttggacatccaaacacttgtcccctcaaacgctatcagagttcttcttcaatgcttctcggagggaccacatgagttagcgcctgccattgcccatgtgtttctgtacgtcatcgattgtccggaaaggagggagtcgttaaatcccgggatggatatcgaggtctgtttcttctccgctctctgacgtgtctttctcttcttatattaactggtcgtcattttttttcttctttactatcaatcgatagatggctctctctggatttacagatgttcatggttctggcgaggcttatctgagcagacttagatcgagttcaaaggttgtttcaacattgctcaagtcatggtcaggtgagttcttttccctcttttctcggtatcccctctgccaatcgctcttcgctaacgaatttatatatcctactctgattttccttataaaggattcttatatctgtgtatggacgatcgaaaagcaatccggtccctagtcgattctctcagagtaccgaccgttcagatgagagtcagttcacgttactttctaaagcatcgtaggctaccactaatcctattttcttttgtttcgtctctcccgcgtattatgaatgatgtcataggaagttctgctagatatgttttttgatatctttcgcatcaaaactccgttttggtaccatgcgtttttagacgaccgtcgtttaacaagtgagccatctccttgacttatactttctagtctttacaatcacgcgtttcttcaatcatctctcgtcctcatgtactgattcttatccctttgtcgagaacatagtgtactcaaaagacttcaggtccaatgcttacagcgcatcaggaaaagaaaaggaggacccagacaaattgacattgattgatcattacgtcgctctcgtcctcagcgtctttatagaggtcggcttagtcgacgtatgtctctcttcgatatgtttgttctctccgtaccccctttttctactaagctaatacaacaggaaatattaattgatcaggcattaatcgatatcgtggaagaagcattggacatattgtcccgcaaagcaacattgttggtaggcgaacttctagcattgtccaacaagctccttccatcgaccattgctgctcggattcaagtgagaactccgttttctctccattttttttatctgtcgctgatgccgctatacttactgacttgatattcatcattaatacttaatatttgaaaacaaagtctcttcccaggttgttctctcatgccgcaaaatttgcgaaacccgaggagagaggtaaagcctcatctgctctgtcagctatcgacagtttgaacagaaatcgaagtcgattgagagacacgacagctgtaggaacaaaggaaggtagaaaacggtgggtcctcttttcctctttcgcccttctgctctgttgaatgatttctgagtctgatctgactctgattttttattttttattttggtggaaacggggacaaagatcaaatccaatacaggaccctttgttgagaggtcagcgacaagtagaaaatgtcaagatgagaatgggtcttcagatggatgatcggcagtttcaagtcttactcaatgatacacaggtctgcctctgttccatagtttcctattcagaaataactttgtctgacttcttcttttccttgatctgctctggctgaacatataggtcttgttctctcgagaccacaataagtggaattatgatgtcctgatggggatcattcaaggtccattgttgaaccctcgtcggttggaagaagctctgaaggcttcaaagtttggccgcaggttgctgtcattttttcatccattaaatcatcgattttcagatgtcaagaagacaaaggtacgctaagtcgatttttggcttctaacatggactgatcatcttactgcatgtgacttgtgttttgaatgagtgtagccgaaccttcgttgggtgaagctgggttgcgcgttaatcacgacattactatccaacccggacggtgtggcgttcttggcagcagataaactgttacctcagttgtacgaatgttttgcggagctcgatcatgtaagttcatcgatccatttaaacgtctgattatatctcattcccttctcttactactctctcttatctgtaccggcttgttgtggaatgtgatgggttcgcaagtatcatggctctgtcaattcggacccgttgttgtcgaaacaccgattagatgatacgctgacaagtggatatttcgagatgattggaacgttaagttcgcatccagaaggaattcggtaggtcattctcttcgtcgatgtatcctctttcctccatgaacatgccagatgattctcaagcttatgctattcacttgtttcttctgtcttctatctcttgcgcggcgcgcgatagtctgcttgaaaattttaaaatgtttaccttgttctatcacctgagcgacttgaggagtcgtgaagatcttatcaaagctatcatcgagaatctggattacactaggtgagtttcctcttctatacctatttctcttaagatttgataggctaataatactatcaccgttaactggacacagcgacggacattcacggatcgtgttatcaaaagctctcacatctagttatatggttcgtatttctcttttgatcttacaccaattgtagtctctattgatctattcatcattccacatgtctttccagcatatccgactttacgcaaccgagcatctcggtcagcttgtcctttcctcagccgatgccaatccgtggacgcttcgcctgttgatcacacagttatatgatccttcgcctgaagtctgtgagctggctgttcagttcctggaggaagcctgtgaaagaacggacgtgttagagttggtcgttcaaatgaggccttttttggatcatctgggtgatattggccatcctctactactccggtgggtctgtcttacttcgttcacttgctctgaatacggcagttttaactgatgggcctgaaaatcacctcgaatttaaaaagctttctttcgacttctgtcggatttcgatatctccatcaggttcactatctcaatcgagagttggattactggtttcatgtaagtaaccttcttgagctttgggggaaaagaatgttgctcaggtaatctgatcgttgaccactggtatatatgtctttttgttcaatcaaaaataaggaacgaaacgagttttatgtagtgcaggttgaggtttttctctctcgggcattctatcctgctgcaaatgacgatccggatgatcttatgtaagttgcgacttgctttccaaccattttatatcgatacaaatctaccgggaaagacgaccaacgctaagctgcttcgtgattgatttaaatagcgcattcgatggaactgtccctgctcacttctatggcgagctcgttaaaacggccgagggttgtcagatgctaagagagcaaggccattttggcgagtttgcagagtttgtaagacagaatgggatggagtgtgttgattctgatgtgatcaacaagttgaagagtgtgctttgggcggtggtgagtcctttcgttccatccaatatatctagtttcatacttatatttcttctatgatagggccatattggatcaacgagaggtggttttccattcctggaggaggaagacttgctcgaggtcattgtagacatagctgagcagtcgtctgtgttatctgttcgagggtcagtactagaacttcatccgaatgaacagtttctaataagaccaacgagatcttacgtgttggatatgtgtggacatggacacgctcttcttgcctttcaataggacatgctattttatcctaggcctcatatcgtttactcgcccaggagcggacttcttgatggagttcgattgggaagctacgaattcctctaccggacaacccacagggttatgtatccctattgattcttcaaagttttcttacgtacgttcacgatttttcttcatctcgcaataataaacgaaagagagacttatatttaaacgattaactcattattgtacgcccgctctttctgttgtatagatccaaccatggaagccgattcgaagcttggagccgtcgggagctgcgttggtgatgccgacatcaattgtcgaacagagcgtgctgagtgctataggaaacctgagcaaccacgtacaagcttctgcttcattctccattctttccaggtatgattctttttccatgttttcatttcccgtctttggtctcacaaatcttgatgcctgcttttttcgtttggattggtcaaaaccacatgtagactcaaacgtacacatcgagacctgttttcatccattccacttttttatcgagcgcttcacatcctctcatcgactcatttccgactgcccatccgtcgattcatctttgatctgtttgatatcccgatgacaccatctacaatccttggacttatcaactcctcactcaccttgaaactcgaacctgcattgcccgatgcttcgacctcgtctttgatgataggaggagccagatcgccagcatcatcttccacgtcaatgaagctgaagaggtcttcgggacttgagaatcttggcaggtcgagatcgacaaagagaagtctcaagagggtcggatcgaaattgtccagggaagacttcaacgtcgacctaaaggacccagatctaaaaccgggtcttggcttggtagatggtgagcggggtgaggagaagggtaaactcaagctggaaatagatctgagtgtggacctcttgagcggggaagaggatgaaggcagagagaatggggccgagaaagccatgacgcctgttgtctgttcaagaccagccaggaaagtcatcggttttgcgcctgtgcgatgatcaaacgcttgttctttttctttcctcctttctttctctttcttttaggctctctttgctagtttctgtgtctgcctctcttccttcttatcactagcttgccgagtatctacttcgtttctttctctctctctctctctctgtttcttcggggtttcttgattcttctttcacttatatcctcatcatcattcgtccaataaccagcggatgtcataccttttctccatacaacacttgtcctacattattctgccctggacatgatatctgtttgtactgctcttctcatcctccttttcgttttcttttcttttctctctctcacacgcttccttatacccatccctagatcatgttgtatctattcgttcatctctctctaccatgtgattgttctgaaccgaacgagagtttgttccacagaggtacatcccacttaggcccccctttttttttacataactgttccgctcaaccgagacgaggcgacagatgttgaaacttcatgcttagactttcggtgttctcattcgctcgctcgttaatcaggcacagaagaggtatcaaagaagaagatggagaagaatgattctatatggatttgatcattaaaaaaataatggatggatggaatggaagatgatagaagaagaagcagaggaagtaaagaagaaaaggacacagtgaagggaacacaacacaacacgaccgtaaagaagagatggggaaggaaaggaaaagaaagaagaaagaagaaagaagaaagaaacccgagggaaaccggaagactagtactcgagatgagcagcataagaggtctatagattgaggaagtaagaaaaagaaaagatctcgaagccgacttcctgtcctctttgctccttcgtcttctttagatttttgatcgcaacccactgccagcctgacccacggcgacgacctgatcgaccgtacagaccgaacctctgtactctggcaagtaggacgcttgcgagaacagactcttgaccacgggagaacccttgtagatgggtgtgagagatccggcacagatgtcaaactctgtaaagtgatcgtaggacgtctcgagagtgtcttgtgggtttcgatcgccttgggtgatgatcgatcgagcctgtagaaagcaaggatggaaaacaagaaagggagaggaaacccgggaggtcagtttttttactgcgagcagagaccgagagagagagacgaagagaaacgaacctgagtgacagccgttgggttcgtagggttcaaggcaatgagccgtctggcaaacacagcggcggtagcgtagttctgagccttgttccagacagacatggccgaccgaagggcgagctgaagatggatcggctggagtttacagttggcaaagtaagcggccagctcgagttgccgacggacgttttcgggctcttctttcgcgagtcgtcttcgctcgatctccatggtcattcctaggatgtattctcgacagctgtcgatcacctctcgaacctgctggacctgcgcatcggtgttgacgacgacgagcatcatcgactggaggaccgatctgaataaggtctcggcctctgcgaacttgccctttttgacaaagttgtaagcctcctgaaggtcggtctgaacgatgtggttcaacgaagatcgaacggcgggtaggatgtcgttcgtcgatgtcgtctgtgggttccgcctggcgtagagctttatcgggtcgaccgagccgtttccttggatgtacacatgggaagcttggtaggtcgaaaggaagagcggcttgaggggctcaaagttgacggccgcgatctgctggttcaagagcttcatggcggtctcgaacgaaccggcggcgactctgtcggccgccagaggcgagttccggatccagatgtcgtactcgctcgtcccggcctgagtgtcatcctccgggatggcttcctcgacctcggcctcctcggcttcggcggtgtgatcagggacgtcgttatcgagatcccaaccctcgccttcttcctcgtcgtcctggccatcgtccccgttcaacgggttgtccgccccccaggcgctcagctcagccgcgccagccgtggcggcctcgttgctggacaccggcagagcgggagcggccgagccgccggtgagcgttctggcgaaaaagttctcacccgtcgacttggacggccagtcttgtcggaacgactgagtgatcggcgtcgggggagccaaggtggatcgggtgaacgaacgcttgggcacatcctcctccgtcatccctgcgttctcgaggatcccttcggccgcctcctccaacccggcggtcttggcggcaaagtaggccaaggaatccatcccgacctctcggagcacgttcacccgttcctcgacgtctcccaagtagagagagttctggaaccgggccatctgatctcctcgcttgccggcgatggtctgcatcatcttgagtctctcctggttaccggtgatgaggtagaggaatgagagtcgatccaagttctttgtcttttggtaagcgatctccacgatctacagacagggtccgaagggatattggaaaggataaagagaaagaaaaaaaagaagaaaaaaaaaacagagattctcaacattagtcccaacaaacagttgaccatgagggtttctcctcaagagagaggaaagaaaaaacatgaagaaacgaaggtcgatcgcaccttctgagctccctgcttgagagcctgttcggccagtctgacccagacctcctgcttttctaccgcccgggccatctcgagagcgacgtcgaggtttccacactcgatcgccagatcaaaccttgtgctctgatcctggacaaagtgcagggcgatctcggcgtagcccttcttctggaggtaggcgatgatgctctgaccgacgaggttggaggttcggatgatctgtagcatctcatcaaagttttctttggcgagcgccagcttgaatcggtactcggtcgggtcaatctcgatcgttcgaggtcgaccggctcggtcgagacaatggacgatctttcctttgatcctggtcaggtagattggctgatccagggtcttgatgattccggtgtcgctgtaaggtataggtcggatgggggtttaggaagtagcaacaagttgaccaagaggtaaggagagtaaaaaagcacacatcagcttcgaagctttctcgcgtcttcgtgcaatcaaacagaaagaggtacatacccagaggtcaaggtgtacttgatatggttcaacgtggtgtagaccaagatacctgaatcgtcccaggcggccgacttgattctgatagtctcgtgaatcatgcaagactgatcgagactcttgttggcgatcgtgatggctgatcggatggtggtcataatgatggtgatccgacatccccgctttcgtcagctcgggaacagtttggaaaacaaaacaaaaaaaaaacaaaaaggaggaatagagaatagtagaggaaagaaaagagtaggagaactgactgtgcttgcccaacaaggcgacctggctgttatctgcgttccagatgacatacttgatcggctgggtggtcaactcgttcagcactcgctgctgctgcaagtcaaagagcgagatcgatgtgggtccggcgaggaggacacaggccgttccaccgtagaagatctctctggtctcgaccgggaccttgaaggatttgacgattgagaatgaaaggtctctgatctcgatggtctgttggagagaagaaaggcggggagggggggggcggaggcgaaagcgatcgcgcgcaagacgtcagccggagagttagatatttgagaatgaagaaagaagcaccgggatagatgagaaaggcagaaaaccagcttacctgggtggccttgttgaagacggcgaacctgtttcgggcgacaaagagcatggatgttccttgacctcgcttggcatccgtgttggaatcaccgacgataccctcctgtggcagtctgaaaaagtcaaagatcccaccgtccgaggcctggaatgtacgcggcacgcaacagacgggcaggcagaccgatcagtctgaatactaggcgacacaatggaaagagaacgacagagaaaagaggagaagagcgcacctcggagacaaggatggacttttcggcagggttgtaactcaacgtgagggcgggcgagtgtgccggtcctagtttcttgatgttcatcactccgatatcggaaccgttgctgagatcgtgaactctgacggttttttcacggacgtagaacagtttctcctggtacagactgaaagctggtcgttctctctcgagcttgaagacgatgactccgttgtcatgggctgtcgggcagaggcacgagggagatggagaaagagtgtgatcaggatggagaaggggtaaaagaaaaccaaagaaaaagacaaaagcagagggacgaaaggatccacataccagcagcaaagaggttcaactctgggtgagcgatcaagccccagaaccgatcgtgttctctcctaaacgtctggacgggcgtccgcttgcccatgtcccagatccggatcgtcttgtcctcaccggcagagaggatgagctcgtgcctgggatggaagagtccgacgaggacgttgttgaagtgacctcggcaggtgtcgacctcccaggctttggtgtccgacattcgccagagcttgatctgtcggtcgtccgagctcgagacgatcaaaggcaacgtcgggtggaacgaggcccagctgggtggtaggaaaaagagatgcgagagcgttcagctctgttttggttcgctttttcgctcagacaaagaaaagaaaaaagaaaaaaaaagataggaaagggactgactttactccacggtcatgtccttccaacacgtatttgaccacggcgtcggtacttccgaacaggtcggcctgaccggcattcgcccgggccatctgctcttcgaacgacatcggctgatgggacgtgtttttctttcgaagaccggagatatcccaaaccctgacggtaagatccatcgaggcggagacgacaaggtcctctttcgggtggaactgggcacacatcacgtagtgattgtgtccactgaatggaggggggaagagaaacaaccggggttatagagagtattcggaaaaaggcgcgacaggatgtgtcaacgggttgatttctctcgagaaaagcataggcagagggtagatctgatggaaactcacgtcaggatggcaatacagtttctcgactgccagttccatattctgatcgtttgatcatccgacgcagagatgatccaggggtactcatggtggaagaagacggttcggacgtagtcgagatctggcagatgttgaacgagggaaacaacccagctcggtcagccgagagcaaagaacggggaggcaggcagagaaagagaaagagaaagactgacggccgttcatggtgaacaagcacttttttgtcttgtagttccagaccttgatcttgtaatcatcagcggccgaggcaaagattggctgggtcggatgaaagcagatccctctgactgggccgtcgtgttcttcgaaccgttcgaccagggtacccatctggtagttccatagctggatcgttccgttgtgaagggacgcaagcagaagaggaagctttgggtctgtgtgaataaaaggaaggataggtcaactcaatggttctccatctgagatggacggtcgagagaaggtcgagaagaaacacgaacggaaggcgacgccctttactctgggagatttggactcgaactagcggtcggggggggggacgcgaaggttgacgacgaggcagcagtaggaaggccaagaacacgtccaaacgatgcaggcgatgatgaacagaagagttgagagaacaagaacgaaagaagaagaagaaaaaaaaa

SEQ ID NO: 1355 - DNA, 399 bp, Xanthophyllomyces dendrorhous
aagaagaagaaaaaaaaagcggagagacggtcagtcgttcttccttgggctgggagttgatggatggggggggggacatacctgatcgttcggaacaagcacagatggacacgcatgccatcacacaagcagcggcatcaccagcagcagcagcgacgccgacacaagcaccaacatcaacagaagaacatacacaacacaacacatacacacacgcaagagagagagatgagaggatgaaaacagagcgtcagcgagtgttccagccggtctcttctgttttttctctactcgtcctgaccgcctctgccggggcatgcatcctgaacactgacctttgtgagcatgcgcatcttggagagcgtccgagtgaagcaagcacgggggcggggcgggggg

SEQ ID NO: 1356 - DNA, 1242 bp, Xanthophyllomyces dendrorhous
cacacacacacacacataggcagcctcagtcttcgtcttgttcgatgatggtctcgtagcctacaccgatccagtccccacagccgtcacacccgatcacgtccacaccttgctcgagatcgaccgtgcggatgacgaacaaagcggagcatcggcagggatacgtgtaatacaccggctcgtcttcttcatcgtcgtcttcgtcgtcgtcgtcttgctcagtcgtcccgtccgtcccgtcctccctggcagagtaatgagacgtaaagagggacaaagagatcaccgtccgtggattcatcggttgaggagtgttggtctctctgtcggctgggcgagcaaaagagaacgcgatggacgattgtatgaacacaagaacaaagtcagtacacatcttgacagtgaggacggggaacaccaagaggagaaagaaatcgatagaagaagaaagagagaaagaagagaaagaaaaaaggacagccaagatacgtaccggagtgcgagtgcataggtgcatcaagccgaccgagtctgagctctcgatcgtaggtctccctgccgagcgggtctctgagagagttccaagcctgggtgatccgatggatgtgctcgttgtgttctccatgtccgtccgagtcctggccgtgtttgtccggatggtactgaggacggccggcgagcaaagcaatggccaaagaagaacacgaacagagcgccatcagcccacattcgttctccacagcactaagcaagacagacagacaaatgaacaaaccccataccttcaacaccgcgttcctccaggcggatcggatggactgttgggaggcatccgagggaacgtccaggatctcgtacgccgtttgtggacgtagaggtgaaatcgtcgggaactcttctttttttgttttttctcttttgtccttttttacttgattgacgtaaggcgcacgaagagaacgccgaacgttaaacgctatctccgaccaaagagagagcgagaggaagcgaaagaagagccaaaccggatggacggttggggagaaacgcaacgaacacgatcccagagcgaaaccgccggctgatagagaaagcgggattcagtctggccattgaacggatgatgacatcctacaacacatcctataacacatcaacccacatcagcaccagccgttatccgtaacacaccatcgggccagtccaacacggacgtggggaacatacaacccatcgaggcgg

SEQ ID NO: 1357 - DNA, 19418 bp, Xanthophyllomyces dendrorhous
ttccttcttctcaccatcacccccatcatccatcgttcagcccatctcgagctcgctcattcccacaggcgcacacagcacacgctcgtctagatctcctcctcgttccagtccgtactttcgatcatgtccgctcctaatgtttctcccaagaaggttcgtctcctccgctttcttccgttgatcgagcgagatccgttcttttttggaatcgtctcgccttgttggctcacttgattctttcgtctctatgcccatcgtttgtgtgcgtgtgtgtgtgtgcatgtcgctcggatcatcctcccttgcctctgtggcacgctcggttggccggtgtatagagggtgctcgtcaccggcggtgccggatacatcggtccgtccatctgcctggcgctggttctctccttccgacaattcctagaagatactcttcggaactaacatcgaccgtgatctcgtctcttttcttttcctttgttttcttttcttttcttctctgctcttctccctttggcctgcctccactaggctcccacgccgtgctagaactcgtgctcacacagagatatcagcccgtggtgatcgacaacggccacaactccaagtcagaggccatcaagcgaatcgaacagattgccaaacaacaactcgggttcgtgtcctcggtcgaccatccgtacactcgttctgcatacgttgactgacctagatccttgcgtttgctcttgccttgatccgctttgtgtgtgtgtgtgtgtgtgtgtgtgtgtcttggttgatcgatcgcctcagcgatgccaacgtagagccgatcgataccttcaacctcgatctcacctcccaggatgcagtcgattccgtcttcaaggcctatgaggggaagggtggcatctggggtgtcgtccatatcgccgttcgtccgaatgcttccttggttttgttcttgtcaagctcacgttcgttagcttacccggtcttctctccgtctgcctgtttcccgcttcctcggtcgcccgagctaggcctggaaggccgtaggagagtctgcggagaagccactcaagtactaccagaacaacgtgtcggccacgatcaacttgcttgatgtacgttcttcttgtgttccatgtagaatggatagacatacacgagtacatgtcctccttaccctacttctagcccatcactcacgcctttccccttctgctttgccgtccgttgcccgttcagtcgatgcaacgattcaacgtcaagcacatcgtctactcttcctctgccaccgtatacggtactccggagctgatccctatcccagagagctctcccatcaagccagagagtgtctacggacgaacgaaagccgtttgcgaggccgtcctccgagatctcgtcagaggtcggtcgctctgtgtgtttctaatgaccgcaaggtcctcggtgtctgatttgtttcttccctcttttcctttcttttcctttcctctctcctttcctcccttctcctctcctctcctctcctctctacaggtgatccggagctcaaggctatctcccttcgatacttcaagtgagctccttccttaccgaccggcatatcttgatcttgtcactcgccttcttcttcttctttcttgtgctgaccttctttctcttccttctcttctactccctatttccgcccctccgtcagccctgcaggagcgcacccctccggtttgattggagaggatccaaggggaaagccgttgaacttgatcccactcctggccgctatggccgtgggcagatacgtcgagggaggactcaaggtgtttggagatgattaccccaccgtgtaggtcattccttgtgctccgttgtctttgtcttggaatcatctcgctcacacaagatggaactccccccttctggatctggaccgaaacctcaacaagcgacggaacgtgtgtccgagattacctccacgtcgtcgacctcgccaaaggacacgtcctcgcgtgtgacgcgctcgagtctcccacactcttcaaaactccggatctctccgctaccgcctcctcgccagccaacaggccggcgcccaccttggcctcgctcccgacctcggacgactttgcacagggcatcaactttagggcgttcaacttgggcaaaggaaaggccttcagtgtgctccagatcatcaaggcgatggagaaggcgttcggcacgacgttcccctacgaggtcgtcggcagaagggagggcgacgttccggacttgacggcagacccgtcgttggcagagaaggagcttggcttcctcgccaccagaggcctcgaagaggcctgcagggatctcgagaagtggcagaccggaaaccccaatggttcgtcccggtagtccctttggttgccatcagtcttcacatacgctttctcggtctttttgtacttatcagtgctcatgttttgtttccttataggctacgactctctctaaacggaggaaacctggcctcttttcacccttcccccttgctctgatgttgtctacacaaactaatctcatgtgttggcaatcagctccgctcgtctctctttccttctttttttctctgtttgcttctcctctgcttgcagtccatctatggtcgatacccacgtctagagtatgtggtgatttccatcatcttgctttttttcttgtcgttttcttttctgatctctctctctctggttcccatctgtcgctcgccttcactgtgttcgtcgtctcatagacatcttggaattggtttcttttttgttttcaaactttggtcgctttcttggatgtgtttatctctatcgtataatctttctcttgcttccttcttttctccagaccttttcttctgccgctcaaatgcgtccttcttcacagacgggtcctggtcttgtcttttacttatttctttgctctatcttgttcttttggtcgttcttgcttcttgttctatattttatgtcatcttataatgcacagcgggcagatcgtcgtcgtcgtcgtcgtcgctgaaataagaatgttcaagttgacgataatttaccaatcccctccggctaacgagattagccggcggcttcccgggtttctctccatccgttcatctttatctgggccgctgcctagcttgaacccgataacctactttcattccacccacgacatcaagcatccaagcatccaaacggattcacgcccacgcgtacagaccgatcaagtcagaaagcacacacccaacgcagagagaatgccgctgatcacagattccctccagctacaagagatagacgttaacgtgtttacctcgctccccgggatactggagaaaccaaagaacgcaagaggagtctttggcggccaggtcatcgctcaggccgtcttggcagctacaaaacgagccccagaggggtttgtcttgcactcgctgcatgtgtgtcttcttctctcatttgatccttgtcatctttccgtctcttggcttcccttcgtctttcgcttttgaaccggatgaagatcggctttcggtaggcttactgaagaaccgatggtttctctttcggatagagctacttcctagcagcagcctcctcttccctcccactcatcttcttcacggatctcctccgccaggggagatcgtacgccacgttctcggtctatgccactcagaagggtgtcaagatcttctatctgatctgtagtttcaaatcgaccgaagacggcgcactttcgttccaggttcgtcgtcctcgtcttcttgttcttgctctttctgctggtttggccccagtacgctcaagtcaacgccgtcgctgatatcttccggtactagatgaaactgccggaaacagtcccgagaccgtcagactgtgtgctcagagaggaccgtctgcagacctttttggatcagagtcattcctggccttcagccgtcagagtcactctacagaacgtcgtcaacgtccgtgttctttcttcttcttcttcttcttcttcttcttcttcttcttcttcttcttcttcttctctttctcttgattcatgaggaactcggtctctcaatgcccaccctttcttgccatcctttggccttcctctttcggacaccaacaggaaaggagggactcggcgatagccatcatggatgccccgctccctgaatcgatgagaccccaacgggcgttctggctgaaggtgaagggtattgaggtcggtgcgctggatcgtgggatgcagaaggtgtgtccttcctttcttgctgttgcgctttctccctttctcttcccttgttgcgtttcgattttcgcgctaggaaggacgtgtctagactgatcgacaccgatctcggaacatctcggttgggggtttggggtatttaaaatgatatcaataaaaggcggtactagcatatctgtcagatttcttgttcatcggaaccgcccatagaccgctagggatcacaaattccttggagcccgggaagggaaagtatgagcttgggatgaacgtctcgctcgatcataccatttggttctacgagtttcgtccccttccttttcttgttctcaatccgcgctctgtctatgactgctgctgctgctgatgatgatgatgacgacaacgacgacggcgttttcaccgatccgatgggatcaacagtaacgatttcgatacatgcaactggctgcttcacctgatggaacccatcgtggggggtgacggccgagcgacggtgcacggaaagatctttacagaacacggaaagttggtcgccgtgactactcaggaaggtgtcgtcagacctaaacgaccggctggctcatccaagttgtagtctcgtccgggtttagaccttccggccggagggatcggacatacatacggggatgcacacgatcagtgttcttccttcctatctttctatctttctttctccctattcttttcttttcttttctctttcgtttctctactttcttcgtggctgtcgttgcaaggcacgcgcatcgctactttcgttcctaaaacagcatgcaactctctccgtctccccccgtatggtcactctcgacaagcccttcggtttctctcttctctgttttctttttctttttcttttttcttgtggtataagagagcaatactagaaatacaacagtatccaagactgaacgaccccagcccagacttttccctttgcttgttcttcgatctctgtctaatcttcacgtaggcgctggctgtggaactgttcacatatgcgtatgtttccaaacaaacggccgacagatagagatgatgaaagaacgcaaacacacacatatgcaggttgtcagatacgaaagcaagtgctccaagacgaccgaacgacattcagtcggacgctgtcatcggcatacaccctcatcagcagggaacgagagaaggagagacgtacgatatccttcatctgactattcgcatcgtcgaactgtttctggagatactttgcctatcgaaaccggtaccatgtgtggatcaaattggccggataaagcacgccacacattctctgctcggtcagtcggttactcaaacgtaaatagaatcatctgctcttgctctaaagcgagacctgtcggacggaccttcttagttagattggtgatctcgtccgagagcgcggcttcttctgtcgaatgggcttcttccagtgtggatcttggctggaggaggaacctgtttgtatggtttgtttgatttcatttccgtttcgttttttgaatcgagtacagacgaatgatttcgtccgtcagtgtttcacacacaagcatcatgtgtcggccgggaagacactcattcgtgaggtgggtacgcacatctttccgacccctttgtacatccgaacgctttcctcactcggaacatcgcccagctggcggacagtcagctggagcatcttccgttccctctctttcgcgaggatctgggcgttgacgagcgagagttctttacgagatttctggagctgcacttggatttgttgaaggacctaaacgaagaagaaagaaacccaagccgtcagaacggacaaactcgagatactcgaccgattccaacgctcacacgatgaatcgtttcctcgttgagaccggacatgtcgatagagctggtgcgatgcttctagaacgatgcctgtatggtgattcttccgggatgatcgctcacagatgtcgtctctctgggtgtgtatgctgatggaggccaagggagaaaaaggaggtggatgcttaggtaagcatatatcacgtgacatacttcttggttacgcttggttacacacgctcttttcccactcgctctctctctcttttcgtctcgctcgtcgttccgctcactctcacctccaccaacaatcttctgtgtctctcctccctccaatcttcttggatctcacgtctcgcaaatggatcagtacgacgaggtaggtgtattttgtttgtgtgtgtgtgtgtgtgctttgtttgagcgtctgggtgtggtcggctgatcgttcgtcctatgtccgaaaaaaacaaatctacttcctggtggaatcttgatctagtttggaaactacatcgttcgttcttcttctacttctcttcttattctctctttatctcttacttcctatcataacgtcatcaccgagactgacctggtctctgctactggccgctaaacgcgtctcgctcgaacccaacaatcaatcaatcaatcgataaagggaccggactctgatgattctgacttggagagatccgacgacgaaggagtggatcattccgcccccgggccggttcctcaacagcagcaacagcaacagcctttagaggggtttgatgatgataacgaagatcacccgatggatggtgcgctcaccgttggactcagtgcagatggtgagtcggacttgttctctttctcgctctacgtatgatcgagagaatctgaaccgtccgagcttgttcatctacgttttcctccattctttcttgccctttctttcgcgtcgctttcgctacctttgctgctaaactcgatcttcccgacctaatcagccggaccggcaaattcaatcgtcctacacgaaaacaaaaggtattacaagtcggccgaggagacgtacggagaagatgtcgaggcgatggttcaggaggaggacgcccagctgttgtccgagccgattgtccagccagtgaaggttcggaagtacaacttggcagagaaggatatgccggtgactcgatacgaaaagacgtgagctactactttgttagatcttgtttgtcctctttctttctttccttcagactaagaattcggccatcgcgtcgtgaacgtcgtcactcgaaacgcgacggacgatcagcttcatgttagatatgcttcacttcccggatatgatgcgaaacgtcgtcgtcgccggacatctccaccacggaaagacctcgctaatggatatgctcgtgttcgagacccatcagatgacttggaacgccgaccagcctgtcagttcttccttctgatcttctccctccctcttttccctagatcctgtcgcttcctttgtagtactcaacgatatgatcacaaatctgctcacaggaacgatataccgatacccatgttctttctcgatcacgaggaatctctgtcaagtcatcccccatgtcgctcgtccttcagaccaccaagggtaaatcccatttggtcaacttgatcgatacccctggacatgtcaactttgtggatgaggtcgctgctgctagtcgattggccgacggaatgatcctcgtagtcgatgtggttgaaggagtaagcatttttagtttcttgtgctttcttctctgatcgcgttccataggcaaaagagtttgtcttcgtttctcgttcgtcctatctaaacgtgtctttttttctttttcacctcgcgcgacttcttcctttgccaaggtcatgtccaacacagaagacatcattcgtcatgctctctccgaaaacatctcgctcaccctcgtcctcaacaagatcgaccgattgatcctcgagcttcgattgccccctcaggaggcatactacaaaatcaagcatacgatcgaagaagttaacaccgtcatctcgtccgtcaacccggacccgaaacttaggttaagcccagagagaggaaacgtcgctttcgcgagcacacagaccggatggtgcttcaccctcggaagctttgccaaattatactcggatactttcggtacgcgttttcgctcggctctcttctttctctccttttcttgcaaacacagagcgaaccatccgagacgtacgctgaatttcttgctctttcttctttgcttcttcttcttcttcctcttcttcttcttctctcctcaatttctggacgtgttggatgatgatctcgaacgtgtaatgaatacggatgggggtgtggatttgtgtgggaatgcgcatgcatacgggtggtgatggtgaactcgtcttaacaaatcctaggtccccttgatgttgaccaattcgcgcagaggttatggggaaacatctattacgatgtcgaaaaccgcaagtttacaaaatcggccggctcgatcgatactccaaggtcattcgtccatttcgtattggaacccctctacaagctatacactcaggtatgtcctttctcatgctgcatctcactcgagttggttcctatgcctgatgaaagagcgtgttttgggtcggataggtcttgagtgaagattccgaaaatttgaaaaacacgctggcctcccttgggatcgttctcaagccagcgacgtacaagatcgatgtcaagccgttgttgaaggtggtgttggatcagttcttcggcccatcgactggtttggtcgacatgatcgtcaaccatgttcctagtccgaaagagaacgccgccaacaagattcagcacacctacaccggacccctcaacaccgacttggccgcttccatgctcaaggttgatcccgaaggccctgtggtcatccacgtgtccaagctgtacccgacatcagacgcgcaggagtttagggcgtttggaagggtgatgagcggaactcttaagaggggtcagccggtcaaggtattgggagaaggttattcgatcgacgatgaagaagatatggtgatctctgtggtggacaacctttggatctatgagtccaggtcagtttgcttcccctctttcctatctctcttccaggtctcttgggtttcatctttttgctcatcgccgttccccgcctcgtctgtatagatatttcgtcgagactgaggaagctcccccgggttgtctagtgctcatcggtggaatcgacaactcgatcaccaagaccgccaccatcgtgtccacctcgatcgaggacgacctatacatcttccgacccatcaagcacatcacacaatccgtcttgaagatcgctgtcgagccgatcgcgccttcagagcttcccaagatgttggacggtcttcgaaagatcaacaagtcttacccgctcgtgtcgaccaaggttgaagagagtggagagcatatcatccttggaaccggagagctttatttggactcggtcatgcatgacctaagaaggatctttgcagaaatcgagatcaaggtgtccgatccgatcgttcagttcagagagaccgtcatcgagacttctgctctcaaggtgtatgccgagacccccaacaagaagtaagtgctcaccgttacttttccagcgacgcattgtctggcgagtgcaaactgatggttggcttgttcgaaccttcacttggcaattaacaacctgcaaaggaataaactcacgatgattgccgagcccttggagaccgggattgcagaggatatcgagaccggtcgggtatcgatgaggatgactcctaaggagagaggaaagcactttgaggccaagtaccaatgggatctgttggcttcgagatctatctgggccttcggaccggatgagaacggaccgaatatcttgatggatgatacccttccttccgaagtcagtactgttcatttcgctcaaacccctcctcttcttccgtgcctgttttgtttagacatttgtcggccttaagcttaccggatcgaatttgtctcttctctcttctttcttctgacgatggggatgaacgggcaacaggttgataagaagttactgctcagcgtgaaggagtcgatcaagcaaggattccagtggggagctagagaaggaccgttgtgcgacgaacgtgagttccgaacactatcacctttatttatctagattcctccgagtcacgtactcagacagattcgcttttctcctatctctctagcgatacgcaatgtcaagttcagaatcttggatgctactattgcacaggaagctattcttcgaggtagtggtcagatcatccccacagctcgacgagtctgctattcttctttcctcatggtccgttgttgttcttcttatttcttctattttttctctttcctacctcgccttgtgtgctctttcctttattgactgtctatgtatcgcctggaaaacaataaaggcgtctcctcgattgatggagcccatgttctctgtcgaggtccaggcaccggcggattgtgtctccgccgtcttcaccgtcctagctcgtcgacgaggacacgttgttagggatacacccaaggctggttccccactctataccgtcaaggcgttgatccctgtgttggatgccaatggtttcgagacggacctgagaactgccacgcagggtcaggctttctgcacgcaaacattcgatcattgggctatagttccaggttcgcttctctattttctatcttttctctttccttgttctcctcccccttgcggataatgcatttttggttctgatatcgttgtttcattacgtgtcgttttaacaggagacccgaccgatacctctattgttcttcggcctttagagccagctactggacagtctttggctagagatcttgttcttaagacgcgaaggcgaaaaggccttggtgatggaatcgctgtttcgaaatatttggagcaaggttcgttcatccaagcaaatcaagccgactttgtttccccgaggttgctgatgtttatatccccttatcgatctcgttcaatctctttcactcgcttcttacagatacgatcatcgcgctttcagcatcgggcaacgcagatctcctcggttaagtattatgttttcatgcaacaaaaagcgaatgcacagggtgcccttcctcctgtacaatctcgaactataacttggtcactccttttcatccttcctcatctcttggaacatcgttccttcttttcttgaccttcctcctccgtcttgcaatgtattacaatagagaatgaatttactcttctgtactgtacgaacgaacaagctttctgtgtcgatcacaatttctggagcttcatcagtgtcatccttgttctctctgttcgctcatcttttagaagagtcaaggaagatgggttaaaagagcgcctttgagacgagacatgaacatatatatatcaaagttcatcctcactatcgctccccatgatgagttcgctcacaatctttcccctcttacctttcgtcctcctccctttcttatcaaccacaacttcctcgatctctcctctccagaccttccagtttttttctaacctctcgatcgtacgttccactcgttccgcccattcatcttctttctcggacgcctcgacctctgccaggtcagcaggctctatcggatctcccatccttccttctgctagaccgaggacacagtcccagagtgctccttccgatttgttcagattcgactgatcagactcgatcaggatccgatcagggttacagcactcgatcgtttctggaagattggtcaatcgggggatctttgtaggtgtccgtgttggatagagaaggagtggagatagggataggtatatgttgggatgttctttctgcggtttatcataaagatgaagtcggtttaaatgaaagcggaacaaacaaacgagacaggacagagaatcggtgcaagatctttctgtctccttcagagaagagaacaggattcagtagaagaacgtaaagacaaacctcaaggggcttccaagcctgccattttaacccacaactatgtatcagcaccttgactctattcctccaaacgagcctgtctcctccaaacacatccatctcccaatatctcagcgcatcctccacccaagacgtcactccgaccgcgtggaagctgactgaacgaccccactcgacatctataggtgtgctcagaatgatatccttcaagacggccatctgagcatgaaggatcgttcgttgatgctccagcgaggtgaagaaaggtgtcagcttcatccgagtcagccttgccatatctttcttttccttctcttcactctccaagtctaacttggtcaatgaagacgtcctaagggtacaggactggtttgtgatgtcctcatccgatcgatgcgcttccaaccattcaaccggaaacgggaccctcgcctttttgtctagaccgacttctcccagctgagaccctgggaacttcgagagattatccttcaagccagggaggagactcgatagatgcgtcgggttcggaaggtacggtaataagtcgtcaagaagcctctggtgaaggagcggtgatttgttggtgagaaagacagagctatagtgatctcgtttggagaaactcggactgatgggcttgagagagatctgatgggtcgtccatgggtgataacctgtcgagaagaccttttcgagccatcaaacacccttctcctcttactcaatcatccttccatagccaatgaaacagattggctcaccgaaagaaggaatgactctatttccagctcctaccgctagttcgaccacctgctgttgatccttgaaatcagaactcatcgccgtgatcgagccaacattcaatccctttagaatctctagcgatccaggtgaaggcgtcgatgttgttggatggcaatgtgcatcatgcactgggtagtcggggggaaatcgacgcgatggtcggtttgtttggaaggtttcaccacgatcaacccaagcgattaatgaagaagggagaggtgagctcggtatccgtggcaaggaagaataggatgaactggtacaagctcacgtcgactcagaagtttaggatctggaccttggcttaattctcctgaacgagcaggacggtcagcgtagtcgatggacgggcacatactatagaacagccagtttgctttggctccaagaaagtaacctcaaccgatgatggttgatacatgggccttctggactagggtgttctcagaccacaaaccaccaaaatcgtataactcataggtttagtttgcccccgccgatgggggcagtgtcagcgtcggcatcagtcttagcgtcagcggcagctgtgttaaacaccagcacaattgatgatgcgaaagattgttctcctcacccgacttcatgggctttgccagctgttgagattgatgtctccttctttgtaaacaatttcgtttaatcggttcgactggctgtaagtcatgatgaacaacctggtggtggatctacagtccatagaccaaggcatatagagacaaagagaaaggaatgatatgtttgatcgagccacatgcagctgatctcagacatggcatccaaagtgttatgtatacaacagaagagaagagatcaagtctccctgctgaaagatcctccttctcctctaccgacacgtcgcctgagctcactcgttctcctcttctgcatgcaatgagtcatgtcccatctcgaacagatgatcagggatcgggatcccatgaaagttcatcacagcttgaacgtcaacctgagtttgaattccgaggtcagattccaacgaaacatccggatcattctgactatcctgtctatcctgctctattggttgggttagaccggaaggaatgacagacactgaagtagacccagatgggcgtgaagcatcagaaggagtcgacgtgaagtcgaccatctctgtgtcttctttcggcgacaataacgaatcttgtgtcgttcgcttgtctgcagaatcggcaactaaagctgtcgcttgatctgaggagacgatgtcttcttgagcagatctagtcgactggactgaacgaaacccccaaggagagcccgtcagaatttgaacatcatccccgccttcctcatgtttgacgtcaagctctggaagagtaacaggtcgagagactggcgacggagtgtccatcaccaatagatctagtatatcttcatccgagttcgttgtcgctttcttcttcgacttcgtcgtggtcggagtctgcgttagatgcgtggacggccttcctgctcctgttgtcgcgccacatggagaaccactcgcgatcttcttcttccgagactttttgttcggtaattcagcttgagaaaacgactttacttctaaggttgacgcccttgatttccctttcgataacgaagagggaccaccggcagagcctgttaaagatttaacatggggagtcgtgtgccgtactttggcgcccggctgttgagttctactttctgcagacaattcgccagtggatggtcgtctgacagccgcctgcgactgcgatccacgcgaaggaacagaagagaaagacgcgtcttgactcgactttgacaggtcgaggtctcccgatttctgagaaagatatcgacgcgattgggagcgcagtttagaaggagagacattcatgtctgggcttgtggttgaggtccgtggttgggactgtgattggagttgagactgtgactgtctttgggatgaaggtgagccggccggatgaggacgcgaagaagagtgaagaaaagacgaggtggaggtgacgatgatggctgccggtgcggacccagaagtcgacgagtcggcatggtatgagctggtctgctgagtgaagtcagacaacctaggcttcttgtgatgaccgagttgctctatcagagattctgttgctcatgaggaggtaagaaaacatgcagcagatcagatttctatatatctccctcaaatcgatacatccattcatccggtttgcattgagtagatccatcagaggaagaaatgtttctctgcgaattctataagaagctactcacctagtcctacactcttcttcccctcccctctgtaccatccatctcgaaatgttacctctaacgcgtctctatcgactgattctgaacgtttcagatgatcctcgacgtgtttctcaagtgagccaagcgtgagaaacgatagacggcagaatccccagcggcattgatgaaacgatgtgtctccccacccgctcatgttggttattagatgtgttcttgagagaaagattatgccctaaggcttggtgagagttacctcaaccgatgatggttgatacgtgatccttctagggttaggatgtcttcagaccagaaacctccaagatcccatgggtcacgtgttcaatttgtgccagcctcaacctcatcctcaacggttatggcaatctcaaattcagcctcactaaaaacagtgtcgaactctagcatccttgcctcctagttcttctcctggtgaagggctatatgcagcattttgcgcgacgcgtccacatctctgttccaccaagtctgagaacgaacagagaaaaacgatgagtactcgacacaatgtcctgaaacattctattagtgatgactctatcgtccatgaaaaaaacataaattgacaaagaaataaaacaaaacaaaacaaaacaaaacaaaacaaaacaaaacaaaacaaaacaaaacagaaagacaaggagacagagatgatattcttgatcgggccatgtgcagctgatcttagcggtgtcccgttagacgcccggtgtcaggtatacaacatgatcatcacagtggtcgaggcagccaatggtcttaagatcgttctcaatctctggaatgtattggctgagctgaacacatacttggatgcttgacttatcagactcatctcttcttctgtcagactcgctacctcaatgctgccaagtgttgtagatatggtgaatataagtctgagagtagaaattgatacaaaggatcaggttctgtacagttccttgtataaaaaccatatggcttcggttactacaaagcaacctcagccggtggtagtcgatacatgtcaatcaaccaagcgttccttgcagtctgtttgatccatgccaaagaacccttcgtctgccctcaactcgttcgttcccctctgcagatgttcgatccggcagctcgattgcttctactaattccgtttcaatccacttatcctgttgggttcgctcaacatcaatctcagtctcgagggagtggtcaagagaaattcgtgggggatacctcctcttgaggccttcctttggttggtcacgcgaagtcagggaacgaagggttgttttgatagaaagtgcagagagcgtgccgcctggaaaaaaggcatggtaagaagactgtgagatgtgcttcgagaagagaaaatactgactgtacgcaggagatattccagtgtcgatcaaaaggatcgctccatcacaacgagataccataccctgtacaacaaaggtggagagtcaagatacatatcgatatactctcgatagtcttagaaagtagaaacacacctcaaaattcggggtgtgacccatgacgagccttcggactccgatacggctcatgacctcctttgcattccgacaggcttctacatctggatccgtagcgtatcctctgtaccaaactgtttggggtgtgaatgtcaaaccaggaaggaataatagttgcgatcagtcttgagttagggattcttgatagccggtatgggcctacgtacgaacaccctctccaccccaaagatgagcttcgtctggtgtcaatgttgagggtaaaccggaataagggtagggcgggcttgggttcgcttgttcatccaatgctttccagagaaacgatttggctaactcattcagcgcttgagggtagggtgtcaggttcggtgcataggtcgggagaccggcatgaatgaaagatacggcctgtgccatgaagaacattagcatttggtattgccccgtaggcatagtgagagtgacctcaactgatggttgtcgatacatggcacttttggacttgggtgccctcagaccacaaagcaccaaatcagcaattgaggcaactggttaacgtacaggataaggagatgaggattctgaaccgagtttcagcggatgaagaggaactttggctgtcaaagagtagctatagactcaaccaaacatcagtaagaagtctaatgagcaagagaagggattttgctcttacttcgaaagccacatttttccaagctccccgcgtggcgaaagcgcctgtcgcctgttctgaagtccgtcgtatgtcttgatgtcatcatgtgtgacgtatcgccagtcacctgcataccacaatggaaggaaagtcacataaggatccggaccttagaacagtttgaagacaagacgaacccagagcgttcatgatttcatgattgcccaataatgataagaattgcccgccatttttgatagcatctgatcggagcgactccataaatctatagagctcgatggtgtcgtgtcctcgactgaacagctccttgtatcaggacggcatgtgttctgtcacaagtatcagggcgaacgagagagaagaaactcactcaacgatgtctccggtttgtacgagtgtaccattgccgagaatccatctatcctgacgatctatgactcctgccatccgaaatacacgcttggcggtaggtagagaaccatggagatctcctaccgcaatgatctggctaaagaaaattgggtcagagtcatccgctatcggctctttggcaaccggactgttggacggaagcgaggttgaaggggagagaatgaggagaataactatggctgtgagtacaaagagaatgaattgaattcttgtgatcataacggccatgtatgtctctatcgggacagatagagtgctaggttcagtgatagctatgaccgatgatggttgatacgtatcctcttggacttgggtgccctcagactacaaaccatcaagatcctatgggtcacgtgtttaccttacctccattggcaggtgttagagcgaaagctgggctgataacaggagggctacaattgaagtagccacagaaggaatctgaggttcaaagaaagaagctcaggcgcttggaataagggaaacaggattgatagaatcactaggtaacgaggacagaaggacgaggaagggtagaagtagaaagtagaaagtagaaagtagaaagtaataaagaaatcaggcttcagctatctatggacaactggtcgaggacgcccgtcttgtacatggttcttagatatcatgagctctgaaaggaatgtgcgcgcaatacattgcacaccgcatacgacacgtgggagacttgatacataagaaacaggatacgtgggaagccagagaggaaggagagatgagagtgaagggtctacgggtcagcctgtagaatgaatgatgctcaggcaacatccttgacagtaatcctctaaccctaacttctcgtcacacgtgactctttcggcgtgacacagtcacgtgatacgtaaaacttgttttattctcaaaaacacattttgaaggagtctacaatgttcccttcattcctccatcattcactgtttcaatctctttctgaagagtgagtcttcaattctttaaacgaacacacctatctttcttcggaggtgaagccaaggctctttgaatgatgcatacgtctatccatgacgctcaatgaaacaactagtcttgcacgacgatgatgttctcatgttaaccatctttcgggactgaaactcgagctcctggttccctcttcctccacttcccatctatttattgctgcttctatctgttttattgtgcgtttatccaaattccaagatctttttcactgactttttttccctccaaatattttgtcaacgaatgtagatgtcctaggttttatgattttatgattctatgatttaatgagctttcctgtcacgctggttacacagccaactgtcgcaaatgtaacattatgagcgtgtacttgagatcgttgagagcacgcgtcacaagtttccctccctttttttttttttttttaaa

SEQ ID NO: 1358 - DNA, 2024 bp, Xanthophyllomyces dendrorhous
tttttttttttttttttacttccttaccgtcccgccttcttttcgttgcttgtctttttgtctctttcctgttcccgctttgtgctcttgttttagctttttcgtttcttccgtcttcttggcatcgacccagtgatatggaaggttggacccacaaaagagatcatgaaaacgtgctctgtccgataaattgatgcatgttcagtggaatagaccacgatcgagaacaagattgagaaaatgaaatgataggttaacattcatccattcattctatccgggacatcatgacgaaacggagacggttgtactcgtctttttggtcttttgagttttcttaatggtttctaccccttcggtgatttagcatctcaccaacttactggatcaaactgaggctgaggcgagtggccggccgatggttgtggctgatcggagaggaataggaacgagatggaggtaactcccgttgcgcggactgaagggtcatacagttgtcaaatatatgctaagattcaaagacgtggcgttttctttttttgtatgtgcgtgcctctttgttgtcagttaaggaaccgatgaccaagtcaaaggcacgatgatcaaacaggcgagaaggtatggagggtaactgagcggcggaatcaattcaagaagccgtccaccggtacagatagatgaacaaccggccacccaacatgcttttctcaagatggcgcatcaggtcggttcggacgacagatgcgtttttctattttgccttaatcgaatttgacttgaacattacgtaacgaatgaggcaatcattgtttatttatcggttttcttcctctcaccacttttcttttgatgtttttttggttatagactaaaaaagcttatcgggccggatgatctctcttagtgcgttttcttgcagaacccttttctgcgctaacatcttgtttgcccgtttaatccttcccgtcttccaagagcctttcgtcatcattggccgcggttgtatatttgtatgtgtgcgatgaatacgtgtgcatccttttattgcattgcgctccactcaaggactgttctcggaagagaggacgatcgagaactcatgattacagttgaggctgcctcaatggttttgtgaaactgagagcgaacacgtcaaggggagacaaaacaaagaaggaaagacaacgagtcgagagagcgttgttgaaacgctcttgaactttgaagaaacgaaaaaaggaggctgagtaaaatggaagaggacagcacttggtggtagtccgcgaattcagtcctaaacccacgcagggccaataaagcccgatgcgcccatcagtcctcacgctgcttcggcatatcccctctgccctgggtacctctcgtggtacctcatcccgcattccctgtcaagtggcaaccacgtcctcttgctctcgctgatcactactgagcgccctttgtttttatgttcggtgagcgccgccccgaaacgtttctggagtgctggtggtggtcggagaaacaacaacaataacaacagtcatcgttctcatctagaatgagcataccgagagagacccaaacgtaaaaacgcaatataccaaacaaagggagaggtacccacggcgtgcgcacctatgaacggaagcaagcacgcacatgggattcatctggcaaagacagtcaactcaatcctataaagcatcgtcctcacttgtactcactcttgctctctatcccgcttaacgtccttcaaagtcccttcgacctttcctatcaaaagccatcttaccctttcttttcctttcctctcttctttgacactataaaacatgatcttccctaaggccacccttgttacacttgctcttgcctccttggccgctgccgctcctatcgcctctgttgatcccgaggtacgtcatcgttcatgatcgcgacgaatattcaagcgcaatgttacatgaccaagctgacttgtaatgtccgtgatgtcatatcgatagtggcagaaccacgccgcc

SEQ ID NO: 1359 - DNA, 19399 bp, Xanthophyllomyces dendrorhous
agtggcagaaccacgccgccgacctcaagcgagacgtgactcctgagtggcagaaccacgccgccgacctcaagcgagacgtgactcctgagtggcagaaccacgccgccgacctcaagtaaatatgtagaccaaaatctgttcctaagaatatgtcgttgtaattgtcagtcctagcctgttccctatctccgtcttaaatacaactccaactgaccttgatctctcaaacactcctgcgcgcgtagagcaatctgcttttcatcatgtcgggtctttactcgcctcttgcattccctgtttccttcttctatatagcctccaaactctgcttattgcctatttccggagtcgttcctttgttgccgttctgctattatctattcgttcctggtgcctgagtcttttgagagtgtcagaatgcatctcttctgaaaaacctttgtcctatacactcctttccttccaccattgctccttctttactttcgtttcttctcatttatcacccccaaaaacatattacctgccctattcgttcgtccttttgcccctccatacctttatcacttacctttgtatgaaatacctctttatgacactcttccgttgaattgggcgaatcagagaaaccaaaacataaacaacataaatatatcctttgaatttagagaactaacatctagagatcgtcgttctcttcctcgtcgatacagctttcctcctcttcgtgtactgattcaaatcactcgctttcgctttcgcttccactcacgctctcatcactataactcatatcactcccgctctcgcttccactatcctcatcatccccccctaggccggagagaacccttcgttcgacagcatacccgaacgtctcgaacgagtttgcgatctcttctgctttcccaggagcagacgtacaagcgacaacagagcttgctgggtcaaatatcggcaagatgtatttcctaagcgctcctagaatctcggatttggtcaccgactttgagaatacacacatgaagttagttcaaatgaagagacgcaaaaaaggcttctcatctgataacgctctcgggtttcaaattttgggacgaacctgcatgcgactcaaaagatcccttgaagaagaacgcttcaagacttcgttgttgaacgctagactacacgctgatgagagagacttctctttttgcgcgtatgcgaacacaagggatgattttgcggcttcgacgatgttcgaatccagtttgatctagtcatccccaaaaagatgggaagaaacgggttagtttgaggagaagctgcgcaaaaaaagacaaaagagagagtcgaaccgtctcatcggctagacctcgaataacacgagcaccctcctcgaaagctttgaatgcatcgggagactgaatatataccaatgagtaagcaaaagtaataaaattgtgagcacgataagaaaaaaggatgaaagaccagtgccgttgtatcaagcagagacagacgaagccactcactcggtagacataaaaaccaacggtgccggactcaatcgacagcgttactccacaaccgtaggcgaacccggcacctctgatatacttccaaagataactttccagagcattcaatactgctttcgtcacttccaaactcggtagatcggggtgatcccatccaacgacgcccttagcggtgtgattggagtaactgccctcgatactgggcaatgtgacaaggacggcctacaaagtaagtggaatgattggaaaaaaaacaggttaacgggttgagcaaatgaatacaagcaggatgaataaaagcagctgtaattactgatttcgaaggcgcctttccaagaggagagagagcatccttggaccaagggacagcgcctaattcggatttctgtttgaaaatgaggaagtaagaacgttcgcattcagattacgttggcacaagtagcaagcatatattcgacgaacaggcaaagctttaaagttcttgagccagctagacctgggctcagagaggttcaggatgtctcccgagacagctactctcaagtttcgaggagcagtgactgtgtcaacgtcacatacgtaagaccaaagaggaactatcagttcccatgaactactgacgtcacagttagacgggagaagaaagaagaggaatgttgacttactgatttctctgaacttctcaagatccctaatgacactctcaggatcgtccttcagtctggtagctacttcgggtaagaactccaattgcctcaacaacccattggcgacactcgtgctcttcccctcatccatgatcatcctctccgacacactcctcgcgaccgagcttccgtccctcttctgctgaggcaattcttgaacaagcttcgcgatggtgacctctaatcgatccttgacgaatgtggagccccagataagatctcgaatccaagcgatagtcgaaccatactggtgcttctccactttgatctgaattcgtagcagatcctggaaagcaccagcgcacccataatcggtgtagtactgaacagtttgacttatgaattaaattgaaaaatagcatgtcaaaattcacaagtacagtaagctgacaagattcgagatatagaagaaaagtcgacatactcattaagttgattaatcacatcctcatgactcaactcggaaccgttagctcgtttgataggcaatgagaaaaacgagtcttgccataaagaggcatacctgtcgcaacacgaacaagtgtatcagcatcggaagactcctttgtttaccataaccaaagccagtcaactcacggtcgaagatccgcaggtagatcagccgtagagagatacacattcaaggtaagaaagttagactgaaattaagttgaaaacatgtcagtacaatgtacgccaaataaagttacacatgaacgaacctggagatgactaaagtgaatgaaaaagggaagattttccccgtcgaaagcaatgcactcttgaacttggcctttcttcgaaacctttccatcgttgacagcagtttcaactgggatccacgaaatgctgttgacctaccgacccgtcacgagaggcatgaggagagtcagttggtgactcaaatgcaagttgacaaagacaacgaccagatgcttacatttgggatctggaaactttccaagatttcctttggaatttctctatcgttcgctgctttggccgccttcagctcttctcctttctgcctgagaccgtcctcgcctaggtcttttcgttgctgcttgatacgttccttctcggccgtctcgaccttagttgccagagcagccgacggcttaccaatgactgtgattgaaggagcagatgccaggtatctaaacgaggtcacgatgttcactattgagggtcatcctgatctagagagacagaagccgatgggagagaagaagaggaaagaagctagtcacttacttgtcgaggaatgcagaccagtcggtactggtccaggattccaattcatcatagtgtctcatgaagttatgggattcctgtagatcttctccgttagggtttccataaagaagatctagaacgtcgtcatataacatgtccatgtcagtatcaccttctcatcctgactagaacacaattatatagagaggacctaccacttatgacagcagcatcaataatcccctctctgatttgtcgggaatgacaacacatgtaccaagttgactggatcagaacaaggtcgttaacaccatagaaatgaacagaaagctcacggtttagcttcaagattgtgtagcgtctgtctcttctctctcctaaagaccatacccatcctttccatgtctataccttccttgacaatgttctgaaggaccttcttcaccattccactcatcttgtccaattgctcggcgggtacgtccgagagatagaacgccagttcgttaacggctacccggttgctagtgtaaagatcgattgatgtacataacggttcgggaatctctacaaattctttgttcaacggcgcaatgggcgagtcggtcagataagtagtcaaaactgatttttggtcccaataagaaaaaagagtgttcagtaagctttctgtgtagatcgaacacaaggaatcatatacggaccatcaatggcaaggttatcaatgaggttttccctctttactccttcaaacccgatttggacctctcctacactctcatctgcctctagaaattcaactacttcttctttctcttccgaagaccactcgacgggctcctttgtacttgtctcgaggaaaggccgcttccagtcagctggaggaaaactcggcgtcttggagagaatgtaaggctcgacgatttcattcagcgtatgcaggagtgaagggagtgggcaagaggaaccggtaatgagtaagtgaagattgtgagggagatagagagacgagtgatattctttgacttcatgacagcacacgttgaagattgccagtcagcatacatgtatacacaactgagcggaagacagacagatgagatgattgacttacttttctcgacagtgaggtccctaagtgcgcccattagacctccggtctcgcttcgataggcattagattgaggatacatgatccgttgcatcctagagatatacgagacagagccgagcgataacccgattagatggcataatttacgaagctcggttatgtttgactcacttgagcgccatcagatccccacttccattttctcgagcctgcatctctgcatagacaactccagcgttttcacccttctcattgacatggtgaacttccgtgacgaagctttcttttgtcaaagtcgggtagagaatatgatcaatgtaaacaggaagtagcttgagaaagccttcacctccagcgcaagagattgtataggctgtcatttgagtgtgtatcgtagtacattttcgaatacatgcatgttgtgttgtcagtttctggtagatgaaggtagaggaagatgaaagaatagcgcaaaccagtatgatcattgtcggtccatgcgttggttccatcggcaaacgacttatttgctaggttgtccaggatccccttgtaagggtagctcgaagatcccagaaagatgaggtgctctagggtatggggtcgtccggtactacataggagaagaaaaaacgaggtatacatcgatgcataatcagactcgttgatcatacatgtattcacttctattggcattttgggtcaaatacgaactcatcaaaaatctcggtaggctaacagcaaaagaaggggaaagacacgtcaatctggcaagctccgcttatactgtcaaacaattataggctttcaagacgatagagtgtgtgcgcaccacggtgaatgtcccgtttacgataggtccaggaacaccagcccaggtaacggatagaccggtctttgtcgatctccatttttgaatcggaacagtggaagaggggggagtaaacgatctgactgatctcggtcaagaagcacacatatgattccaattcaagatacgggccacagtaagccagtcgtgcacgtacaacgcatgaaaacaatggttctgatagatttacataccaagttcataatttccatagacagtctgcccttcctccatgggaagaggagtcgtggtgggctgagtgtgaagagacatccttttgagcggtgagtagggcgtagaaaaggaagctgaagaaaacgatcggatgaacaaagtggccaggtaaggtttagtgtgttggagtttgaaatttctgagtgagtactggagcatacaacagatggggctcaaataaacggatctttgattgaaagaatggcctgatcgctcggagagtcggtcgagatggtttgacagaatgttcagatgactggtggaggtagcgagatcaagacgttataatagagactacaaatatttctaatcaagtcagagtgtttgatagttcgtgacttttaggttcccgcgcgacgagaatttgactgtgaagtatcacagtctggactacggcattttgtactgatgagagaagctactgatcaaaaatcgacaggcagacgataggcaacggtccatattcgtattcaaccatcttgtaggtcaattactgatcgataaactcgagagagttcaagttgaaaccaagagttgcatacccataacacttgttcgactcaggttcttctgtgaaacaaagaaaaaagaggttctatataacgagtgatttgagtgggagaaatatcggactaggatcatcttatgattaaagagaaatcaagtctgaagacgaattaagcacggacattcgattgacgagcagcgacggcgaacaagaagttgaggttagaactcgactggactgatagagaattgatgttgcacacagctagccagaccatcttactgttcggaacaaaaatgggagaatcaaactcgatctacgcaagctaagagtgtgatgtgataagataacagcaataagagtgtataaatctctcccaaagaactttccaaactggtcgagcaaagatgaaactgaggagtttcgaccaagattaccattaacacaagaatacaaccgtttactttgttctatgtaagaagagtgggaagaacactgtatagtcggcagaaagaaagataatctctgggcaggctgagccaactcattaagaaaaatgtccatatcgaggtcacatagagaacagcttctaactcaacagatatatcacctttgcttctgtctcacctgaagagatatctttgggtttactctactttcaaaggtataatcaggaaaggacatgtgtgctgccatcttgataattctctttcgatcgcttatcaaagcaaaacaaagatctgcacgtgacggctcaaggcttacataagtacatcacgtgatcagggctggccctggcccaaattttttcttacagtttacagagaaatctttcttttttttccactttccttcttcaaaccagtttaggtctttttgcactcgacctcttattcttactttcttgtctccttcccctcccccctttacttcttttattctttaaaaatggctttcggaggttagttggcttgttctcccattcaatgggttgtttggtttgccgagatcgctaacttatgagcttttgctgctgtgattttccctccacaacttttccttcgcaacttttcgtcttcaaataaaacttcttaacacatacaattctttcccgcttcatcttccccttcctcaaacacccaaaatctaaacagaacgaggtggacgaggtggtggacgaggcggcttcggcggtgatcgaggtggacgaggtggaggacgaggtggatttggtgcctccggaggacgaggtggaggacgaggtggctttggtggtgaccgaggaggtcgaggtacgtttatgactcttcttccaatattcttcccaatgaattatcagcctgatcttgtacttcgttacaactcttttctcctctttatatcttggactcgtaaaatttaatctaccactcacctcacattcaactctcgacctttttactttggcaatcaataatttacaaatgactcaggaggagcccgaggtggggcccgaggagccgatcgaggacggggtggccgaggaggaggacgaggaggagcccgaggtggaaaggctggtgtcggcgctaagggtggagctgctgtgatcctcgagccccacagacacaagggtgtgttcatcgccaagggcaaggttcgttttaattctcttttcctcaacgcgcctagtttgttgctatcaacgcttctagttctaatacctacgctacatttcatttatctaggagcacctccttgtctcccgaaacttggttcccggagagtctgtctacggagaaaagcgaattaccatcgcctcccctggagaggatggtactgagaacaagaccgagtaccgagtttggaaccccttccgatccaagttggctgccggaattcttggaggtctcgacgagatctacattgcccctgggaagaaggtgctctaccttggagctgcctctggaacctccgtctcccacgttgctgacgtcgtcggacctgagggaaccgtttacgctgttgagttctctcaccgatctggtcgagatctgatcaacatggccaagaagaggacgaacgtcatccccatcattgaggacgctcgataccccaacaagtaccgaatgcttctctccatggtcgatgtcatctttgccgatgttgcccagcccgatcaggctcgaattgttgccctcaacgcccatcacttcttgaagaacggaggacacatcgttgtctctatcaaggcttcgtgtatcgactctaccgccccggcagaggctgtgttcgccgccgaggtcaagaggatgcaggctgagaacatcaagccccacgaacagcttactttggagccctacgagcgagaccacgccatggttgttggatcctacctcaggcacaagtaatcgtcggtgacacttactttgaccttgctttgcgttgttcctcacgtcctgtaaactttcctcttcccctccccccatctccccggtgatgccctcgtgagggtgttccttcttcaccctatctccctcggcctgaatcctgcgctctcgccaagctctgcatttatgttttcatctttcctactcattctctttcgttctttatctactgcttttgatttctttatttttcttttcttcctaccaattttttttccggaacgcacaccctttttctttttggcagttggcaggcgggtgtagaatactttcacgatcaaaaacaggaaaaagggaaggaattcttcatgtgcttttccccctgacatctaacaagttgtgtccgcaaacgcatcatccttcctcttggcgaatatttctcccctttcttttgcaagaaccagaataagaatgaaagagttgcctccgcagaccagcatcctgacccactgagcatgtagtaagtatactttgaaagacagaaagagagtttgtttccgagctttctattgccacgttctgtgtgtgtgtatgtgtattttgtcaagttttcttaacgtgtttccttcgattagctcccgaagaagggccatcaaggaatgtaaccatgtaaagaatcaagacgaatgcgcagtcaaagcctatgacgcaaatgttcgtaaaatacataattcgtggtgtgcccgtagtccactgtctaatcattttgcttagtgtgacaactcaaaccgtaaccaccgtctcagtttcgctctcgctctcgctctcgctcatcctcgttcctccttcttgttcttctctcgtggtaaacggctttctcaccttctctcttctttcttctccatcctttcttctacgccttctcattctgtcgattgatcagattctagtcgctagggcacatactctattcgatctggccagctctgtttgattggtcgactgtttgtccatcagttcttacctttctcgacaaacaggctctttccccttgtttttacccgatcgccctgtcagtcgtactctcaagctcggttcgttattctatcccttctatatctcctgctttgcctcagagtgtcaggtgtttgtgtccgttcggctagaagctctgcttgatctacttcgttagtagctttgcttctcttcttctcctctgacatccgccaaagggacttgatcgctaaacgtaccgcatccgaatcttctttcttgacagccatcagagaccgatcctgtacccgacccttgatccaattttgttcccttccccctctattccttacttacccgatatcttttggtcatctcatccacatcttgatatatctgaattcggtgtctcgatcatcactttgtcgctcctgcggttaactctcaaagttcctggtcggtatatttctcttccaactcatgaagatcataaagcaaagaaagaaaaaccgcatgttactcactgtgtctgctcttgtattctctcgttcgggattatccttgaaaacacaaatagaaatcttggcgacccgatcatccggtatattggtccatctgtagaatctcgacctaatccgtacgtacctatcacaaccctcctggttgactctcttctagctctgtcgtccctttcctcttcgattcgtagtattaggaaaccatctaatctccttgctgccctttcatctggcgcatgactgcatctcgtctccgcattcgaccctcttgatctctcctccatacgtacttcgtgatggataaggaagatgcctcagtcaagacctcgcaggacatcgttcagccagtcttcgggtggcagtcacggtagtggtggctcctgtgctatgggttcgtcctatctgcccttttcatctctcttatagacctaggagattcgttatgtttctagactctttctttttttctttctggtgatctcaagctaatactatgccttcaaatccctccaacgcgttctcaggttcagaagccacacctcctcatgtttcctacaacgcttacgcccaaccaccactctacccagttttacccatctcgtataaggattctgaaacaaaccagaacgcccatacgccgacgttctcatcgtcatctcctaaatccaactctcccatatcttcgccttccttccgagctttgagccctcgaagattgtcgatatcaaactcgccggatgggttgtatccgttggaaccaccgctgcctccaccagggtttcaaccgccggtggcatttaatccggccgcccaatcctatcttcaatcttcgagagagggtgaaagtagtggtagcccatcaagcgagcagtcaggaacaaatcgagaagtggtcgagccaagatgttagtgtcccatctttctcttctgttattcgttcaactgtgctgacaatttttttcaaattcaatagtgggatcgccgtctctgacgggtccaacaagctctaactcgtcgaccctttctcaatctcagatccgtctagctcaagcagtgtcagctgcccgtcccatatttcgaagggcgagttccggctcatcggtgtcatctaccaagtctaaccgttcttctgcagacaaaaattcctctcactcatcacccaatctaaaacattcgaaacctttgcaatctgacaacgatgggagcagtggcaccggaccctcatcatcgaccggcgtacaggaaacttcatccaccctgtccaactctgtccatccaccgatgtctcttcgattgccctctactctacaaagcttacacaattctcggttcaattcagatccctccaatgtccagtctagtcacgattcgtccctctcggacggcgtggtttcctctaaaagtgctccggtctcgactagtgcaagctctttagaacgactacactctagtatatcctccccggcctcttttatgcctgggaccccaagatctaatcatgacgcttgggactctgtctggcctgctgtctccccatactccatccctcatcttccatcaaaaccgagtagcagtagttctagcgttaaaaatagtccaccgaatactttaaacgggttatcctctcccatgcacatcgctctcagtccgtcgacgtcatttccacctggtttcggtagtctaacgaaccggacgccactttctggtcacgctcatcatcggagaacgacaagcatcggtcgagtgccatctcctggaacttctcctctactcgggatgtcgccgagcggctctcactctaatcctgaacgcccgtcaagtcctgcgaaaaggagaaacagtttgagtccttccgatcattatgggactgagaaccgaacattgggaagtccgcctccgttatcactagccggaggatcatccaccttattgtcaggtccggagattttgccgggcaaggacaaaggtaagggcaagtcgagagagattcatccatacaatggccacctcggattaggattggcggacgtagaggcggattcaagtaaagaaggcgggaaggataagattgattccgacacaagatcttctgacagatcagacaggcctctcttgttgatcgaagggagatcggtgtccaacgagtccaatgcaagtcaagacagtacagaaacagtcagacctgtgtcgtcagaatatcctatcaattcacccagtgaagaagataccacgtcttctagtccagtttctactagatctttaacaagccccgagagctcgtccaatcctttgacaccaccgccgccatcttcgtcgcttgacccatctcaacaaacacactcagctccccctcttacccaccgaagagcatcgtccccatccccgctccgctcttctcctactgtaaaatcgaaaacaggtcctttcgccccgtttccagtgcgggcatcatcacctctgtatcattcttctatgatgtcgagcgctgctcggagtacatcccccatgctcgaaaactcggccttggttcattcatcagaattgaaaagtccaagaccggttcgaattgaactgccactatctgatctcgttcatcggtacgaggaaggttacttcggggaagaggagaaagagaatgacaatgaacgaccgacagaggagaaagaggcacctccagatggaacaccaaatgatctggagtcaccgtctacgcaggaaaggctacacgagaaggaagtcttggaaggacgtaaccacttggcgagtgctagggaaactgtgccgatattgatggaggacaatagtgaagggttccactctccaacatcgctggctcctgccgaggcgttgtcgcctgttttagcttcagagaaaggagtagaagagaaggaggatgatgtagaagagaaggacgagcgaacaaaggagaaagaagaggaagtagaagacgagttggacccgacaacgacatttaccttctctgtgcctccaacgttttcgcctccaccttcatgtaccttatctagtgcgcatgtcatcaaaccgcgtgctttgagctcttccccacctgcgttgtctgtaacttcgttcccgttcagaggtccgctttctccagatttatctcctgccttatcccagcaaactcccggctcgttctttccacctcaacctccgtttgatccgtctattcaaccgacggacgagaccaatgtagatgtgatatttcctcagagtggactagtcggcgcacctgggccggcacaaatgggaagagatgggtatctggctgtttcggaggacatggaccttgaggatgaaggtctgaccactctcgaacggattttcttgctcagtaaaagcgagtttgcccatcatcggttcgtctttctcttatttttctttttttttcctctataagagaccatcatcattgatttcgaactcgagaaactaattatatgcggtatggtcgtccgatgttttgtcacctattactttcttttctcattgccgatccgtatatatagaatatttatctccaaagtgattggagactgggtggaagatgtggacccatgcgaaactgtagaatatgttttaccgttgttaaactcgttaggaactgacgaaggtatgtgtcaccttccttttgaatttagtcagatttgagacctaaagattaagggcttgtgtctgggtatttttatcttgttagacgagtctgtgagagaagcattggcacctagcctgcacaaaatcctctggtttttctattctgtaaggcccttcatttcatgctctcaaggccaatctcggacggtgttgacattcttcttacgtgtaccctctgtagtcttgccatctagtcgcggatgaggaggatccctacttctctgaacatcaaacggccgattgtgcgggtgaatcagctgtggttgtcacatcggacggcatagacgtcgtcccaaagccaacatccgaggaagtctcaacctactctgtgctggtttctccatcctctttggattcgagctcttccgaaggccagctgcaatctaatcactctggaccatcaacacagtcgacgctagtctcgatcgaatcagacgcaacgattcttagcgagggcagcgcgtcccatccgttcggacccgattacgataacaatggaaaacccaattctgacccagtgatgaaagatcgacctacgattaatgtccagacattcactccactcattggttcgctgcttatgagccagagctcgattgtgtgtgactcggctaaagcggctatcatcggtatcctcgctcggcttaggggcaaacagctgcccacgtttgacccctggccagaaagacatatcactataggtgaagagaagacgtgctatgcccagactggacttcatattcataaggcccaggaacttagccaggaggagaagagtattatcgagaacgagttggtccaggcaattgtcatcggaatgtctcggttggacgaaacgcagtcaccgtatgacggggactacgactactatcctgatgaagattctcatcaaagccaacaccacagtcatcactggtcagaaaaggataacactgggtcatccgcagagctaaattcagacgttcaggaagacggagattcacgtcaacctattcctgagacggattactttcccacatacgaccacgtttggaactataactctgacgatttgatagctggttccccagcgtcattagaggcagttccgtccaatgcggacagtactgagtccgacttggaggagaatgcgctaggcgaaagtgcaatgtctccaggaattgagtcgccgatgtctcgtgaaacgtacaactatctccaccccaacaccaggtttgattcacccagtgcgcctccggagaaccacagatcattgtctgaagaggagctctacaccgagcagggtatcgaggctgatgcgtccgacactcggtacttggatgagatggccattgaggcttcccatggtagacttctctcgatgaaccttatcgcgacggtcgtccagtgcggagtacttgaaggagagaatgaaatctataattctttcgttgcagaggttctgagggtacagaatgatgaatctttctcggttcgaagagaagcggcacttgcgatgggagaattactgaaagtggtttcttcagaggttgccactgagtatatggtgattagacacttattcttctcatagcagttttgcggttgactgaatatttctaacatcttcggtctttgggtctattcttgtccagttgcctctattcaactttttcgcagctgatgagagtcctcatgtccgtcaagccgcttgcctcgctcttcctgcattggccaagcatcttgttccacctgcatatcgacgcagccactgtaccgaacttgcgaacgctttcttcaacgacgagatcaaagaaattcagaacactgcactggaaattcttggagagcttatccatgctttctgtgagcaaaaggagaacgttcccgaggagctcatcgctcatttcctaggtcctccaacggacgatgatgacacccaatccagtatgccaaagacgttaagcctattctcgggcggcgagggtatgttaggatatgatgaggatcgcgattatcgacctatagtttgctcgttcaacgtaaatatcttccctatttggcactgtcttctgtgtaacgttcacaaaagctaaccactctatccatctatttatctgtgatctagtttcctgccgttgttctcagtgttggggttataggctggcctatgattcgagacttctatctcaagctaactaagaataagcaagtccaagtcaggcgaagcctggcggcttcccttcacgacatggcccagattttaggtaatgagatcacatctgtggatcttgttcccttcttttatcgttgtctggacgatgtaccagaagttcgggagcgactttgggaaaacttgcacgagtttctcgcagcactggatcgagagacctcatggccgctcattcgcaagatcggcgagctcttagtccaaggtcgattaggaaactggcgtgtacgagaacgattgatgtcgtttttgccaagcatgtcggattctatggttagggcttcgcaagggtcctacttagtcgtttctttacttcgagaaggcttgatcgaccaggtggcggctgtgagagaggcagctatgcaagtggtaagcgcatacatagacttctctttgttttggataggaaaagacgtgattcaaactaatgaccctacattttgattattttaggttccgtcactctataaagtttctcgggagctggacagcgcagacaccttgaaggctctggatgatgtgctgttctcaatgattaaaaaccctgcttatcgacagcggttgacctgtctccggtgtgtttctcgctttctggaccagaagtttgacatcaaccttctccgcgctcgtgtattctccttccttgttctcgccaaaggagatcgggttgtcgacgttcgtctttcattagccaagcttgtggcaagatttaccgaagcaggttcgtttttcaaccacttcacgaagatctatatgctctttcttctcgttcagagtgtagtgacaacgagtctgacggtgatttcctcgctttccgttctcatttttctttcgttgcatcagatggaatgtgccctgtactttcggaggctcctcctgaacttcttgatgttgctgagtcccttcggaacgacgaatcatttgatataagagaaatcatggcgaccgtctttcgaaacagtccccctcttcgacaaccttcaaccgtagcctccgtgataccaaatcgaccggcttcagctcaagcatcttcctcaaagagttccctccgaaccgttgaccctggaacgtctgtgtcgccagaccttgatttaccagctgtccttgagtcatcagaaaccgctctacaactagaaaatgtgcctcccctagattctgttcaggccatcagctttgaacaatcatcgaatcataatccgcttacagccgagccagcttctggcgatccgatctcttcacctccagaggcggacttatcgataccgttggtaggtcaaccggctccgaaaccgtcttcacacatcgtcggatcttatttttctcctgtaccagaaccgctgattgatcagcttccacgcttgcgtttgcgatcggtctctcctacattcattgatggacctggggactatgtgtccatcaatacgtctgggtcaaaaccataatccgcctcgtcgtcggctggtccaccgcagacataagctattctccagcatatttttctacctgttctttcactatattcatcttcttgcctttcaggaattcttacttgtttcaacccatgcacaacatgtctttacggttgtctttgcacgccttttgggatgttcaccaccacttaacttcctcaagacatgggcttcgcatcttcctccctcttctacactatcttttctcaatctccatagacgtagatctgtttgctcacatcgttcatgaattgttttcccttttccctatatataccttctttgtctttctttcttgtttccttttgtcatctgtttctttcaacctgaagtatccaacgtttttttatttggattcggattatatttcctttttttattttgttttccttgctttttcattcatcatccttacctcatcatccccttgatcatagtgtattatagtagtgggtcgtttccatttcctaaccaatctggttgataatgtattcaataaataggtaatttcccctattcaaccatgcaggatgcccttcaaatatttctcacttctgctaaaaggcggaagctggaagtactcgaacacaaggaatagagatcacttgagaaagataagcgcatatgataatcaattttccgtgtcaaggtggacttcagggctctgtgggatagcttctactaaagcggacatcgcgcttcggacctggttcatgaattcgagtaaggaaagcctagatttctctatgtaatgatgagccatcgtaagtcgcacgcagtcaaggcagaaagaaagtagaaggggtttcagtggttgatcaagtgcaatcgtaaaaacgatggaaggaagtcaagacggcaaaccctgcttctgttcttttgctctgatatgtgtagtctttagagcgattttctcctctcgctctcgaatcaatcgtctgttatactcctttgaccagactgccaaccaagaaaatatcagcgatgaaggccgacgatctataacttcgtagagagaaagctttgtctcacgttcgtattcgaggacgagaaggcaaagttcttaaagacacagatcaaaatggaagcttatcagctagagtctgacaacggcttttcagagtaagttgattaagaaaagcttcgtgcgcgggttctacctgacgtcatgtctagaatcaatcatagcagaagcaaaaagaaagaaagaagagaccatgagaaccagtcacgatatcccacgacaaggaagagaaaataaaaagaagaagaggtatgaccttcctgaaagtcctgatagtcattctcaaattggttgacaggcgctcttaccaaaccgtcaatatcgagaggttctgcctatgcatatccgcatcggagagatcacacatttgccgcatatgaagcaaatcgtaagcatgtaagtcgttctgcatatctcaacgacatatcacccgatgtctctgaccaaaggcattgtcagacatacctttacttctagttccccgctccatcctcccagttctctcttcttttctgttacatcttctgcttctgcttcttcgtgtgaacagtcctcaagtgtcagagtcttctcaggtggaagggatgaaccctcgacatggttcgactcgactttgttttctttctgaagcttgtcgtttctccctcctggaacatcatcatcgtctgaaggggaaagaccaaaatgagaaggaggaagagaagaggtgacaggatcaatcgggaaagccgatgtgtgttgcttgtcgtcatcgtttgtgacgacaagatccgaaggtttgacatgatgttgaggggacagggggtgacttttaggggatgggctaaacgacatagaagctgcgagataagatgaggtctagagcacgaagaatgagtagatggcagttgagtggaaggttagcagacacagatataaaagacgagtgaaagtctggccgcatatagtc

SEQ ID NO: 1360 - DNA, 2464 bp, Xanthophyllomyces dendrorhous
gccgcatatagtcaactgttcgtcctgtctgattttttgatcacctttggtcgcacgattctaattctttactttggcctacgattccttctgtaaattcattaataacagtgctcagaaagaacgaattgttggtaccgtacgaacaaagaacgcgtttaaagcccctttgtacaaacaagacgccaaaaagaaagatctgtcgtctaaagtctctgcgagggacctttttgggttgctcgctcgctaagcagactgaccccacccaaacctatctgagggactggcatgttgggcaggctgaccttggacgtctcaggtgaaatgggatgttcccgagcaggatgataggccggggatgagacccctgtagctgagggaatgggaccgacctcggcgtgggccatggcggcagcgccctgagaagtgtatcataagcaacgtcaaaaagaaaatcgaaggcatttagaaccaatgaagaccggatacgtacgaggtcactgtctttggtaggcaaggtaggtcgcttagagtcattctggacctggtctgaaatcggctttgggacagaaacttcggcctcttgtttgtcgaaccttccaatcaacgctctatcgacccaagcacccgaatacacaaggagttccgaaagtgagtttgatgctcctcaatgatactccaaaacatacaacgtacagttcttctagcagggtggaatgccggtattctaaccgagtgtttggaacattagtcttgttgatatcgtttccttcgacaccggggtaaaaccatttgtttccgatccagtgtcgcttgacttccatgtcccatccagactggagaacagagttccgagcaagctcgcacatatctacatgattgacagggtagaaatgcgcggaattcgattcataagtcaacgcgcttttcatcaacagtcagagaccaagtgacgtacctgcgggtgaaagcttgtagatttgagcggcgcaagaatactcctcgagcaaaggttccttagtgaagtggaacttcaaacgggaaaccccatcatgataaacggctcatgagtccatttgctaacaactagatatccagtgaacaacagtagatagcaagctcacctgaagaggatcgtccgtagacaatgaaacgttcattcccaatcggaagaagtcggtaatcctgttggatagacgaagtactaaatacgtcagtcgttgaacatgatttaaggggggaaaaccccataaccaatagaacgtacggatttcggtcataagtcaagaacaatgcgttgttgctcagcggagacatagccagcccgatttgtctgaggtagaacaagtattgcatgaccggtactctatgtataggaggaagagacaagactataagtcaattggctcagtttcacttgttcctgggtgaaaagacatactttcgaagcaagataccgtgagaaatagagtgggaagtaaggaaagcggaagagagatggtcggtatcacctgcctctccactgtgaggtcgaagaacgaaggtgtctggtattaaaagactctcagtcagtcgatgaagttaattaaaaaaaagaaaaagaaaaaacataagtttaacttactgaaccctctctctcttctgtaggcattcaagctagccatgttgataaacatgtagtatagcctgtaaccacgaggtacccaacgcaagcatacaagcacatcagtgacccattctgtaagggttaaactcgaacaaaccggacgatcaaagccatattcaccagtagttgtagggcgggctgtccttgatgttccaccccttcgcgttagggaactttttgtaagtccttcgctcagcctttgactcatcatccacactatcgaatccaatgactcgctgaaggaagatatgaagctcagggtgagagctggggtcctgggtgacctcgaacaatggttggaatagatctatcatttcgaagcgacggtcaggaaaaaagtgtcgacgtggacaggaaatactctcgagtgatgaccgacagacgtactcttgacgatatcctggaaattttcgatcagcccgccagccttgtatatgtcatacaaccgtgggacctgaatgagccatcgaacattgtgcgacaggagcttgttcttgacgacccattttgcaagcttgtcccattcattgacattcctaaatgaggtatgtcaaaagtaaaattcatgagtccactaatcaactgatcgagtaatcgtcttctttgatgcgacagacctagcgtaaatagaaatccgccattcgacgttctgagaagacatcaaagacatatttaatgataacgaaaagacgttgaactagacttcgtatgcgaactcaacaaccaaacttaggaaaagcttacctgatacttgctctgttctaaatcgctcatcaactctatataaatatataaata

SEQ ID NO: 1361 - DNA, 9174 bp, Xanthophyllomyces dendrorhous
tatatatatatatcggacagcgccgttagccaacgaacccagaatcttgccaagaatattatttcgagtgcgtaccttgagtgagctctgctaaataccgcccttcaatgtagttgtcagtcttcaggaagatctcccggaggcgggaggagccggtcgggttgtacttcaagttgaatttatcgaatctgatccccaaacaggtaacatatgagcgcggcctgctagtttctgcatttctagacttgaaaggaaaagaaaaaggacgaaccggtggtagtctccatgggcatgcatgtccatcgtgtcgatactcaaatcgtacgcggtgaaacccaaactttcaaacacctggctaagtgtgagctcgactccatcccgcacgcagacaatctcatccggcgagtgcttcatcttgctcttgatgaatcggagaagatgcttctgattcatactggctgagtgatgaatatgggtatcaacctatcaattgaaagagacgtcacgttttgtaaaagaaagagcacattacatgattagttaattctcaattgaggtacaggatgcaagaaaaccacaggacatacttttcggacgttgtagaaatctcgatgagggactcgcttcatatcagcaagttcttggtattcattaagaagagtgtagaggttccacttggatccaagatacttcagccttcggaaggcgaacgacttagccggaccgtccgagcaaactcgcaagactgtgaaatagcgaaaccacgtatagcatcagaatctgaagtgattgaaatgagcgatatgtcggttttaaaaaataacctactagattccagatcgataaagtattctcgtagagagggaagttctgtgatggatttcttctctgggtctaagacagaattagacgtatacgagtgatttatcatggtgaaagaaggtgcaggtcaatgagatgagagagattacatagtttgatacaaaaagaggtgcaggacacctcaaaatctggcgagaaatgaacgaaccatcgctctcaaagactctgtatactccatcgtctcccaactcccagcccttcgactgatcagatccaggaatcgggacatctttagcatcaaacttctcgtccctatccagaaagtggttgtccggatcattatcagacggcttccacctccaatgaggaggcggcggagagggatatatgttccagggctttctgtctgtcgaggatgagggaacaagtttcgcgagatgtgcgccggctggcttgagagaggatgcatcagaatactgggaagtcgggaaagttcaacgtcagataagcagcttatcacacgaggtgaacgtgggacaacctggacacggaacacatcaaacttacttgcatcgtctcgtcagtaaatcctctaaaatcggagtcgaaatcccgagggttgtcgccaattctctgataggagagcgccatgtacttgtctcgaaggtttagacacttctggaatgatttgctgagaagagtttgaacggattagtttatgtaacacgttccattcttgatctgaattctgaaacgctttgaatctggatacagagggataatatgagaaactcactaaagagcctcgagctcggatgtcaacccatcattgatcaaaacgtcgttggtattcccagtttgcttggaatctgcaaggcttgccttctcgttctttttgtgtctgtcatgcttgctttcaaaatctagttcatccacctcttcctccaagtcaagctcgtcgactccaagagcgggtgagagaggaggggctgcatgtttcaactccgaatgagttgtcgatgggctgacgggaccagttcggatttgatgagcaagatagtgagagtcggcctgaagattcgtcagagaccagtttggttgtgtttcagagaccaacataggaacaaagagaaacaagaaggaagctttccgttagttcacaatgagactagaaaaccatcgagagagggatggatagccgacgtgcatctcttaatctgtgttcttcctcatagtcaaatgtcgtgttgagctgctcaagcattggtgtccctgggacataggcaggtgactcgttaccatcttcatggaactgttctctctcggcaggccgtttaccacacatcagaacgaggtctagacagagatactaagatgtgagggatggatggagatacgatattctgtaaaaattcgatgatagtcagattctttgtatcaactcggctctcataagaacttcggctccggcatatccggatattgtgcgtcaatttcttgttcccctcctttggctggtccaacatcgagagtcttgcgtaatcatctctctttttcatctttcttggacacccaacgacatcatcatcatcgtcactaccatcctttgaacagaatgcactcgactgctcgcttgctctcccgttcggcttccttaggtttcatcggtctcggctcttctggccggcttcttgctcataatctcctggctggatccgctctcgagtcgtccaaacatgctaatggctctttcattgtttgcgaaccaaacgatgcaaattttggactgtttatgcacgagctcaaggagcctctgagagagaaggtcaagcgagtcgggagtggcgcagagtgagctatctatttgtcaatctggagtacgtggaaatagacaggtctgatgaaatgacgctcccggttctatcgttctagaatggctcctcttgcgtcggtcatccatacccgacttccaaactcgtcctctaaaatcgttcaatcggtctaccttcagccgccttcctcacttttggtcggactgaaagacacgacgttccctccgtcagagaatctgccgcaaggcatggacacattgttggtcgaccacacaacatatgacatcgatgttgcccagagcgtggccaaacaggtaggaagctggacgggaggacggaccggtgtggtggatgctgtctttttggaaggtagcttctctatcgttctgtctttcccctgctatttcctgctaaaactacaatcttgtttcctccttgctcgtctttattttattttgtttatacctccgcaacatgaatatcaggtaaaggagctatcccttcaggcaagatcaactttctcgtcggtggtaccaaacgagatttcgacgcggccgttccttttttgaactatataggttctagcgctactcattgtggtccttctggtgtgagtaatacctatgcaactttcttagaattctgaatggttacttactgaaaacggctacgtgtcatcgcatttggatcttacaacaggctggattgagtgttcagatcgtcaacaagtcggtctctcatcatatatcttcacatgtacagaaaacgcaagagaactcagtattagacaagctgatagtatcaaatgcaaacattcgtctacagctcgattctagcgcttaaccagattgctctatctgaaggtccgtttccatgttttcttttcttcgaccctcagtctatcaattgcaacatttgtctcatatgtatgtaatttacaacacaatcgtactctaaaggtatgctcttgggcagcagactatccctttgccccacccttctcgcctcgatcctcaaccgatcatctgcccaatcttggtcgtctgcccacaacaacccggatccgactgtgtcactcagtcatcaacctggttctaacggctacacccccattgggaggcatacaacctctgggttactcgctgacctcaaattggcgctcaacgtaggaacctctagggggtcacctatgccgttgggatattcagcggcgatgttgtatgagaacgtggtggaagagggagatctaccggaagcgaaggtaaaggacaaaggacaaaaagactttagtgtcgtttacgagtcagtcctttagtcttttcatctgtcttttctcttccgccctctttcttgtctgccaaacaaggtgactcacaccatccatcaacttttcctcggttttgcgttatgaataggtggctgcgagagcgagcggagggcgggatcgaaagttggggtcctagtgaagctgaaagctcaaagtagaacaaactcgaattatagataagctatatgtcaacggaagaaggaaaacatttctggtatcacatcaagaggaaacaaaagagaacgaccatgtataaagttctggatagaatacttgcataacaaaaatgagaagaaagaaaaacgacaaccgatcaaagatgaattcatccatctccaaacctgtttctaaacaacgcttctttaacaaacttaacaaccgactcccctccacacctttagtttcgtaactctgcaaagccgacgagatctatcaagataaaacccgcaaaatctcgacctcaagatattccctccccgggaggtgggaaacttcaaggttcaacttatagtgacttcactcgtttttcctcctcggccttggcagctttgacccaatgtccactctgatctttctttctaacggtgaaacaggcgatcccggtgtattccgtgctgtattcgtttaccatcaagcgagatcaacagaaaaagtcaagagacaaagtaagatctccatagaaaaccaggaaacagaatgaaggtggagacggacatttgccagataacagagaacgcaaagtttagatagatggccaaagcgacaaagagagagagcaggatgaagcccgaggattttgtttgggttgactgaataacgggagacctgtaagaatcaaacaggaataagattagatggcataacgggcaagaaagaccagcacaagaggtcagaagcattgacagtttggcagaaaggggaggaagcagggaagaaaacgtacacgccgaataagttgggcagattggcgtctaacgctccgatagccgtccaaaccatccatccattccacatcgggaatggcatcttagttacatgagctaggatcattgttcctaccttcagagttcgttaatcgatcgtcacggagagaagaagaagacaagaacaattccaatatcagcgacaggcagagcagagctcctccacgagaatgtcaaacacaaacagacctggtaagcgaacccgaatccaacgaatcctaaaaagtagaggaagttgtcagagtacagaattcgagtactggtcgggtagtcggccgcaagccaggcgagcaaggccgacagctggaccatgaaagggacaagtccccgaagaggagtatttatgggttgtccttttgatcggcgagcgacgacgacgttggagtagctgtaaatcattgacccagtcaatgagcaaatggagctcagacgtgagccatcgaaaactggaatgcacagcaatgtatgaacgtggagtgagagttacgagacatacctgccccagacgttaaaggccaagctgattgctccaaagatcatgaaactatcattcagtccaagatccatcagtcgcttgttctcaccaagagcgggaacgaccgagtcaagtttgaagaactggatgatgctctgatcccagaaagttgggccgtaaacgcctatccgaaaacaagataagaccagtgaagagaaagcaccgcgacccagaggtcagagtttctattctcgactgagtatattgttgggcagagacaaagacgaaccggtgatgcagtacaatacgcagatcatcagaataccctccacagggccagagaagactgagagataaagtgtgccggtgtggtactcctcccaagtggtcctggatatttgtgatagattgatgtaaagaagtgatcatatgaggacgaaggctggtcagtagacatgcttgatacagagtctacgctgtgatatgttcttaatcaaatgcaaatctcacagatagaagttagagagagaagcagcttggctagctaccgtccaccaacttctccccagattgagcgcatgggccgcaagaatgacttcgagctggatttgccaaaaagcgcgcgagaaaagaggagttttaggagatgctataggataaggaagattggagaaaagttacgaacagaagtgttcatcgcgtcacaaccatggtcaaacatctctcctaggggtcctgccatgccggttcgccgagcttgtttcctacaaaacacgtggagttttgcaaatctatttagtctgcaccttcacgtatcatctgagatgatgccgataagaaagtgagacatacccatcgattgcatccatactttggtatgcgaatagaccgataccccatctgtatggaagatatcagaagaaagaaagtttattattatttctgaaatgagaacgcgtacaaccttttaggctctctttgaaatagaggaagatattgtggacgaacgaccagtagacccaactcggaagcgcctgatcaactttgaactttgggtcgaatgcgagcattgtggcaaagttgacaaagatgatacatagaccggagaaggtgatctgtgggattgaagaagtacgcagattaacaacgaagctcaattgtaaagtctgcaagcacactcacggtgttgggcgcgatccatttcgggaagagaaggacaagtctattccagaatgggttcaagatgaatcgagaggtgatagatcttggttacgcagacaattgaatagggagacaaaagagcagaggtccatgagtatcatttgagcaatcccgggactctcgtacgaaaagacctacttgtcgataccagaatacttgctggatgattcaagtcagccaaccgaggtatcagcccaaggaatgaactctttccttcctttcatccgagccatagaataaagcaaaaaaggtgaacacaaaaagagaaagaagactgactactttgacaagttgtctatatgggtactcggaatgaatctcatgatgggccaagagctctttggcgtcgatgttcaagtatatgcgatatttgcttgctgctctgttgctgtttccttttttttcctctaaacagaatctcctatcgtagactgacgccagcaaagcatgcacgtgactcttgaaccacgtgacgtcacaactcacactacgagggttctagtcatacagggtgaagaaggatctctggtcaccatcatgtcgaacaatacatacacacctctacccgtatcccaagaacatctaggagattcccttgcgacatctcctgtcttctcgcaaaatcatgcagcaagctcaaatccagcatcttatccgcctccaccggtgcacgagacacctttggcagagaatctttgttcttacaagctcagcttgcctggagccttcacctctgatcttgacgtgatttgcacaaggggttcgagtaaagaggtttgtcctggtacacgctatctcgttgtatacctcacttgatcgttatgtcttaatcagatttggtacacacgcgctcgtttataggatatcgttgatcagctgtcttcaatctcttcgaatatactctcgcgaacgccgttagacaggatcatctttcagatacctgtaggaggtcaatggtctaccgttctggactctagttttgatgacgccatagtcaggggaaggccagatagagtcagagtgtcgatagccttgtcgagaaaagagtggtggagaagtaagttgtcgttttgtttcgcctgataaattagttggttctgatccaaactaatatcacgcatctatctccctctcattaaccatcacgatcagcttatggcttactactcgcctctccttttatcttctttttcttaataatcttatggggcttttggatgtcgtcatagatgtgcgatacaatacgataaatcttcaaagacgaactgattatatgctgttgtcacttactatgttctcaatatgcgatgtcgctctgaacatgcagcatgttctctcataactctagaccttgacctgatagaacggaaatgaaacttgtctctcacctgtcaacgacgattaaattttcactaaatctatttaggaagctgattaagctatgcgaccttattctctgtgcatctagattacgtctgacagcaaacctgaggtgaaaagcgcaagaaagaggagagaattacttctcctcgagctctcgaagcaaagcttcgatctcgtcttctcccacatctttcagtcctttcataagcttgtcaatttctttgtctccttggttcgtgttgacacttgatgtacttgttcctagagggctggtctcgtcggattgactgatagtcgtcgagagcgtggtgggtggcggaggaaagttgtcaactcccagaaattctcgaagacgagagtcttcaacggcatattcaaaatcttcgtatgactgtcgtggaaatgatcagtgatgattaagaagatagaactgcataattcgtgatatgcaggttcaagatatcgagttaagacgtaccccaacgtactgtatatgtatcaagtagcgcagaagttagacaagctcaaacatcatccgcacaggtcagatagatggaggcaaagttacgtacctctccgtcaaccagatatcctgggagcactccgttcgactttcccttccttctccaaactcgttttgcatcttcatctaacgcacagcttttcgtccgtgaagcccaatcacaatcagcattactgttggacgtgttgcagtggatatgagcactcactctgcctggttgaaaggaatgccgagaacggcgagcgttcggagaaggtactcttgttgcgttcttgctttagcttgcataggcaaagaagtcatctgtcattcggaaagggaagatagattcattcaggaccttgatttgtgcagaaaaacgagagcgatctgcatacgtatacggttactgggtgagacatcttgaatcgtccgagtactgctcacaagtcgtataaatcgttgttgtgttgaatgatgttatactgtagatgaagttgatatctatctctcgagattaatctgctcaagcatactgattgtcaccggctcagggtttatattgcaatgcgtattaataatttaaccctaaataatgacgtttgactgttgcaagctatctatatgac

SEQ ID NO: 1362 - DNA, 2151 bp, Xanthophyllomyces dendrorhous
atatgactttacgttaacatcaccatcaccatcaccatcaccatcaccatcatcatcatcatcatcaacaatatgtcaatctttatcccgggctcgtggggtgctcaaattttcactcttgatcctgttggttgtcctttttgacaatgcccaagaaatatacagacactgatcatatctgtgggtctttcctaaaggaaacgatctatcctctctcagaaaaccctcggtcaaccgtatatacaggtcgggtcttacatgaatctcatgatggctgggtttgctgcaagactgtctcgttgggagaagaagaaagccctcactcaatcagaaaggaagctaggctgttagcaaatgtctctcatcctaacgttagttttggggcactttccctatcgtgttttccttccgtataactcaatcttgatgactctgctcgccaaccttaaatagatcatctccctcttgacgtccacctacacagtatcaccacccagtatcacattgttccttcctctcttagagacccctctctctttgatacttgactctccaagtttcaagcctgatgaggcagatttcatcggacaagcattatctattggatggcaatgcgtgagcgcggtagaggggctgcacgagcgacggatagcccatagggacatcaaggttgagaactttggccgtcaaccggatggcacggtggtaggtcctctttatttccctatatatctcaagtcaaacacaaaccatcttgcacacgttcatgtcgaactttggtctcttcttctttgatgtcagaaattattcgatctagggatcgcatgggaagagtctggaccttcaattcctggcgaaagagttgaagagagcaaagaggcactgatttctcaagtggggtctgggtaggttatgcaaactcaagcttctccctgctccgtcgttcttactaattagctctctggtaaaacaaaaccctcagcgagtatcgagctccagaactgctattctcgccacagaaatacgacccattcgcgctcgatgcttggtccttaggagtcgttcttgcacactttttcactcccttgattcgacctcgtccgttgctctctacgacttcttccaaatcatcctcagacgcatcaggcgacgacgacgacgacgatgacgatgatatggactatctgtcaacgtcatcctcgcagatcgaatcagatgatgaagacgatgcagaagacgacgacgaggaaaatggaaaaaattggaggagaaaatctctttttgtttctgatagaggagaaattgggctagcagccagcatttttcggatacttgggactcccactgatgagttatggcccgtacgtttatatcatttgcagtcaactctcctcatattcgagtccgttcctaatggctttccttgtggctgctctgtgtacgatcaggattttcatctcttccctgatagctccaaattgtctttccttccttcaccaggtccattaccctctttacaagagcttctccccaatctacccccgattgagccacttcgagctgaatggatagaacttctcggtggattcctacgactcgatccgatcaggcgaacgatgcctagggaggcattaagcttcaaagtgtttgatagtatagcaagtttcctccctgtgagctatcccggagccacattgagtagaagctgagggcgattttgttatctatttcgacttaaaaaaatgattcaagtgaaaagtgtctattgttcatctagttgtagacctatcatcctttgtaaatatatgaatgatatcttgagtatttacgttccattaaaacacatcgatatccataccccctccgtcgcattgactcaaaattgaacctagtccacacggaacaactgaagtcatgagatagaccatgtcttgcttgctcttgttgcacctcctggatcactcctaatctctttcgtccaaaagtttacggtcactttccacgtgcctactgcttcatccttaggaatgactacaactgttcgatcatcccattccggttgacgaacctcgtccaatgtccaggtgataaagaagcgttctttagtaaatgaaacgttccgataatgcgcgagagggaggagtgtcaggt

SEQ ID NO: 1363 - DNA, 4208 bp, Xanthophyllomyces dendrorhous
gaggagtgtcaggttgaacgtttgggcagggtgtatactttcagcctcggtcgtctcaatgaccgaaagactgtcgatcaacgagatcttttccaactgtttaatccaaaggtcctccagacaaaccgggcagaacgtaggtgtagcgaccatgcgcatcaagcagttctcatttgttggtcgataagtgacgttcccatacaaagaccgcgtaggaaaagctccgataaaatcaggatcagaattgaacttcttatctacaccgtactgagtgagttcaaccgaacagatttgtcgaataacttcttccctcactccttggtatttatcttttctgaatgaccgagagacaggcctttcggtatcgactagttcgaaagaaattacatgagctccggcagcgagtccatcaggaacaggatttcggatagatatccaagcccggtcgaccgagcctttccatccttctggtatagtccacttaattggtcttccatccagcttgaccaacatcctatcattattgtaagacgacctgttaatattctactttcaaagcgactcgagaaggaagaagagtaacccactcggcttcgtctctcaagccagctacagaaaatcggagcgcaaaatctgggtatctctcgattccatccggtacaaaaaacgtaattttccaggacgaagctgagagatcatgccatgggtacgcctgaagaggagtattcatatcctcttgacggggtttggatagagggtcggatagccaatgcgcccatttctgtttcacacaataaaaaaaaagatgccagacagagtctactgtctattttcctctccccatggacaacgtgatttggaacgaaagctcttaccgatgatttgagggacggggatgagttaactaagatagatgagagatagataaatgagcgcagagaccgagttttttgtgagttattctgatttcaatgcattcgtttccatcttcatcttcaaaacaaagtggtctataagcaaaaaaccaaaacacacctccagtgtagacaaatcctccttcgtattcctctcccacttcgatcagcgaatgctgtaggtgaaatcgatgttaacgaacaaatataccgacgacgacgttggcataaatcaagaaaagatcttactccaatctcatgccttagcaccaacgctccattgagcttggaggccgtggtaattctaaataagtagagagggtgtttagcttgtgaactgatatggtgagtccaagactcttagcgtgatataaactgatacagtttcagaaacatacgtaaattcccctcctaatccacctgcataaccgttcaccatcaaagtctaaatcagtaccaactggtcgcatcgaccaacgatggatatagaagaaaaactacaactcaaccataatatgcaaagttaccaacgatcgccatctgatcgcatcctccttcacccaaatacccttcccgaacaagtttacatgcctttctggcccgtcggcgatatcccgggtaaagcgcacgaagctcatgaccatctcggtatagtccaaatggagtcctaaaatttgcaattttttcaaggagagaccgtaggttggaacgtgcttatctaaagatacaatgtgaacatctaatctcacttctttggctgaccattagagcctaccccgctctgatgtgatcaagaaattagatgagaacaaaacacatcagtgaatgaacacagagcgaaggaggagaaagacttatagactactcaggatgtcggaaggagagttacctcttcagatggcacaaagaccccccaaaaattgaacagatcagccgtactcttaaacgtcccatcttccacgatcgagctcatcaggtgtttaacgtctttcatgaacttgcccctctcttccaggaggtctttacagacagcgcgacacacatttatatagagtcaggttaaggctactccgactaaacaagagatcaaaatttacttacaaccatccccgaagaaagcaatctacctcgagatcggacaattacagaatttccatagataaggtccgtcaaacattgtttggagtgaaggatggggatgggactgacgttaactcgattctcaacctttcctgataccctgaggggtataagctccataccgtctaactctccatccttttctccaagcacagcttgttcaggaggatctatatccgataccaccgacctgtcatcccagctcttgcaaatctcgtcaaatttcaacactcttcgatcggagggagggaaagtgaatcgtccatcggaaagaggaaggagagatgatctgtcgaacgcgagaatggtaatcaaacttgactcgagttctctccgtagaagagcggattgaggcaaccatgatccgctcttcaaatgattacaagtcaaatttaatgattggaaccgactacttgatcagtatatgtgaacgattcttcaaaccagaaaaatgattaggacaccaaacgaaccggtccattcaccagcttcctgacatcgacccaaactccgccatttgagcgaatgacctcgctcctcacacctcgcccacttcttatctgacccgtaaatggatgtgagacgagtgtacagatccgagtcgggtgatgaatctcgtatactaattcaaagatcggttcgttcttttcatcgatggacgacacaataactgatccggataactgtgaaagcaaaaagacagaaaggaggaaccaaaggaagattggcggaggacacatcgtgattgaatggactccagatttgatcaaattggatgaaatgtacagaggcagagaagagatgatttcgtaacggacatctccgaaaggtcatcatggatagaaaccagcaacaactccaagtctagcacactacatttcaagggatacactaaacgaccaagactggagaaaggggttggaaaagataagagaaggaacgataacatgcctgaggagagaacaaaataatgaacagaaggtcgaaataagaaacaggtaaagagaaaggagcttttttaggccggatattataggagtcggataccgagatcggaaagataaaaaaggtgatcctgatgaatcttttgtattcgtaagtctcaacaagatgcgacggtatggacgatacatcgagacgtaggtgtaaggcatcaatgacaggacagctaccacaaatagctgcagaaagaagttggatagaaggaaaaatgacaaaacgagaagaataaagaaaataataagggaacgcctacagacgattggaaggccagtaagaatctcgggtaaagaacaaacaaagagaagaaatagaaacgtggaagagaggaagattcctaacctcattgaatcctctcgtagaataataagtacgcgcatcgctctctgccaccgatctcccctgctctaccctctctagcagccgaatcagaaatacacacctcagcctcggtgacgggcacgactgactcgtcatcgatgtgcagccactggtttgtcggcggactattcgggccggataatgactgagagagcacagcagtggtataatggccggaggagacagtcggtccgtgatgatagacgacaccaaacaacttgtactttatcggcgtgctcgtacgtttactcggggacatgcaatcctcaggtatgatgagctctcctccgtagctgacaaccttacccatctttctcgcccctgctccaaatccacctgccgctccatcgtctccgacccaaccaaatcttttgaaggcgacgaccaaaacttttggtccaacctcgagccaacaccgcttcactgcctctctgccttttccaccggctggtcccatcacaaccccatgcacagtctcgggctcgaccaagtgctcaagtgctgtagttatgttgaaaactgacggcgaagcgatgtcaagaggtaaaggcgagaacggctcgagcgtgatagaaggcttgtgcgaaggggatggggtagagagtgagagggatgaccggagaagaccggtgaagagcgtggtgatcgacgtgggtgcagactccgtctgagagcatatgtgttgtagtcaatgtggtgagcagggcaaggaagagaagagaaaggacgatgagcatatatactaacagttttcaataagcttccctttccttt

SEQ ID NO: 1364 - DNA, 2065 bp, Xanthophyllomyces dendrorhous
gctatcttcgcctccaccacctccaccacctccgcccgatccagcaactcggagttcctcatctccttctgtaccgttgagagccttctgtgcaacctcctcctgaacgtctttcggttgccgagagagtaacccgagaacttcttcgtgaagcgtgttaaggaagaacccaaggaactcttctgcatcctcttggtgtccttgctatagagcgaggtgtgaatttaagcacattcacatcagtatcaaatgcacaacgaacaatctgaaataacaggagaagtacgaaccctcatgaacccgaaccgctccactcggcccatcgcctcataaacaccctcaggaacgaacgccccgaaaccacgatctgacttgtcgtccggtccaagcccggggaattggccttcggcaacgtaagcctcggtagccggagggaattctcgaaggaagttaatcctatatgtatttgacaatggtttttctccaaatcgcgataagtgtctgatccaggagctgtagaactcgggtgaagtgaaagacgtacatagattcgactagtgggtagtcgccggcaaggtctgccggcaaaatctgacctaggagcgaaaatagattatagaactcatgggtaaagatgagaacttgcaaaatctaccgtccgttgatccgtcgatgaaaacccatagtcagttgtgaaagcctattgacaatcctttctaaaaaaaaacgagcacaggacgaaatagatagacgacgtaccgagttaacgaaacacaagtttccgcgattgatcaaacctctggctcggactctcctcgccttatggtgaacctctcctttctttgcccctctcgctagcaattgagctaagcttgattttcctccagcagctcggcctcctggcttgatactctcagtagagctgccggccaattgagcggatcgaccgatggcatgtccgttcgaaccgcctgagacagaaacgacggaagatgccgaggacgagtttggactggctgacgaagttggtcgaagaagagctgcccaagaaacgggtggtggtttgggagctgctggggctgaagccggaaccggagtcgaggcaggggccaatttagtttccgagggcagctcagccgaggatgtactgggctcatttgtcgtcattgtcgtcgtcgttgaaaagaagattgaaggagaagccggggtagagctcgccggtgtagacgtcgaagtcttgccattgccattttcataagcaggagaggaagctcttgtcgaagatgtaggggtctggaatttactcaaagccggaagatgagcagtggatgtcgtgggagacggcttggtggaagtcgaagtcgatagaggggcagactgggtggccggggttactgattctgccaaaatacttgttctaggtttcaccttcatccttgcaggagacgaagccttggtcggttttgtgggcgatgatggttttgacgagccggcgtctatctctgaagcaggcttcgatacccgaatttcagaagcgtccgcattcgcagcttccccagacgttgtcacgcccgtcacagccgcctctgctaatgtacctgagaattctaggattgaagacgttgtcggttctgaatcagaggctgatggcacgataaccaccgattgatcgatcttagcactacttccaatgatggacccgttcgtctctctcaccctccgtcttctcggcattacatcttctttgacgtctaccatacgtccttgccactttccgacgccctttccaaacttgtctggcatttgcttcttgacctggatactgatggtcaagaacggtgcgtcagcggcttcactcggccttctgtcggcaaacagccaaggatgcggcggtggaggaagtcgggtcgttgtcgctcgggcaacaggttgagcagtttgaatgatcgacggctgttgattcggtactgacggagattttgagacggtcggtactggacttgaggaggtaggttgagaaagagtagaaactacagggggcgcccgtattgttataggcgatgat

SEQ ID NO: 1365 - DNA, 24611 bp, Xanthophyllomyces dendrorhous
gaagggagggagggagtgtttgttgttgctgctgctgctgattgagagaaggatgagaaaggtaataagattgttgaggttggaaggaggagtattgatggttcatcgaaaactgatgcggaggaggttggttatgagagtgatgaggttgaggtgatgagtgttgatgaagattgagattcggatgggcatggttcagctggggagaggcatgatggccgatatggtgggatggatagaacggagtggatggtccaggttgaggttgctgttgttgctgttgaggttgctgttggggatgcagattatggctatggttgtgattatggtgctgatgctggtgttgatgttgatgctgaggcaaaccgtatgaaggagcgatagatgggaacgtaggctgaaagccaatgtctaacggaaacgagagaaaaaatatacagagacatagaaagaagaccagcagattggagagatgaaccggaaatggtgatcagtatagaatccaagctctccgtacttgactagcgagagaacacgacagaggccactaggaaagcgacgaaggagcggaagaatagaagaaaaaaaagaagattattctccacactcagcccatcaaactgatgaccgtccttctcaactcttctcacgggacaatttactttcgcctcttttaacagtctgatgttcatctacctcggttccagccgctttcaagaagaagaaagacatcacttactgcccgattggtatatgggattgtagctgtaaggcgattgcccttgctgtggtggagggtaagcatgatggttctctccggcggacgatggaccggctataggatagaaggatgacattgattaatttttttccttctctttgctgtttgtttcgttctctatccggtttctgtaggattgtctcctaaggataaggaaacgaaatgggtgaaaaggagagaaggcgtccgaggaatagaaggtgacggtagagataaacctgaggagagaaaaaaaaagagattacgtgatggtcacacgaactgagttcgtcgtcatgttcatactcgtctaccttgcgcatcgcaagaggtcgttcaccatcaccatcgtctccttgttggtacgatatgtatagtctatagtgctgattaatgtctcatagtgactcgttagctagcctacgccacggtacaaggctttactctactttttgaactcactatttcgaccagagtgactgctctggttacaccacagaacactgtgatttcattctctagtctacctctagtctacatcgcgcatcgctgaacatttctgcacaaaccatgaggtccgagtgtgtgtgtcgaagcaggacctcaaaggaacagcgtatagaggcagacatggtattttgtttgatgactcgtggggaaccagagcaaggatcggaagggtttctcgacgactgattggccgctgtcggtgtgtcttgagctatcacaacatcaagatacaatttgtccaacattactctttctgcttgcaatctatgcttttcacataaatcgagtggcctgatcatattatcgacaacaccgctagctttcattacacaactattgtccatcagatagcctaatttcctattccttttagctgcctccacttttcgtatgctacatcgtcattgtcctgttggtgcgcaatgtcttcgataatcaacttctttcctcctgtcttttgacccaagatcaaaagaggaaatagaaagaaggcattggacttacggtcacaaaagcctggaccaatttaccaaaactactctgactcgctcgaacggattccggggtgagcgcacccaagtagttcatcgcgagcgattcccaagcgtgatatgtaaattgtccactttgttcgaaggaatggagagattcttcatgaacctgcatcattcaggagaaacttcagttgttgatattgcaagacagagcattgacagcataacacaatcaacgatgggcttacgtatcgaatccgggattcggtgcctgacccctcccatagaggccaaaagaatgcgcgctcgttcagaacggtcagttcgtttggatacctcctcgctaaagcctgttgattggaagtccatgtcgtcagcttccttgccaaggttgctagtgcgcaattaaaaagagacaacgaccaacccaaggcttccgtacactcaagccggcccaatcaccaccatcgaaatccttgtaactctccaaccacctctctaagaatcgttcacctttccgactcaagatcacagcattgcataaaccttccggatcgagtggtggtcggtccgagttgggcgaggcttccattgccatgaccatatggaacggtagaagaggcgcaaaggatcgtgtcactgaatcgatccggtaaagtatatgcacaagattagtgagagagaaaagctgttaggattcaagaactcgaggacataccaaatacatcaatatcgaggtagattcctcccgtatgttgcaaggcttgcagtcggatcacctgacagaccacaggggtttattcgagcggggggagataagttacatgtaagctgttgattttcttgctgaaggagacagcaagtcagaggtattctgaaacgttacgcacatcactcttgtgcgcaaaatgctcgagcttcctgccatatatctcgtcgggtgccggtgtctccaagagtgtcaaatgaggttccaaaaggtcccaaaatggtcctctcggcttgtacttgtaatgactgaaggaccgcaagcctgattcagttccaggtagacacacggatagacagagaccgcttccaaacacgcaatatcaatgagtatacacacaaatgaatctcatcaggctgtagattgacgatcgcgcttctgatggccaggtagctgtaatacggcagcagctcgccctcttcttcttctacgccctgcgatttatagccgtacacgtaatggacaacattcgggatcgcgtccgatctatcattcttggccggtgggtaatatgatggagatggtggaagaggcggtggaggaagaaatttggatggtttcacaagaaatggaggaggagacggagctacaagttagaagatcgcggacatcaatggtttggttgttagtctcgaacgagaggcaagagagagaagggacagatatgagcatacattgagaccagctgaacaagaagtatataagctttggaacgaatgctcccagtagcaacagccataggatcctcaagtttaacatccttattgaagagagcaatggcgaaggagggttggatctctgattttccaaagacgtcaaaaattgagaaaacgtcgactcgatcttccgtgcgttctcctgctgaccgagcggctactcacattcttgacgtgatttgacaccttgcttgtccagataggtaacatgcctggttttgtggtatagaaataaagaaaaaggacagcaggaggcagagaaacagtaaactatggacggcgagcagagagtctggaagagatgaaggcttcaggtaacctttgtgctgtgtttcgatcattcgctcttgccgtggtctgtatggaaataagtgtactacactcgatccgtctgcgcttccttccattttgtgcgaacaagcatgtcatcgcatgctgatcaagatctcgacatgatgtttttgatccatctccatcttttctcaaagttctcgttcttcttcttatagtacactgagatagacggcagaaagacttgagaaagtgaccaggcccagctgtaaccaattagatggtcatcgtaaccgccatcgtaaccaacgctaatagcacctccatcgttcgtccatctcgtcgtaccgtcttggatcctacctgaacttatcatccagtccttactcaactatctgaacaatacggcatccatatgttctctcttcgctctctagttcgaccagctcaagtgattcgctccgagcctgcgtctctgcttaggctgatctcctcttcacccagggtgttcgacaagattaccggttcagacaagatcgaccaacagagtgcggaggagcttcttaagaaggaggctgatttcagtgcgttcattcttatcctgttttcatcttcattttcaaagcctcgtatgagaatgatgatggagaaagaggaagtcgatagttctccatcatttgaatcttcgtgctatcttcctttggaaaacaacatcttcggtaatcatgttgaccgcggacgcactgaacgaatcgattgacaactttctttctgatcttcttgcaacgtatctctttcagaggaagggttggttcacactgaacctgaggaaaaggccatgatcaccgcgtaaatcgttctctccgcttctggccttgaatgttttactggtcttccaattgaattctgaatgctgactcctgaatctggaatcgacagagatcggatttccggggctcccggtatgtcctacgatttccaatcaatcagcccatctctacttttccccatgatctaaactgacctcatgtatcccatggacccacagcggagatgacacaccgatccgttcgaatctataagccgacaaagacgacaatgcagtcaggtcgagctgggttcaaccattggcgaatcgatttcgatacgttacagggctctggtcgatggatcaaccctctcatgggttgggctagttcgtaagttcaatcaatacactcgttgtctattctgaagggagatagaccaaagctgaatatctttatcggatgaacgatacagagctgattacatgcagggaatgactctcaaattcaaaacagaagaagaggctgttctttttgccgaaaaacagggtgtgtctttctgttgtgtttctagcctaaatcgtatgctaacgcaaggaagatctgattcacttggtcgcaggatgggactatgtcgtttcgaaacccaacgtgcagccattcaagcccaaggcgtacgctgagaactacgtccactctccgtacgttgtcgtctctatcttttgtatgcctatcgattcacagacaagtcaaagtatttatcttcgaatgttttctcatgatgtaggggaaagcttcgactcgccaggacaaagtaaagccatcagaatctatactgtagattcgttcaagatattctctggttctgctgaggtttgcttgaacgtgtggtattgaagcgatcaatcctcccatcttcactgttgtgtttcgtgttccattttgttgttgtgttacttcccttttgttttgtatgtttcttcttcatccatctgtcttttgttgcaatgtaatactttgtttggtgtcgttgagcgagagggaacgtctcgagtgatgtggttaagcgaagcaagtcaaacaaatgagaacaaaaacagacaagaacttctgaatttccttcatctcatacgtttctttgttcatctaccttcttcggcaattctctttctttttattttgaacacatcaagctttctttattggactcctacacaatctctttcagttcgatagtccatctgtctctttggcattctctgttcgctagtttgcctcactcacggatatcacctctcgctcaagcctcgctggtaagtccatcctactcgtctactataacgagtgtttatggttggaccgagtaatggatctctagataaaagaaaagaacatacacctagagttcttcagcagtagcttagaaggactgtgtgatgtctgtgatggcaagaaacttggtttcttggtctctttttgttagttgctgatcctacttgtttctacttttaccatcctctttctctccttctctttatccaggttcctcttttccatccatctttcatatcttctcgagcaacgaccgctcgtccgtcccaagttcgaatggattccgttaacttgtcattctctccacaggctcgttcagaactgaaccttctgccgatcaataccagttctcggagcaaatcttcatcgcgttccggttcacgttcaggttcaaactcgccaagatctttccagggtagacagagttatctgtcgagcgttaatgggcatagagtttcttcccccatcttgatcagtccaggatctacagaaagtccgtgaatgaaattttgattcaagagatcttctatctctcttgtcgcatgaattggttctggatgcatataaacatcaattgtcaccttgactgacctaacatacatcccgcctatcttgttcttttatctcgcgtgatcaagactttcaaccaccttcctactctcctcgaccgcccccactggaacgacaggatacatctctcagcctgtcgtactactattcctcaactggggcaggtggactcaattctcctgtctacacaactcggtcaatctcgagttcgtccttgtactctccagagttatcttcccctgccaaatccggtttcggaggaaactccggaggtgaagacggatcgaggtttctatcatcgaggccaatgtcttcatcagccatgatgccgactagatcttcctccagaggtgaaccacgcatgggacgtgaagaaccttctgccggcagtttgagcgcgagcgagtccctcgctagcatctccgccaatataccagcgacttcctcatctctcaatacatcagagttcggatttattcctccgaacgacccaaagaaatatgactcaccgaccacatccttgcgctcgtcatcaacatcctctagaaaaggaacaatcacgaaattctttaggcagtcaagacaagcaagtccggtagcagacgatcaactcaatgcaagtccagcaaatgaaccacctcaaaggacgagtttatcgatccgagacaggtcaagtactcgtcaaggcccgtctcgctcgccctccagctcgagtcaaacggctcgtcaaacaggggacgctagtccgctgggattcaaaagtcggcaggcctcatcatcgcaagaacagcagttatctcaagcccagagccattcgttatcccaacaagtctcaaatttgaatcctagtgcgctcgctagccgacctcttcctatccccgatgtcttacgtacaagtcctcaagaggaaccgttgaaaactgaagatcaaggaaatgaagaatgggcaaccgatatcatcaacgagcttgccatggacagtgattcggataatgccgtcgatgctggcgatcgtgacgaccaaacgaatgagattttgacaaagaagcttgagttgcaaagccttgggtctgagcccgacgtggaagtccgagagtcagaaaataagcgagcaactcgggactcctcgcggaaccgacgaaaaggagcatacagggatcacccaccagccccgttgatcaactcttggtcaactaagatgccgaccgctccttctggattcctggcggaagatgagtcgagtcctgtctcacccgaatcagattattatcggtctgcttcgtcatctccgcaaataccactagtccgattgaagggatcgacaacagagcacgagaccggaggagcgtcggcgctacttccggaagataagccttcaagtgatgatacagacaccacacctcgaattcaacaagtctctcagatggatgaatcactcagaacatctattccaagcagagagcgagacatggggttagccagggtcgaagatgacttgcgatcgcctcagacagagaactatggaactgatactgtcaagaccgaggcagaaaccggggtagagacggaggcagagggctaccagagtgagagttcatttgatgatggaacccaacctgtaagacggcagcgccagtcgacagagtactgggatcctattctgtctccagaagccagctcttggttcaaagagaacgcagaaagcttcaaaccgaaagctaaaactatcacagataacgcggaactatctagctcgtccgatcaggcaaacaaagcgagtgagggtatggtaggcaattcaggccgagccactgggttatcagcagctagagaacgtgcggcaaaagccaaaacggcctacttggcttccttaccgaatgctgtcgatgccagcggtagcactgttagatcggctactcaactcatacctactttacgattaccttcaatctctgatgaccaatcacaattaatggtttcaccgacatccaatatgaccgaaccgatatctcatgagccgcgcgactcagtcacttcaacagttttggacaacaaccatctcgacttgagcttgtcgtcctcaacatcgccttcatcgggagaacccccgatgagtggaatgaagcgcacattcagccgggcgagtggtttgggcggtagtatcgagggtccggtcagtctggatttacaagcagatgtcgagatagaagaggaacatgaggatgggggaagactagatagatcccgagacctcttcgtgaggttcgttctgtcatcatctttaatcctttaaatggtacccaaatcggctgatttgtataattttttgtcggtctcggtcttgaatttttgaaacttagatcgtcgagaacgccttcaactaatgatagttctcttagttcttctggacatcaatatagtcactccaagcagctttcgacagcgactattcggccgttgtcacctccgccttcactccctcagatccctggtttcttgtctggagctaccgactcgaccgcaacatcttcacacaattcggccctctccgaaccgccccctgttcaatctgataacaaacgacatagtttgagccatgctcgtacactggaagagctgacggcagctgtcgacagggccattaacgataccgatgatccaccgaattttgatcttcggacggactttggtgtcgtctccagctcgcaggaatttgacccgcaaaccgatggaaatgaaacaacacgtcacttgaccaggagtgaatcaatcaccagcgaggctagcacatggggcgatcacgctcccccgttgactatctcgatcaacccgcatgattcagtagaacttttggatcaagagtctgactatgtcttggtcgagagtccaagtttccctccgccaggagagatttatattcctggagacttggtaaatcttcagcggagaccgtctcatagaggatcccgaacatcagcgcctagagatgttcccattggtccttcgttgtccgtctcatcttcgacgacgttgtcagagctgccttctaatatcatcagagattcagaaccgactatgaaggttcacactcagcaaaatgtatctttgcctccatctatgaattcctcggctttaacgaacgctagacaggctgcgaccaatatgcgtcagcctctcgagtctgggcataacaataactacagcattctgcgagcctctcaatctggtactagccaaccggccaggtctctcaataaagtacatgcgtttgccccaatgggacagtggccaaaagcaatggtattttctgatgtgaagagcgtcaaatcctcgggagacagagcgtcgatgtatgcgcgaaagatcaacgagttgagtagggcagacactggacttggggagtggatcaagattgtgggtggtcacagaggtacgtcacatttgtttttatctaaagggaaatgtacagtttgttcatacatcctttcacttgcttctttgaaagtaggtcagattaagagcacaggaattcttcgacatcagaagccggatgaacatctgacggatcgcaaagtatcggctgcctcagccgtgtcagatgaagcgtttccgctccggtcatctggtccatcattccaggtccaacagatccgaaatgtctcgcccccgtcaggtgccccaccacctaatcttccatacccacagcttgcccaaggcgtaggcatgcgatcgtctccttctgttgtgtcattgaaatctgtgtcgagtcgaccgagcatgtcaaattccatcgccaatgtcgcccaggggtccggagggttttttcaaacactcggtaggagaggaagcatcagcgcgggaagtagcggagggggatctagcggaggaatgaaaggtataattgggggaagaactaaaagtccaccgggggtggtaatcgaagataccgggggacggcatgagggaaggagtagtgtgagtccgatgaagggtctcatcggaggttcgtccaaaaccggaaatcaaaaattaacaggtcctcgtgagtctatctgtcttgtcttttttttttgcttgggtcgaaaggatgtctctttactgaagcggtcttcgtcgataccttacgaacaggctcccgaaatctgtccagaacaccgtcgatctcaaacccgatcaacctcaacaacacgcctcctctaccaccccgtcgatcggtcgacctagatcatcaaatccaaaaccgacatgtcctctttcctatccctcaacgagcatctctatccgacattccatccccgcgaccagcctcgctcgattatccgatcgacgtgaattttgacaaaaatctgagagagatggtagggattcttaaagaggaggaccagaatgtcttagcgggatatctgaggagagctaacggttcaatacccaatgctatcggtgagtcacattcttgttcttgagaacaggaccgcgtatatgtttggtcaacactgacgaaaacgttaccgattgagataggttctttcctcgaagaccagagtcgggaatctatcatctgatcatacagtccttctgttgtttacttttattttctttgcgtgtcaatttgtccattcactatataaccattttcctaatttccctaactttcctcctcttttaaccttttacttgtggtttttctttctaaatcatcaacacttctgtttctgcttttgcttgcaacacaaatcacacagtatacaacatttgtatgcatacgcgccaaaaacctatcgaatgagggaaggagagatcgtacagaaagtatacaagactgaacatgactagaagacgtgacaggttgcatataagagaaacctgttaattaggatattccaaaaaattgaaaaaaagaggaatccgtgaataggtacaagaagaagaaggataatacaagcgctcacgcgcgcgccgccggaccgagttgacacgaaacaagatgaaatttaggggggggaagaaactctatgggtaacctgacgaccccaagaaatgattgcagcttgaagtgcagctcccatgcactagctgactttcaaaaccacatatgcgtataaattgcttgggctaaaacggaggaagagtacctgtactttgaaatccttagttttcccttgttgtcaccaccaatcaatctcgtcctgccttacatgttgattcatcggggttgcatataatcctccatgaagctgtggcgcaggatgatgatgttgttgatagtgaggaggatgcataggtccagttgagggcgtatcgaacgcaggagagcttgtatacggtgagcgttggaacgagttgttcagagatgaggatggcgatggcgacggaagatgaaaaggatgttggcttggaccaggaaaaggcatcgatctgaaagagagtgaatgtagttttctctcttcgttctgttcgtttgtgaacctccgatcctgggcatcgaaaccacaccgtcgattatgatcattactattggggcctagatatgttgagggatcatcatctcgtcggtgttcaaagccatcttggctgtaggaaggtgaaggcaaagggggggtatgtaaagcaagacttaagcttgaggtagagctaactcgaatcgatcgaggttccgttggtgtaatttgtttgtccaacgatgggtagttggtgcgcgatgtcaaatcacgaccggatgaatgaccgactggatcaaaagttgatacgaccaagggtgtattctgtttaagctcgggggcaggagccgaactatacgttggataattatgatcgtgtatattgagagaacgaccagctgatggccagtttagagaggtgaggcatgttgtgttcaaaggataagatgcggacgacaattgagggggtaacgatggtcgggagtaccggtttcctaaagatgtagatgttgtcatcaagtatcggtcgggatgtgcgttccgtacggagggcactttagatgcagtgaacatgtgaactgggtttgacatttctggtgaacatatacctgtggtgagctgagtgtgcttctgatgagaccctattggatttgatgcttcgagcgtgaacgaggaggacgtagagtccgaggttgagcttggcgtttgtggagagaatccatgaccggaagacgaagacgacggtgagagtagtgagacggacgataccgtctcgagttccaactctgtctgtttagaatgagcggggatgacggcgcaagaagcagagtagctttcatcgggatgactcagactggttgtcgcgtggcggagcttgagacttgacgaaagggaagtttggccgactttgacatttgacaacggtctatcagcaagcgcagtggtggtcaacggacgatcaatcggtgaggccctgttacgctttcgacaggctgtatcagaggcctggaaggaataagaaacgggagaaagagagaaagagttgattgatgatgttgacacggttcgaatcgggaaaacgatgactgaagaaacatacctccggatcgattgtccaaagacctgatcagaagagaaggatcattaagctttgatcgtcggcgtttatcgctgttaactacatacaaaagaaaagtgaaatcgagagcacgaacctccttttccagaaagaggggccaatcgagcgttattcacgaaacatggtgtcaacgacagcagatgtctgaccgtattctttacatgccgaggcaacacaaagaccaagatgagcgcctgacgaaacgtaggaagagatagagaaagcgtttatgttaccttccaacccttggtgctcgttcgaaaaaatggatgtgaactctcgatactcgcatatatctgtccagatcgtatccagaacagaattacttcttcttgactctcttccgagcactacaaagatgagagattgaccaacctctgaaacggagagggctttagccggggactgtcaggaaatgtcaataaccacaacatcatcaaaaccacaagagcggcgtcgtaagaaagtatccaaacaactaactctctcgatggcgcgtttgatcaactcgacatatgtcatattaggtttcccagatgctcttgatgacctttcgaacattctttcttccctttgtgttcttcttcttcgtggtctgtagagttgatgggataatgggataatgggatggtgtgagaaaacaaaggtggatacgaataaagaagagtgggatcgaagaagatacagatgaacgaagtcacacttgctccatctctatattttgtcagtcatttcgtcagttgccatcgtactcgccccacttgatctctttacccgggacctgatgctcgaacactctgcagcccaggatggagtgtgcttgtcgagaaacagggacgatataatttaaaagtaaggttcagcctagagagaaaagcggaaaaggaacgcgtccagacgaggtgccgatcgggaagcccaggcaccattacgatgatcatcagaccgcccgaagatcacaaaagtcaaacgccggacaagtacgaagacagcgctccatgattaaccgaggatggtacgaatgttaggtttcggagcagagttctttatttaacgttcagtctctatcattaatagtgtcctttccctgtctctaataacggagttctaaattttcgtccccgttggcagacgccacaggtcgttcaagcttgatcgtcgaaactgattgtgcagcaccgggagagagaaagaagtggaaactttgatgaacgtctcatctattgtaccgactttctggtagaaacaacagatattgatcacgcagcagcgacaaagatttagaatgaacggcgaaattaataacgataaatgaaaagatggtctagaacatcgccgcgaaagtctactcttcgatatctttcccggaccgtttcctcaacttttaaatacatcagacccagtcagtttgatgatgttcgggagaaaaggggagaaaaaaaaacattttgtcacttacagcggcggccagatccatctgagctatccctcctccagctttcggcgctcctcctccgagctggctcagcttgatgcctgttccaccgcctcctccaccacctcctcctccaggcgtaggtctcgctccaattgcaataggtgcttttggcacagctggccggcctccagtccccaagggttttcctaacggaatacccaccccactagccgctccaggcttcggggccatcaccggtggttttcctcctagaccgacaggctttgcagccaacaccggaggtttcggcttcagcccaggtgccgatccgtcggcaggtttgaacccagcagccgatccaggccgcgacgaggctggactggatcgaatagaagacgacccggtcaaagatacctttggccctccgtttgatccatcaaattcgggcttgggtgctgctggcggtgctcgcctcgccggaggaggcggaggcggaggggctggcttgggaggagccatcaactccagatagttactaaaatcagatatatacagacaatcatcattgagcgtgttaatccaatcaactcgatgcaacaaaagcaatcaaaccccaagaagcaaaaggacaaacctaggagcccatccttcggtaccattcttgacaatcaaccaccatccgttcggatctttctccttgacctcgaccacgtcgccttttaccaaatcgacctcaccttcctgaccggcgaacgcgtagagcgccttgtactttgggttctctggctttgccgcaaccggtcggctggggggagcaggagcgggcgttcctcgattgacacctccgcttgtcgccactgcgggtttggaggcgaccgagtgagatgtagggtaactcattcccgaggaaggcgtagcagcagacttgcctggaagcacctgagctttcggaacgatccgcccagcctagtatttgatttatttcgacaacttttttgtgtcaatcgccacactagagccctcgaatggggaaagaacaacgatattttgacttacacttggatgtggattcgaaggtcctcctcgcttcaacagcttaccagacgtgatgggcctgacaatgcccggctttctcttagcggcaggtttggatactgagtttggaggttctccagaagaaacggataccacgctactcttataaacatcaaatctggtgatggactcgtccttcctgaactgaatttcggcctttttgtccttctttttgttatagccaattcttcgtttgaagagaaaccccatcatgccatgcatgtcacagtcaggcttcaagaatattggctttcaaagggtagttcaaagataacttacgtcgacccgatgttgatctgaatacttccattggtagccttatgaagatgagtgatcaactccgttttgaaaacagatgtgaataccgggtcgccctcctcgctcgatgaagcgttgaaagtctgatgtcgaaacagtaaacaaatatgaaagaaatctctgaattagtacagacactctatgacattgattttgaggaagatgttatttacaatccagtcatcccggagattggaaagaccgacggaccggatggtcaccaacggaatctttcggtcgattgtcgtagcgatccgaccgtctttcgcggcagagatcagaaagtatgcagctgagttcgtctgtgatacaagttgaataaaagtcaacctccgtcggggatgtacgcgtcagatgagggaaatacatacgacaacaaggaatctcggactgggtttactcgatcgaccgaatgaagatttcagtagttcaattcggccgctgaagatgacactttccgaacctatatattctcgtacaagaaagaaaaaacccttatcagatattgggcaagaagtaaaagaaggccgacgaacaagaaaacaaggacgaaccactcaagccagcagcctgtctcagcatagctccactcgagctctttcctcccacatccaaataatctcccgcaaaccttctttgactgaccaagctgtatcttctcctctccttcctctctgcgagaagctcatgtccacgttgtcgaaccctggcatattcgaaagcgtcctttcgacctcgccagaatcgttgaatccgactggcacactcatttcggtatcgtaagaagtttcgccaagctcgttgaattcgggcggccatattatgccaatatcgatctcgcattgtctccaatgcaaagagctgagtgaagacgaccaacccgtttccaaagatttcttaataatccgctcaatcaaacaaacaaaaaaggagagaaactcacagtctctggattcttgatgaaagccttggtaacacccatttgccactcatctttagcgattccagtatccttcaagatttgagcacaacccgtctggggatcaccctgccatgtgtattctcctgcatacgacgtgttcggggataagaggtaaaacctttccaccatcttttcaaacgtatttctgtaggcgaagccagctcgtctgactcggatgttctcctgcaaaccaagatacttgacctgatgcaagatcgctttagagtcatactcagtaggactcctgttttggttaggtttaatcgttcggatatatgatggttgggctttcatcaaattatcgaccaacgcattcgcggatgcctgttcatacgttcaaaagggatatcaatattcagaatacttccaaagcaaacgaaaaagaaaaagaaaaagagaaagagaaaaaaaaaaagagaaaaacaaagaaaaaaaatagagaaacggaccttgattcgatctcccgcagtaggaggtctcttcttgctaccagcgtcaattctgtctgggaaaaggtttttcaagaatccatttccggttgtcgacaccaaatccgtcagatctttcacgagagaatccttgtttttctccgtcattcccgatacgttatacagaacctctcccgcgtaatgtttgatcaggaactttgatcctcgagtctcgaagtgttgattggatgtaagaccaccaagtcgttgaacaaacgagttatcagcagcagctgggtcggcatgggcggtagcaacggcatcgttgagggcggcaaagataccgggtggtcgtttttcctcgataagctcgcaaacaacctgtgaagcgggggattatacgattaaatatgcgattgtcaaagagggtaggtgttcgagactgggaaaatgttggacaaaccttgttgttgaagtaatcaataggtgtccatttgatctgttctcggacgtactcttcctgctcggccttcaacgtaagctcgatgaagatctgctgaactgtatagcgaggaagatgatagaaaacaaaaagtttgttcaccctgtacaaggtcgtatttgtgatataacaagagtccacttacgtttctcgttcacgtagttgatacaaagctgctcaaaactatagaggcgcatgaccgacatcgaaactatcagcccatggttttgcggtttgcacgcccggagaaacgagaacagagatgctgagaggaaaaaggtggacgaaacttgttgtcctggaagatctcgaaaccgtaaatatccaagacgccaagcacgtgctcgctcttcgtttttggcttcatcgatacgttcactctctccacaatccattcaaacaagtttgcatctagaagcatcagagagatagatagacaaacaaaacaaaaagaggaacacgtcaaatttatttttgactatgtcaaggagttgatagtgagatatttgtaacagagaagaggcacgtacagatagcttgagacaaggcatctctaccagacgaagcttgaggaacgttgaggggaacatcatagatcgaacctgtttctcaaaggtattgggtcaaatctcttttccctcttctctttacagacggcccaccaaatcgagcaaacaaggtataaaatcttacctcttcgtccacctcgctgagtttctactactctcgaacacaatactttgcttagcgtatctttgtcaacctccatgaggtacgcaataaattcaatgacgctctcgtctggaatcattgagtttccttccgcgttctctacgaacttgacgtttcctaacctaaaacacattgaccgggccagatcaatttatcaaacaagttttgattcgcgagtgagtgtgtgatcttcttctttcattggtttgagtgaagcttatgaaaatccagatacacaccatagaatgatactgatacatctaaagatgttttcctgctcatctcctgagaggccgacgatgcccatagctttgagagtctcgttaaaatcagctacatcgtcgattgaaggcacgtctaggcagccagactgagatgtcaatacgtaggcctccggtccttggatcccaaacatctctgcgagaaaaagttaggcgctcgtagaatataaatcatctgatcacttctatgactgcagcagaagagatggcggacaaacctcgcatttccgcgctggcggacttggtgaactgatagaagatatggaaatctcgctcatttttgatctgtttggtcactcgactctgaggtacgaaaaaatcacagtttgaaagaaaattgaatcatcgtgagaaattaaatttttgtcaagtagatatatcgccacggaccttctcgagaagatagttggtaatttgagccccgacgggctctcctcgtccgttgaacatgatttctaagtattttccctaatatattgaattggaatcaattagcgtcatataagaataacagagacaaactatttggacaagaaaaacgactttgaacatacatgtcgggaagagttgtcgtttcgaagcgtctttgcacaaccaaaagattctagtagaggattggtggccaggaccatatccttgatctttccgataccaccggccgccccacctgtgggaacttcagattctccagagacctcggcgatatattgcatgattcgcttagctgcctcggtctttccggctcctgactctcccttttgtgattgatttccatacatgcgcgatatagatacaatcagcatgaggtactgatggaaggaagtgggacgtacaaaggttgactcacagagataatgacacattggttttctccataagcgttcatagcgtagtacgcgctctcagcgatcgcaaacacatggggtggcatctccagccggttctttcccttgtaggactgtagtgtgggaagggtataaatcccaagatctatcgcaccaatcaaacatcgtcagctcaaggagaatttcacgggtaggtaccgttatgagatcgacacagtgcgacagacctctgaacggatttacagagatcaatacatgggcaatgtaggtctgcatttggagggatggcaggacaaatcaggtgggtaagccttgttctgagtcaactgagattaaaacctatctgccgcagagtttctgatccaacatatcacgaattccctcttgttcggtttgatttgaacgagaagaaaggtcggaggaatgacatacgtaaatctccttgttctcgaatcgcttcttgaggttctcgttaatgctctcattcgagatggtcgagagcaaagtcatgtcggagactcctgcctgtttcttcttaaatccctccttccaatctgccttgaagttttaatacgatcattggttcatcacagatacatgaaagaagtttcaagttaagatcaaatgatgattttgcacgaaagaagaaattgtgaatgagatgaaaaaaagataagcatagacgaaacggttgcacttactttggcgactttacctccattagaggcagccccggcttttgatggagcggcggctgattttttgcccgcttttttagagggagcctaaataattggtagtaaaacgttaaaaacaaagagggagaaggacaatccggtgaagaccatagatacacggttgaggcgtgggattttccatcagcgggatgatgacgagctgtttgaggcaagattctacagcgaatcaaacgccctatggatcatcaacatgaaaacaaactgaccatcttgtataattcttaacagttagtattcagacagaccaggcgaagtcgatacgttgttgtatgatgccgagagtggtaatgatgatgatggtaggtaggtggaaggtgatggctgctcgtattgccgagatggaaggtctccgggcagagtccgcagtcggttcactcttacagccttccccacatcgactgcttaacagaacagtagggaacacaaaacaacttggcagttggcagttggaagcgaggaatacaggattgacagtgcgctcgatatgaagaataaaaagactgatgaatgacaacgactttagagtcgactggtcgttgtatgtctatatagtcctatttttttttcgaacagggctgacgaaacctgggtagagtaaatctcatgcgccttctctagctgtgcgcagatagtagcagagaagaggaaagagaatataaaagacttgattctggatgtgtctctctatgcgaactgcttgcattggttgacaacccagtcgacctggctgttagcttggggtctatgatacattctgggttccatgaccggcaagagtagtcgacttcaaatagttttcaacggtgtacgaaggacgtcttgggtgaacatctcttggtgtccttctaaaacagatcagtacacagatgcatgcccattctctacgcagaagatgtcccccaaacatcatagataagtactagactgtaagttatcggtgtatggtgtgtatagtgtgtttgagtggtgagagttctcttacgtaactcaactcgtctcatttgcacatctgcacacctctccatccccaaacggccatcaccatctctgccctttagtccaacatcatcaccatcgacagatgtcctcctctacatcgtatgacagcaagtccttcggttgaagttatctctctatttcggttgttctggtttgattaaactcttattcttttacccttgatgggatcacatagatctccgcaggcacgctcgtgcgttggagaccgcgctcgattcaaaactcacggcgtactcgaaagtagcatccacaatctcctcaactggtcttgtcagccggaataaggatgagttgagtctgcaggaggaaggtgaaggtattggcggctggagattagctgaagaggaagtcgaagaactcgtcggcaaggtgtgttccgaaactcagcttatacttctttttgattcatccatggttgtcgtctgcttctctatggtgtttagcgaacgagaaaaattgatggatgcacggatacctttatataacaaactgatcatatatcactgccttgttcgttctcatcctgaacctgaagctctccgaaacgctcgaccaactctcggaatggttgaatgaccccgctgtgacgccgagtacgagccagcttcatgcggtccagcgacatcgagaggtccttgccgattatcgaagggactttactcagacaaaggtgttttccatatgcaccaagcttaattgagatctttatctttctgtggctttgctaaccacccgcactgatgtcttggtcccgatgttcagaacaatatccagcatacattgaactctcaaaatcttttaggctcagttaggaaagatatcaagtgaggaccaagagggatcatattctgagccaatcgcttcgatctaaccatttggcttcctctgtccgtacccctcacagcgcatacaaaaccgcaagatcatcaacagcagatgctttgcttaatgagcgaaacacgatcgattctagccatcgaatgacagatgacatcctcgagtacgtcattcttgttgattatttcccggaaggatagcaattcatcggtctgcgtccatttctgaaacatgactgttttgtacgtgttgtggaatcagacaagcatacgcgactcgatcagactttgcgagccagaggacttcgttgaatggcattaactccaggatgggatctactctcagtgcgttcaattccacgctggaaaacggcatttatctgtttattctctctctgacttctcgtcctcctcttgtatctccattttttatctttggcaatatagatacgctaccgggaatgaacacactgcttggtcttattcaatcaaaacgtagaagggatagcatcattttgggttgtgtgatcggtacgctaacggtaggtttcctaatgtatgtcttttaaatcatgtcgaggtgggtgtgaagtgtggtgatgtatggtgatgtatggtggtaatgtaatgaactgtatgactatccttctacgttcttttcgtgttacccttcttctttctctctatttcctgtttgtgctctcatgacatgccattctagatgatttagaaagaacataagaacataagaccataagaccataagaccataagaccataagaccataagaacatcagatgaggaccataagatgtggtgtagagacaacaagaaagcttcaatggtgttttccctgtgcttttcaacttgacttttctcctttcttttcaccatcatcaaccaactctctacctttccttttgtcccttcctctttctcttctctctcttctctctctttctgtctctctccaaaaaccaaccacgcacacgaagaatctttaaaagacattcctttgcgtcacgttttttatccttgtttggccttgtaacgaattctcaacgatcgccctcttctttgacgacctttcttcactcactctcccaacgacgtccgtgttgctcttttgatcttatcattctctgtatcttcttttgcctgttcttcctccttcctatcctcctctctgtcacgtcaaaagttcaagtaacatggatctaaacgatcaaagtcaatatcaaaacctgtcctacacgttccaaaacctcgcactctctccaccccctcctccgcctgccgaaccaccctattctgggctgtctgacccatacgactcatcttccaacccagtgtttggctcatctccctctggcgattactccagtttcatgaccaattcttcttcatcttcctctcagaagattggacaaccagagggcccggaaggagcgggatacgctccatcggacgatggtatcgctcacgggaaatcgatgaatacttctggtatctccggtgctggagccgggagccgaacaggatggtctgggagtcgagccgggagtggagaaggtgggatgggaagtattggaagaggaggttggggatcgtcgaatggatcagtagggtctgtcaacgggaacggtaacccggggtccattcaatcggtcaacagaggaaagatgggtagagctgaattgccctctgtgagtctattgttctccccctcttttttccattcttcgttcccccttgagcttctctgtccgagttcgtgtcgtgtcgacgatcggcgaacgagaagtcactcccggcatctgtttctctcgttttttctccttctattcttccttctggtctagggattctgcttgtttatagatgttgaacctctttcaacgacaacattttttgctatgtatcccatgtatcgtcttgactcacctcattgttgtatcctttcttgtcctcacaattcgattcatgctaccgtcgaactagcaatggctcgatcagccgtttcacaacccgtctcccaatggtcgctctccagtagggtttgtttcttttcaacaacaacagcagcaacagcagtaccaacttggtgacagcacatctacaggatccatgtgtatggttctctttttccatctctttccccactagtcacgtgttcaataattcactaaatcttggtcgatatctttcttggttcatcccaatcgtttagctcccccaattttgcatccgtcccagaactcgacttaccctgtctctccattactctcttcagaatatgtgaacagtcactctcaatcagtaggtgattcttcgtacaactcgtacggttcctcagctttgtcctcgtctcctggagcttctagagtgagcaataatactggcaacacaagcagcaatggaaactactattcatcttcgcctacatctatcacgggatttagcgatgttcatcaatttcaaacccctctccagcatcatcagcatcatcagcatcatcagcatcatcagctaccaaatcatgtgcataatc

SEQ ID NO: 1366 - DNA, 10877 bp, Xanthophyllomyces dendrorhous
ccaccaccaccaccaccacctccgcatatgagcatcggcgctcatctaactcctaacaattctcttcacccttccttgtcaaactcgaccggactagcagtcgggccaggagcaagaagataccaagtttttggcaacggaattcctactggattgataggtggtcctggaccagggccgggaccagctggaggacagagttggggcggtccagcgatggtgcctggcttaggagtcggccccggtggaccgtttgcgatgataccagcgatcggaggtgggatggacgatgatgtaattccgtaagttgtcttcaagattttcctcatatatgatcattcaacccttctcataaatctatcatgtttcccgtccaacttccaggactgcgatcgtcatcaagaacatcaactttaacttgcagaaggaggatttactacgaacaatcgttagttgtcatgtcctttccgtcgagaaggaggcatagactgactatcttttgaattgcccatcgcttttcacgtttcatactgttgctgctaggaatcattgggcgccccccttccctatgcattcaattaccacatggatcaaggtgtcttccgaggtcttgcgtttgccaacttccgaagtgctcacgaggccgacgctgttgtggctgctctgaatgggtgcgtgttctctatatctgaccttgcttggcgtcaaacgtttcaatctaaagatttgacagctgacgtctgattgggtgccttatttctgaacagatacgacgtcggaggccgaaaactccgggttgagtacaagaaagtccttcaggccggagagaaggagaggattgaaagggagaaagcgcttcgtcgaatgcggtcaatccaacaacctcaaggtacttcgtctgataaccatcaccagcaacagcaacagcaacagtcacgaccgtcgacaggttcgatgccttcggtttctacaccggtggatgagtaccctggcattcaacctgtttctcttggtttgggtctaggtgcctcagtgagccccaatggagggcatgctcaatactcccaacatcagcaacaacaggctggaagtcagctgctccatcgagagagaagcggaagtggcgaggctcaaggaatgaatggattaggtattccgacagtacaggttactgctcaaagggattctgaaagtggtttctacagtcagcaggaaatggacgatgtcggagctggaagtgattctggtgagtctagtgattccaagagcagtaagtcctgtcaaagatgattctttgtgtatcttcttttctaacccgttctggcttttctcatttctctatgaccaatctcctgctcagccgagttggatttgaatgatccaatcacactcgatatctattctaggatcttggtcttcaaggaagatcgcatgcgggacgagctcgccttctcgcgaacgctctctgccctacaacgcagggtcgttcatttggtcgctcagaaactaggagtatatcactattctgttggagagggcgataagcgttatgcggttgtcactcggagtgagggtcgagtaggtggcagcggagatcgcacgcttcgccatcacacttctcgaccgaaccttccgactcatcagacgaatcataattctcataatcatcaaggccaccaccaacaacaacaccttcaagcaaatcaaaatttatatgcgtcgtctccttcgctcaggagtaagtcgtccatgccggatctatctcatcttcatggaccagctgtgtcgcgtgatccgacgagggccattgctcctcaaaggtcaagctcgaacctccgagacggttactcattgatggggtccatcagcaatgggatcggtggaaggactggagtgagcagtgtgcatcctagacgatcaacgacaaacccgatcgatcatggatttttgaatccacagatgaacatcccttcctatcatggtacacttctcaagcaggcctcagagtcgacggagagtttactctcgtcggacggtatgagtgctagcgttggacaacttggttcgtcttcatcttcgtcgaacggaggcggcgggggaggggggatgtcccagtcgatggctgcgttgctaagacaaccaagagctccgggcgggggacagaatagtggtggatttggtgtgttcaggcggtttggcatgcctggctctgttgaaaaacaccagttgtcgggtgaaacggcctttaacactacccaagaacctcttgaattatgaaaacgcgttatccttcttctcctcaatgcttcttcataccttccgttccttctttgaacatgaggttttcttcatcttgatttctttaatctttatatttatttacccttgaaactttcatatttcttttcttttttattgtcgcgctagctataatcacttctcaattcttgtctttccttttcgtcctcttctttgatgcctgacacgcctctcatggttccccatcgacgccattaacgtaccagaagaatgactgataccttccctgtttatttctctctctctatcactctctctcttgttctctcccctacctcctgtttcccaagactgttcttggttcacaatctgattcatcatcacaccacatgtcattatgaattcctcacatcactccacgcctctgttcgcgcatctgatgctctccttcttatttggtcgattccttctatctgattccttgttttgtctgacaacaacttgttcttcatctcctggtcttactcatttcatcttttaaaaaaagtatctcatccccttgatcctcttttctttccttatgcttgttttgggatgtttaagaacttcatggcaggagattctttttttctctttcttcctttagaaaaatcgtccgctcttttaagagcggtgatatattttgtcagatgtatgagaaacgagacgaaaggaccagttaggtcaaccgaaattctatacaaccagatgataagcacaaaaaagaaagaagaaagattgaagagagggattaatcggcgagcgccaagtctacgatgtcttctgctgttccccatgaactttgccagcctgctcctccgtgtccatagttgtagaagaccttcattttccacttcgattcttccccttcatcctctgcattcatatttgcgtttgattttgatgctgagcgaggtcgtggcaggatgatatccggaccacgttcaagtcgaattccttccacccgggacggtctaaaaccaacgatgacattttgctttaaaggattcaggatcgaaccttctgaaaccaatggtgttgcagtcgtttctagagatgattctgtcggatttgatgtttgctgaagatgaggtgggaccagggatggacagatctcgatagcgcgggaaatgatcgatgatgtcgtttcttctctaggagttggtagcctttagtataattatcgtaccaaagaagaaaaggctcgatcagtcatcgtatcatcaaaaagtgaaagggaggaagatatgaaaccagggacgaaccaatcgtctacctctctggttccaccaacaatgacatccccgttctccctggggattacatacgttctctctccgccttccccgccagccaactttccaatctgtctcgtccacccagtcctgacccaaggcgcatgaactcgtatcacttgccctctaacaggaaacaccgtctgatcttcaacgccgcccaaagtcaatgcgcctatgcctgcgcagactatgactttaaatggaaccctcccatcgaggagggcgaggacctgaggagaggacagagaatgaagtgaaggaacatggagccgatggatttttccaccgagagtgaggaagtcggcaactaaccgggacaagtacggagcgggattcatggtgagtgatgtaaaggagactgagtgagtggcgaatgacgggagctccgaggttgggtggatgacaaacttgaagaacaaacagatgaaggatcagcgaatcctctacctgatacacaatgagaaagtttaggcgctcacgtcaggatgttcttccagaatcgcgagatgtttctcatctccatcataatctaagggtaaacgaggaagggaagaaagttctccaagcgagaaacataagcaacgttttgattttgtctgagacaaagataaagaaacctacattccgtttgtgtgatcttcattaaccccgactgttcacccaacatcctccactcggtcaacatgacctcgaatgttcttctatcccacttcctttgtctctcatcaccatcatctgcaaaggaaagatgatgagcaccagcagccgtagatgcatagtatgctgatagcacatccgacggaagatggtccgctaagatgtgaacgttcttgttagggttgagctgagattcgatgagtcggatcgctgtggtcagtccgataatcccacaaccgagtacgacgatgggagcatccaaagagactctctccgttattcctattgccatcttggtcgcaggtggtattgttgttgactgtcgtcgtcgccgtacatgcgaaaaacgactatttcttataacgatagcaacataagatacagcacgtgactcggtgcgtagatgacttgattcttaaatgatttgatatctaattcttcattatatttttattctgagtcttatatcatattctcgcctgttgttattgttgttctaattctttgtgccgccaagaactatgcgcaaggcaaaagtcatacaagaaaccataacctcaatctggaaagaagataaggaaagaagaaacccgtgtgctgttgaactgtaagatagagaaagagtgatttggacagcgaagaatgacctagacattgctggtcacttgagcttgcttgacaatccagtctcgcctgaacgttcaaaatgaatgcatagagataatatgagttcaatccgttcgatgagcctgaaagaaaacggaaggcagaaaacgcacatatcatggagaagtctctgcctctaaagttgataatttcgcaagaaaagatccagaaacaatcgatacataacataaagaaaatttaccaggtcatcagacaagctcaaggagggataggacagaaagtagacgaaccatagcttcctgcttctcatctagacctccaaagccataaggatgcataacgtgctgaaatccctcccagacatcaacttccttatcctcactccagccggcctcccccttcttcttccccgcctctttcatctttttcatgaattcgaccgatccttcgtaagcacaaactctatcatcctttccgtggactatccggacaggaggcatgatcttggcggcattgtcgtcgggcagtacaaaagacgccatagagagaagagagactccggaggcaattcgaatggcagagtggtatgccaacggatcagctattccgattgcgtgatggataagcacacgtgtaagtaagagggtttctcgataacagatatggatagagcaatacacacccttgaactcctgagtgacctccggttgatccgtctccaaccccttatagaaggagaatacacaagcttatcagttatcagtccattctctcaacaaatgaagctagactctttaactgattgactcacgatcaccagtttgatcatctggaaactcggaaggactttacataaccccctgccgaccaattggacgacgatgtttgggaccgcctctgggtttgcacccaggtaaggggccagtgtatatattccgatcaaatgaggggcggaaggatcggtgggcactgctgctgatcggggaaacaggctgttacagcatagaggaaggagaaggcacgcacgggggaaagaggggacatgaaatgagaatgtattcttcgttccttctacaaactgatcaaggatatacatacattgcgttggttatcctaatttatgtaggcaagagggtgtggccatttgactctccaataagattttattcatgaacaaagagaacacacgcagaagagaaaaggtaagacacgtacactgtccaaccgcccaaagaactgtatccaaagttcaaatgaaagaagacgactcgaacgtgactcagtacttctctcacatcaaccaaaattatcgagtaagcgacttgacaacaaccacttactgtccacagattactatccgtctccttggttctcccttttccttactaacaaccacaaggtctttcatcacggcttctatggctttaggcaagtgggactcatcttttatcaagacgtgaagtccagaagatctaccgtgctgattaggatcccgtgatagagccgagatgtaagttttctgtgatttgaataagcttggctaaaagagagaacataccgtgggaagatctatgtgtagaaaaacatttcccttgatccgattagcaagtgcggcacatcgatatcaaaggagagtacacgaaccaggaacgataattctgaacccatcgttcaacaacaagtctacatgaggcgcccatctccctccgtgttcatacaagcctgtagaaatgcaggcaaggtgacaaccacaaccgtacatgcacgcgacgttcaagaatggggaagtatcgtgagtccaactggattcactctccatccctcctacaattatatttttccatcctatgaatcatatagaagataacgtaccgtggcacaacatgacatcgattccctcgccggtgcgggaatttgcagaagaatcggaaggctttcggtaccaagtcctgtagaagatccaattggaacccaatttgttcgaaagctcttccttagctatttcagacaattcgccatccatcaacgttaggactaggtggctacactcgctttcaaaaatcgtatgaaaacactacaagagcgtctagacaaaggagaagagagcagggcacgaacctaattgaacatcttctgcctgtccggttccattcccgcgttcatccacgtaaaatcttctaccagtgatggcgattgttgaatccttggcgagcttttcctcagcgggatgaagtggagctaggtatctgccgtacgtatcgtctttggacttgcttgaaggatagaaaaggcccatgtttaatattggtcggtgttgatgggaagaatgacgaatatgacgcgttggatggaattcgaaggaaactaattattccggtctccgccgacttttcctatatataatttatatccattctttgttgtttcatctctttcccttgctatcccttttgaattgtatcgtgactagagcagagaatgagagagagaaaaaggggagaaaaccatcacaatcataaaaaaaagaaatagctataacaaaagagaacaaggtgaagagagagccacatgccctgatcaaggcgaggcaaccttcatagctgtaaagtggagtcgaatttgacgatgagttcaacgcaaggcagagaaaggaagtcagtcgatatgaagcagatgcaaaccgaaagtgatgaagaaaacatacaggccgttattttttctccgagactaagagcaataccctgcgtcttggatcggattctaacatgtcccgagacaataccatcgtctgatttctccaatgacaagtttgccagtgcgtcctcgcctgattgttttgtatgacagaaaaattgatgagtcagaccgattgtcataagtcaattttgaggaacagagagaagagaagaacggaccaaagattgatcgggcgtatagattggcggcaatgaagttgcagtctccagaaaggtaagcatcggatgtcaaagtcgacatatttgtacagctcgcgattcggttcatcgccactcgcaaatcactatttcacctcgtgtcgaagatcgagaaatttaaatcagaaacaatccttttgaaaaacaacaggcggaaagagaagatcgaacgtacgtgatggaagtagtgatcctcaggaagttctcccactcgaactcggtccacatgctcctaaactgagtctcagtacacgttccgggtttgatgtactccatgatatcgatgtgaatatcgctgagcaccacgtttgagctcggctcactcgcactctggccatcgtatacaatgtttccaaagatcacacccgtctcggtcgaagataccttgatggtcgacttgagagagaggaaaccgtggggggcgagagtatgggttgaggcacgctcaacgactttaaggtcgcccaacgtcgcaaactcgaccgatagattctgaagagtctcctgcgtctggttcacgattaagacgtctaggtatttgagagaaatcggtcagtcattgatgtgcacacaacatgctgagagaacaagagatgcttaccaagattgatatcgaaaccatggacagtaacgacagcctcagaataaacaggatcggagaaacctagtatttcccaatatagaagctcagtgctcttttcttaaggataatctcaaggattcgctcaataaagcttaccagtaagttggataaccttgctcaacttggagataaagtcatccttgatgtcggccgcgccggtagcccggatcaaatcagtctcgagctagagtcatacaaaaatggccaggacacaaagggaaaagatcttgttgagcatcataacattcaagctcaaataaaagaagcacagaaaagcgaaactcacctcatcagcatccccgccagtagccttctttgagaattgtctgaatgaaatcgaatcatccacctgaatctgtaccaacttgttctctttcctcttcctctcctcgaccttactcgccgccgccttgaccatttttgcataagccgccttagtatctgctaagaagagttcgtttgcgggtcggctctcagccaactcagcgatcgttcggatgcagttcaggattcgctcttgagaatcctcgtcgatcggcacggcaacaaactttgattgaccgactcgaatgatggaagccatgatcaacatggcctagaaagagtcggaaacgataaccgagacgcacagagaaacaattcaacatagttcgtaacacttgtcgcacagaacaagataaggaacgttcttacctcggctcgaagcgcattgacggccttgatatccgaggatttctcgtgaaatcttagcacgagcttgacgatgcttgatgacaataccgatccagtgtagaaatctccagccaggattaaagctatcaacgttgatagagagttgaacgggttagcctagccaggtatcttaccgaacaaagggatcggaaagacgaacatctgagaggagcagcagccttagcccttatcttggcgatcttctccttctccaataaagaactagaatagacagtctcagtcgcgtacgtcccatcggcaagaaccctggtcgtcgttgagggcttgtgctctaccggaccagttggctcgtcaggtccgtcaatctcgtccaaagctcgctacgataggttgcgtataggggtaagatgtgaaaccacatagagtaaacgtggtagagattcaggatgtgaagagtcaggaatgagccaattgaaagcggaaaaatacggcacgaacctgctccgaggcaagaataggaacctctccgatgatctttcggatagcttggaaagcggagtcaatatctgttttgaatttgtttattaattttgaagcaaacacggtcaatcctcttgtcattacagtctcaggattttttaagaacagagaagagatgacaaaccctcggtctctgcacagtattctccgataatccacaaagcgcctcggaagaccttgccagacttgacgtcactgatagtctccaagagcttggctacgattgactgtcgaagcttggggaatttctccacaacctctctgtatcatacggtcgccgcagaatcaacgttagctttggcacacgcttcaaaggaaggatgtgatttgcaactttctacgaaccgaacgaaagaaataacgtccactgccgaagagtttccggcgtctccgatgaactccatcaacacatgcactaccgacgcagcgacctcagagaaccggatcgcgcacgagtgaatggattggatcaaaagctgtctgtactcgaggttctacgagccacgacggagagaaaaccacgattaaatatcatgacctctgaagacaaattgagaagggtcgaaacgtaccttctcatcgcccttttcctcctgagtgttgatcaactgcttcttcagcaccgcgacgacctctccgacgtttcttccggagacaagttctaatgccaaagcgagcgcctttcgcttgacttccatatcacctcctccagcagccgagttgaggactcgcatgacatccattaccaaactatcgagtacaaactcgtgtttgattctgagcgcgttgaccctttcgagaacgattaacttgacattgttgtcagcctcctttacgcaaagctcgaggaaggtaccggcagcggccttgacggctgccggattggacgtcaaagtagtcaacgaggttgcggcctcatattttacagtggaggatgaggcggtaaggagctcgaatatcgttcggatccactttgctcggtgaggagagtcggaccgggcgtcccgtcggacgaggtcgataacggcgagttgcatcaactcatccagactagaaatttcgtcaaagatagacaacaaatactcgacagctcgaggttgagcgatattgcagagcgacacaaacgcgtttcgacgacaggtcgggtcggattcctgtataacgggg

SEQ ID NO: 1367 - DNA, 10222 bp, Xanthophyllomyces dendrorhous
ttcctgtataacggggtaagaaatgaacaataagtgatgtgcacaaggctatgacagcctgaagagtaaacaaggcccatgtttgactgacagccgcgaggaaggtgaggagaatttcgggagcatcagggatcaggtgctcatgggttttgaagatggagtacacggtgaagaccgcgttttttcggacgtagggatgtcggtgctcctataacgagcagaacaatggccatatacttctatacgttagtccctgtaatttgttctctaggttaacagaagaggagaacgaaccatgcagcttcggacagtagggaccaaaggctcgaggagctctgcttcttgaagcttttgaacagcccgaagagttcctcctcggatgtactcgttgggatgttgctatgagaataacgtacggtcaagagtatcagctttcgctaactagaaccttgaaacatactgaacaaagatgttgtactcaccaaatcgtttcggatggcgttgctgtttgttatgatcaagaaggttatctcgtgagtctcgagactgagatctagtgaagagcaaggcaatcgacgaaagcaacatgggaccttaccagacaaggatcatttcttgtttgagtttaccattctcgtctaacttggggcagattctattgggtagggcgttgaggagatggtgtcaagtgagtggtcagagtttaggtttggtttgcagagaacacgtaagacaaagcaaaagcgatatagaaattaactcactcccaatagaaggcaagcatcttctttatctgcttgttccggttcggcagaacgaactggatgatgggcatcaacaagtttggctgagggtttccattcaaagtggacacaatgatctgggtaagggtatctaacttgagctgatcggaacccttttcgagtgcctgcctgagctcttggaacgaaggcgattcatttcttccttcgttcgtgacgactgtgtatgctgttgggtcgactgtactcatcgttctacacaagaagagagagaatgaaggttgtagaggttcaaaggatgcttggtcgctatgggagatggatgaaaaggccaaaaacacaagagatggcagggatgagaaaaggtcgggggcgttgaataagtattcagatattttacccgaatacttagctaacagttcacccactacagccctatggcctcaatcttggtagcgacattcgcccatccatcagccatggcagcatacagaccaccgcatagaaggaaggaggatagggtggagagtgttgcgagtatgaaacgtactgctgctatcaatgttgctgcagctccatcgatggaacatatcgcttcgatctcacgctctggtggacatgctccaaatgaagacgccctcacccattattccacccaagagtcttttagagcgttcattcagtcaaaggtttgtatgctgatgatattctatcttgtgttgtcttcgtggcatatctgtctgactcatcttgttcggaaacactgggtctggttagggcagttgacaaagctatatgagaaataccctgcgtttcagcaatcctttcggacaatttccagggatgagagagatctcttctattcaatcaccgacattcttcttctttttcggaaactccgagaaggactgattgcttcaagaaggaccgacaaattctctgtagaggtctatgaaacgtctgcgagattagcattgttgatcaccgatcacgcacagctcgtctcttcattgtcaaagctcattccagacttgtacttggcctccaagccggcccattcaaccgagaatttagacacggatggacggagtctttacgttcagatatacctgatatatcaactgtcctatcttcgatcgcctcctgcgtttttatccattcttcgatcctttccctcaaaattcaagcaaagcctcgaaccaaatactcttcaattacctctccgcatctggtctctttcgaactcgagctcgtaccggagactattttctctctttaattctcgttctttatcaccagaacaaacatccttgtccgacgagaagcagatccggtccagtaatcttgatatattgatccagcgaacattggaccttggtttgcttcaatggcgcgaaggagcatgggcaattctgagaacagcctataaggaatgtccagagactttcataaaggatgcgttgggatttaggactgacgtagagatcgagacggtcagagagtggttgaaagctaggggcgttaaggagatagttgaggggtctggtcgatggtcattcgctgggatcacagcatgagatcctcttcggctctcttgtctataagcattcctcctgaggttcttgtttcctccttggaggatgtatagaaaggatagaaattgtataacatattgtattctatcacatgtagattctcaagatcagaacattaatgaaacttgaatgcaggtatagcacaaattccgattgtcgtgcaggttgcataggagatgaccgacgtcatggccgtccacagatgtatccttgggttgtataccatcaacattttcatctcttctgctcaacaacgaagccatgtcgagttttgcaaagactttagagcttgatcctagactaaagttgtcccctcttcagacttctgccgagtatcacacccacacacatgctcgtgcttcttctcatcgacctctcgattctcttccatcgccaatccatacacaccatcacatatccgcgcctgtccctaaagacttacaagccaatgatgagacatccagcaagtcaggtgttggttccatctattttgtaggaaccgctaccgttatccttgagtgggccgggttgaggatcatgacaggtatgtctcttgttctttccgcgattccagtaatgatcttaccccaccaactggcacacgactaacctggctcgtgttgaatcgctctaaatctgactcaatctaatcggtgctgtcagatccaaactttctacatgcaggtgatcatgtccatctgggacctggtgttacagccaagaggctcacaaaccctgcagtcaatctagaggatctacctcctatcgatgctgttgtcctcagtcatttccatgaagatcatttcgatacagtcagtgaaattcgttctcaactgtttgatcaggtcagttttgcagatatactgatttttgaggtgatgtgatgtaacggttgtgttgcagcttgttcagtcggcgctgagaaaggatttaccgatcattagtacacctcatgccgtcgagtcgttgaaagcactggggttcacaaatctaacagctctcgacacatgggacgaattaatgatcgtccccactcatgtctcttcctcgtcctcatcttctcagtcagttctcttgatctgggttcttttctgttcccttatgttgcatgctgaatactctaatcgtttcgaacatttgaacgacacagaccatcgattagattggtatctacacctggtgaacacgtctccggtcctgtagtctccaccttgaacgatatcataggcgctgtacctcctacatcgggatggatccttgagttgcacagaggaaacaatcagaacggacgaggatacaagatttacatcagcggggatactttgatggttgacaaactcaaggttagcctctataaatcttgtcctatttggtcctcttgagcgttcaagacccacaatcaaatccagtgtttattcaagaggtcacgttgttgttgtttttttccctcttgaactcgaaatatcgatctgtatgctcatacgaacggtacgacaggaaattccaaaacgctttcccaaagtcgatttgcttctcgttcacctcggtggaacgactgtacccagcgcgcaggtccgtttcgcgctgatagttatctcatcaggcctttttcttctttcctccatcacttctctcttcgtcttccttatccgagccactaactttttgggggaaaccccctctgtcctcttagcttcctttattgatggtgacgatgaacgctgagcaaggtgtacaattaatcaaagtacgtaccttgccctggtgttcctccccgtctcctttcggatcagaagtcactcactctgatttcttctatttatgactttatctctctctatcacccatacagctgataaagcctttgttgactcttccgatccactacgacgactatgacgtattcctctctccactacaagatttcaaaagtgagatccagaaagcggcggaagaggagagcgagatcgaagctgagaaagcaggaagcgggggtgaaggtgtcagttggctcaagcgagaagtgatattttgggagagaggggacaaatttgagtttggtgtacagtagctgaaatttgttcgtgcttccttctctcgtatgtatttctccttctttcttctcgcctcatcttcctcttcaatgaacgaattagtttagttgtatgatgactactatgtgtacctattgttcccctatgtatcctctgtctcctgtacgattttctcttctatatcaattctatgctcttcacaaagaaaaaagactgtcatgtacatgatatatcctcaatcgtaacctggttcactagaacccgctggtaagaaatggatacaaaagaggaactttatctgctcagttatccaacatgttgttccaacaaggtcatttagatcgatccatttgcgcgggcgcttgcgcgtactcgctataagtggaagctgggaggatggaacaaacctattcatcttcaataaaaacacggactgaaccttgaccccatcgttccatcagcgcgcgcccacttctcgtcggttgactttttgtgaaatcgatcatcaacaaatgagaacataccattagtcaaaacacgttctccttgtaaaagagaaaataaaacaacataggtaaaaaaagacagacagacctgaaagcgataccctctgcagaagtgacttgcattccgaaaatcgtatgtttacaagcgatatctagtaaggtcgaagcaatacccaaccttctggcggaatgagctgtgtgtattctgtgaatacctagttgtgtcggaagtggtgtcgggctttggacaatgatgataggcaagattcaagtgtaaagaaaaggaaagtgagctagaggcaatgatagaaaggaaaagggatgcaaaggggcgtactcgcagaatacgccaccatcgctctcatctttaccatcctcgtcattgccaggctcaactaccatcatctctccttttctttgtccttttatgccatcctggttctgatcttgacgccggctaaggatttctttccgttcgagtactctataggcagatttgatctgttgtacgacaagtgcgcccaacacgacttgcttttttatatctaaacctaggcttaaatcggaacgggtacttgaccctgccccccacttggctttggaagacagtgaagaagaagaaataggagagccgagaaggaggaacgttttggtttggtcgagaatatagtctggaagaggaggggaggagagcgtgctgtcgatcaaggcgtgcaacgcttgtgtcttaacaaatcgaatgtcaggatgggggttccacagccaagaggaaagaaaaatatcagcatgaacaaaatacgttggataccaatataccaagtgaagcaaaagaaaagcaaaccaaccttcttgccaactttcccttgaccacggccaagcacgaccaatacccttcctctccctctcttttttccgtttccaaattctacatcctcttgaacaactctccagcactcttcatcttccaagccgctcttcttcgttcctctcacttgcgcgctgctcttggaacgatcagcatcatcccattctagcccttcgagcacccgtcgatggtgaacccgatgggtaagttcatcagtgggtgataagggttgatacgtcatctggcatatagcgcatgtcttcactcgaggagcgggacaaagcatagtctgctggagaggagtagaacgcttgtttgcttttgatatagaggtaggggtggacgttgtaaacggccgttgattaagcttcgatttagactcagatccgggccgagattcaaacccaggagaatcgccgagggtcgagacaggtctaaagaacgattgaagagacatttgaccgtgggtcttgtctctgtttcttaaaggttctgatctagacgccatgatgtttgtttcaactttcggcgtcgatccgggttgtagtctcgatatcgattcagagtcgatccccaggtcggtagaagaatgaggggatgaagttattgaatcggctagacacgacccatccttatcttcggaagaacacgaaggtagatccacgctcgacgtcaaaggcgagcttggaaggtcatctgagaagattctatctgatagatgtccggctggacggataggtctaatgaatttctcaatataaggaaatttgatcagatgtttgattatcttcttgctctacgcacagctatcctaaagagagacgacgagatgaggccagaagtaaaaggaagactaacgagctagatttgacacgtttaacgggttgagaaccaagttggattcgagagtacgtccggacacgtttaacagatgaggaaggagcgcaggctgaagatgaagcgggaagagaaggaggggataatgcaatgtcacgcatcggttttaataaaaactgactgtgagtacaggacaggatgataagaaggaagtggttccaagagcaagagaagagtcgtgcaaggaagagagatgatcggatggatgaatacggtattgatgatacatgcaattgttggacgacaaatccaagtcgcgtggtcgcttctatcgatgaagtgcagataagataagatcaacattgaccttgaattatatgctgcttgtcaagaaaaacttctgatcgtctagtttatcgaacaactagcgggaagatatagacttcttcatcctcaatgttttctcaccatcagctgctgatggatgacttgacaaagcatcgttataaaagggggaaaatgaatcaggcgaatgtcgattctcgtacgttaaactcgaaaacagcgttatgtgacgtgaacaaagacacagcaaaggaacagggagcaagatatggaaacgtatagaggaaagagaatgcaaaaagtaaggtcccataaaaggggcaaaaagaagggtcaaggcatataaagaggatagtcgcaaagacatgttgagaatgcgtctttcactgtggaattaagagtaatctactcggttcggtgaactgtgataaagaccagatatcctttggtcagctctgctgcatacaccacgaagacataacaaggatacgatgcactgactgttagcagtcgaagtgggctggtaaccggaggcaaagtttcgggatcgaccgtttcggatgacgaaagggaagatcacctggtgataaaggatctcggcaccctagaaggtagataacatgttgatcagtcaaggttactcatttaccgattcaagatcactccgaattgggtatagacatactcgggtggcggggagctggagccagatgaggaaggtagtcttgaagacaaagtagaaggctattgtttgcaaggaatttttaaaacaagtaagcgtctacactatggggtattttgacaaagtgattcggtagacatacggatgtagtctgtttttagaaaacagtggatggcattgaataagtaccggctcggtttacaaaatgaagcatgcgttagacttacacatgaccaatcgaaggaagagagattcgacgagagtgagagtactgaaagaaacccagtaagctgtacgacgaatgaaacaaaatggaaattagcttccggacactgtcatcggttagattaaccccgaaggatacttactcaaccattgcttgtcgtcgttctcgctgggagactccaaagccttcacggaaaggtaggctgggaggacgtaaccaaccaaagtctgagaacagtgatcgagccatcgttcattggatcagtatggcctctgttcattcacatgaacacgacagaaacgtaccgagataggctgggcgagtccgaagaggttaaagaagatcaaggtgacaaactgatgaaaagtcaagaaaggtgtcagtcttggtatctgtacaaaaccaaagagagtcctcaaacttgtactgaccacaccgaagagaccaatgaaggagatcgccttagggacgttagttcgagcctcgaggtcgttggcaaccttgtatttggagagctacaagagaggtgacgtaagcggccgataagctttttttttccctcacccaggccactacccgttttggtaaaggtaaatatatgacaaacctccttgtcgagtccagcaagctgaacattgacggtctgctgaactgtttgatcgaaggtatagtttgtatgatgaacaggggtcgagatgattagagattgcgagagtacatgatgaagatggcgatgggcagtgcgtaccttgtcgcacgaccggatggttcagtacggcttgaagaccggcctggggcttttgctgagcagacatctgattcgttcatgagaacatatgcatcgatagcgacacgatggatgaagtcagtttctggcaacacgtacaaccccatctcttctatacgtcgtcaatgagatataggataacggccgattggatcatgcaggagagaacacagtgcaagagttggctcgatctgtacgtgtgattgctggtcgttcgaaattccatttcttctctctttcttctttacaaatatttcagagcgagaactcttgagaaacgggtactcacgtttaagaaggatatctagatgcgttggtgaagagagaagcaaacgaagatgtatgggggttgtgatgcacgaaaggctagaacgaggaaaaaaaaacacggataccacacgagcacgcagcaggggcggtgttagggttatctggccacgtcagagtcaggatggatatataaatgccgacccttgtcaatgaagtctattaggggaggttgacattttgtataggactctcttcaaaatcaatacaaaaatgcacatgccttgaagatggatcagaagcccgtttcttcttgtctttgcgctcagataaacgttcaagagaaacaagtcatgaatcaagcctttctagaggagtacatacacgtagaaggaaacagtgcgaatatgcttgtgtgtatgtacgtggggtgcgcgcaagagaagtaagaaaaagagaaagaagctcgtagtctttttcggaaagtcattacaaaagcttcctaatcaattcgccaacttcaatcgtccatctcttgcgtttgtttctcatctctctccatctctcctataaagcgaccatgccatcccaagcttatcttgctcttcaggtagggtgtttctctatctattcaacccatacacggcttaaaatctcttcgttacttttgtagtccgtccactcgaactctgttccattcgtcccgcctgtaccgacttgggcgttgggcccgcttgctactgtgacgctttcaatagccttcattggctcgttctatttttcaacgttcgttactctctccttcgttcgttctctttgcatcaatctcctctagagctctgaatctcttgagtctctctcttctcatgtttccaacagtataaagaagaatccggttcaggaagtaggcacggcattggtagccagctcacttacaggtttaggcatcgtagctctcttctgcgccgtaggcgtcaacgtatgaagccctctgtataaatgagagagagaggcaaaacaaaacaaatcgccgcaaaagagaagaatgagtagatagcttaataagggaagtgtgggctcaaaccgccgcttagttggatctgtgattcgaatgttggacttaagaagatagtagggccgatctggtgagccattgtcatccgccttccattctttcttaaccgatggaatgtctcgggagatcaacactgttcttgagctgactgtttcttgtgaatatcgtttggtaaatagaactagaaagaattgagaacggtcgcttagtacaacgttataa

SEQ ID NO: 1368 - DNA, 3455 bp, Xanthophyllomyces dendrorhous
tataatatgttatatacacttctcgtctttcgacccgatgtagtcatgtagtcctgatggcttgcagtacgttcctttcggaactgttctttgatttgaacaaatgataccataaagacggcgcggggccaaaggaaaggatctcttctctccaacttgaacaacacagcgagaatatcacatatatgcatttaaaggtatctcatcgggagacccaaatgtctcccaatccagcccaccgcgctatctctttctctccgactacgctttcagtcccagccatgaccgaatgacctcctttcttcttcgagagggaaggagcacgtacaagtctgtagcctccaaggaaaaccaagcctggtcgagtgggaacgtattgaagcgtaatcgtcttcgtttgtgagtttgaacttgtaggttctacagatggtgcctcctctgttgtctttgtcgacgctggtgatggattgagcccaaaggtttgaacagatggacccaacggtctcaacgtctctttcgaatcaatactcgcttgcaacgaaggatcaacaggaatagaaacaaatcggaatgtgtgttctttctttcctcctcctcctcctcctgctagtcgatcatcttgacttggtgtgaatgacagctcaagtctgatctctagctggaggatccgttcaacttttatctggccgggtttaggtgctcggatgatggtagactcgaccttccactccccttctacttcctcttcctcatctccgttgtcatcatcatcctctccttccgcctgatttgtatcaccggcgtcttcatctccatgatcctcgttcgcttcattggttctgtcaaacggatctcctctatcccaatccctctttctaggcgaaaccaagggagacccagtccctcctggactgagtacacttcgaccagcaactctatcctgccacgattctaacttaccaccaccaccactacctgctgtcatgcccagtgatgatagtctgatcccagcgtttatacctgcccctgtcaacgtgacgaatgacgaaccagaatctgatcgcgcaaaacttggagggttcctatgaagttgttgtattggtaacgatgacttcccgcctggattcgcaaagctgttcaatgaaggtacagggatcatgctgggtaaagggattgtcggctgagaaggcgtctgcgcaggagtaagacggggtagaggcgcaattggaacccggcggtttaaagtagctgtttgtaaatggcctgtttccccataaggtgttgtccagaaaatgtctaatcggctttaggtgattgagaaagataacaaagacgctgttagcacctatatgcatttttctctgtacacattcgaaaagaagagaaggtagactcacccaagaggaagcacgcctccgggttcgccttggctggaacgtccgctctcatccacaatccagcaaatctgcctgatatttcctgggatcaagagcgatccttgtcctccttcgtcccatatcgtactactgtcttcatcttccgattgaatttcgatggcctgaccgtatttgccgagattattcattgaccggaaggttaatccgtcaactggttcaaacttcatccgaggaaaatacataggaaggggggatgtattttggatgtgaagttcgagaaatattgtcttttggagggaaggcgaaagttgggcggtcgtagagctattgggaaagtgtacttttgtcttgaccgataatgggttgatagcttggaacctgcgattcagagtagatataagagagagatgagtatggttctgttccaccttctgcatgaagaactaaatcgtgaccttacttgtagacttttcgaaaagatcgttcctccccttggtcatcctcccagaacacctcgcacactagcccatgttgaccaagttctttgatctcccattcaaccttcttactaagcgcgcaacctggatcgaccccaccaccttcctcatcctttcccgttatatccgctaggacgactttggccgagaccgaatggatctctactcggagcctcactctggctactggcccggtcgttgggttggaaatcgcgatgagtgagcagaaagtctcacctaacgagatcgacccgaatgaggaaggcagcgtcaacaaggtcgatagtccggattcaatcttgacaaattcacccagaacaggtccgttcccagcgttcaagagattttgtctcgaccgtccgaggagagcgtcagaaagaatcgtcggtggaagctgatggctgagcggtggttgggcagagggtgagagagatggttgggatagtcgcatcaccttgagtgacaacggagggatcgatgagttcgatgaagtgacaccggtggcagaaacatgactagggggcgcaggagaagaagtcctggacctagagagattatcggtagaaggaacatggtcaagttctatgtattccgtcgtcacagcagaacaagtcgtatgagggagatacatacaacgatgatattgtgtttgacagaaactggttattcatgtagaaacctttagaatgagagatagagctgaacggtacgtatatcaagtcaagtcgactagcctaggtccaaaagatcaatatgtttgcctcgatgacgaaatgacagtgatgacgatggtgatagtttgaggtagaaagagaagaaggtagattgaatctcctcttgatctgaccatctgctgctgttgacattctatcctgctctctcctacgtaatctcaagcgcttttcgacacacattgatcttgttttcttcatattcctcatcatgcctctcaagggtgagtagtgttgctttacatccttgcgttctcgcgttctgtcttcccttgatctctttcggcagcgtcgactggggaatcaccttagatacggtttagttgaatatcaattaagtctaactggacccaaagcctgccttaccatcatcaaccatcatcactacgaccacaaccacgacgaccacgaccgcctcgactgtcaatcacgagtagctagagggccatcatgtcggacaacgaggtatgctttcaaaatcagaggaaatctagaaatcagatctcgggtattgattgattgaacgtgcctctttctctgactcgctataactcgtctcttccttcgcttcaatcgtctgtactttcctcgggtccacctttcctaattcacctaacaggacgaccgcgctaccgctcaggaggaccttcaccggaaagtattcggaggagacagtgattcagatttctcaagtgatgatgaggatggcaaccgacgttcgtattctgacctgcccatcaagacgcgtttccttgcgtaaaaagtaatggatataccaactcaatcagccttctctcattttgcccaaccgacctttgtctgacgctgcc

SEQ ID NO: 1369 - DNA, 5127 bp, Xanthophyllomyces dendrorhous
cttcaaaatcaccttccttcagtcgtgctcgaggatcagcctctcccgttagatcagcctactcgtcacccgcccggtcacccgtgtcagctcggtctgtatcgaggtcggtctctcccagcgaaggccgagacggcagagacggtgaagacgatggtgattatgagcgagaagaatctgccaagaagatgagctttaagaggaagagtagcagaggcgataaagaatcagcagacggagcagtagaaggaggcaaaaagtcagtccactagcccagtttcttatataccttggtatcagactggcccattgcaaggaggcggatagcccggactcaccgtgtctttctatcaattgattacttcttggtcgtcgataggaaaaaacgaagaaaggattcaggcagagatcgatcggctgagcctgatcttgaccaattggaaccagagatggatgcgggaacccgtatgtgctgtcttttaccctttgatttctctggtcctttttcctttgactgacctggagtttattctcttgattttcatctgacagttcgaagacttgagctcaacagaaagattgatgctattgttaaggcgcctcggaaagccagtaggaagaagaacggagatgatgtatgtctaagtctttccgtttgtattctgcacttcctgttcttctcaaattgatcaacttgcgtttggtttctgttcgattgccgctatttcgatcctcccaatcttctactcaacataggatctggacatgatggcagatgacatgatccagaacatcaaagaaaagatgtttaacgctgctgatcaggacgaactcgctgtggttgagaaacgacctgccattgccaagctagccatgctcaaggaggtcgttgcgattctccaacggtactagttatcttccttcgtctttttttcctcgaaactgacaaacaaaaactgacgagaggccgcttctgattcatctctcttacattcgcagaacgacattaactcagtcaatcattgataacgatcttctaagtgcggtcaaaaagtggctcgagcctttacctgataaatctttaccagcgctcgatattcaaactgctttctttgatatactcgtcaaggtctgtctttcgctttgttgagtgttcctggaagcgattgtactcatcctgttccgctctgtatcccattctttgctcactcgtctaccaattcacccattgaaccacaaagatggatatcgaacgagataccctaaaatcttctggactcggtcagcccgttctattctataccaaatctcgacgagtcacgacgtacatcaaacgacaagcagaaaaacttttggctgcctggtcaagaccgcttgtcaaccgaagcgcatcttggaagagtaaacctgtacctacattggatgatcttcggatgcctggatcttccgctcctggaggtggaggaggtggtgccgggggaggagaaagaagaggtggtgcattgaaggctgttttgggaagtcagaaagcagataatgaggtagaaagagagaagggaaagagaagaggagtacgaatccctcaaagcactgtacgttttttttctcgccacgcgtgttcatgtctctcaaccgatcatctcctgatcacaaacacttgtctgtcttccactcattcgtgtcaaacccctctttcccagcgagtcacattcacccacgcgccgagatacgaaggtccttctcaaaacaacagctctcaatctgcggaattaagtcaagaacaactcaaacgacagagagatatggaaaggatgaagaaaatcaaaaacaaactgaatgcagctaggaacgcggagagactctaaattcctttacctctttgcttcttctctccttcttcctatttggactgtttgatacgtaactccatatcttatcgtcgtgtgtttttgatgtatgaactttctacttggtttcttcttttcagttagatctccgatgagaggttaagtttgcgttctaatcccgacattatcatgccatagtctttgatcatgtaacttcgacaggtcgaggatgatgccatctctttttaggcacacccacaaggacagaacgagatcacggaaaaaaaatcggatgacaggcaagagaaagcttcataatctagatatcgtcgagaggaaaccaagaagaacaaagtgggcgaggacaaagagagagaccgactagtcaagagaacaaggagaacaggaaaggtaaagaaaggaggaaacatgacagaacgatcggaaaaaaggccaattttctattgattcgcgttggacctctcattgataaaagacaaaaaggggtacgggacagatgaacgttgtaaactgattttgtggaagggaaaaatcgataagggcgtcgagagtgaaacgtatgtatgcgtggttaatagtggtcgagtgttttgatgacaggggcgtctgttttgaaaagtaacaaggcaatggtgatggtggtgggggatgatttatagagcagataagcgaaagaagagagaagaagtattgaagaaacggagggtatcggattgtacaataggccacaagacgactaagaaagatgaacaagacgagcttgtctcaggaagagtttactgctgagcgcactgaacctggggtccagctccttcctcctcatcatcatccatatcatcatgcgaatgcgaatgtcctcccggtcctccgtgagctcgcttctccctatcggtcggctcggagagcttgacctcgtccacgtgaatattctccgggtaggtctgagcaggcgttctcgggggaagagcagactcaagtccagcgatgagagccggatcaattgtgtcggggaagtcaacggtaagcttgacgtagaggtctccgagctcgtgatgcctataggaaggcataccctgaccctccaaccgcttcaaagttccgggcttaatgacctctccgggcttaatagtgacgtgaacggcccgatcatcgagatgaaggatcgaaaactctcctcctcccaacgcggtgagaaggtcaatcttgacctcacagtaaagatcatcacccttcctggtgaacagctcatgaggcttctcctcaatgacgatgacaacgtctccaggaattgttccaggggcctgatcggactctccgttgaaggtgatctgctgcccacccttcattcctcggtcgatgtggacctcaagcaccttgcgctcagagttgactttctttccagagcaaaccttgcatcggtgcttaggatcgataatctctcccttggcatcacaatctccacagggctgctggacctgtttaatttgagatgcgattgcgatcagcttcttgtgctacgtatcgataggagtgacaatacgattgataacatgtgatccttatgactgacctgctgcatcataggtccaagctgtcgaagcatcactcggtatccctgtccgttacaggtcgtgcacttcttgacggcaccctcctttccacctcggccttcacatcctccacagatgacatgcttctgaagagcaagcttcttgaccttgccgagataaagctcggcaagcgtgacgctcactcggtgaacaaggtcttttccctttcggggaccctgaggtcgtcggggtcctcctccaccgaatccaccgaaagcctatcattcggacaaagggagaggattagcatcgagtatatcagtatgggttttatctgtatgcacgtcgattggctatgcagaaagaggagataagaaaaaaaaaggcgaaaacgtactcctcctcctccaccgaacaactgcgagaacaagtcctgggcgtccattcctccacccattccaccggcgccgctttgaagaccggcctcacccatctgatcgtacctgagtatcacaagttcaaaaacagatttggagtcaatgacctattcttgacaaacaagggaatatatgaatagcaaagaaacaagactcacagatctcgctgttgagggtcagagagaacctcatagctggtaaagtcagacagtcaatggatgccaatgtaaacggttagtgatgggtttgcatcagggcgagaaacgaggagctggtttgtaaacgctaagcggtgcgctcaacccgccggctcggagaatcttggagtgtataccaatgggagaagaaaggcttacgcatgggtgacctccttgaaagcctcagggtctccacccttgtcagggtgaagtcgaagggccctaaataatgccaaagagaaaggatcggaagagagagaaaaagaatatcagcatcctgttgcgctgaccaatcgagaggttggagaaaaaagtatcaagtggtggaatcagaaaaattaaaaggaagaacaggtctcgcactttttcctgtatgccttcttaagctgatcctccgaatcggtggggttggctccgaggagatcgctttattatgcaaagtgaaagggtaaagagggaggaaacaggatggtaagtaagaattgcatcttgtcagatatgctccgatcttcagccgttctaatgaatcctaactaaagagaagcaactcactagaatgcactgtttcagaaaagcacagaacatgcagccagccagccagccagaaccatagaccgaacgacatgaacaagaaaacatcgtaaagtgtcagtttcgtctatctttcgtcagaaataagcttcgtgtttggacgatgacagttctttttttccctccacctgtcttccgtgctgctcacaaaaagagagagaatcgcaagactggccaacgtacgtttccttaaccatggttttctctagagtggatatgtaagtatagacgaaagaaacagaaaggtgaacgggtgaacaggtggagagtaaagtcaacgaagaggaaacgtccagcttggatttttcgatgaatttctttccttgtcaaagagaaaattctagaaacttttccttctctccacctttgtcttctgcgggctgggccaagcgctcatcgatcgacaataagctcaatcaatactctgctttcgtacattcaatatacaaaagagaagcaattcatctatagaaaagatgataat

SEQ ID NO: 1370 - DNA, 24579 bp, Xanthophyllomyces dendrorhous
gataataatggttccatgtctcgagagagaaattgaagagaaaaaaaggcgtggtggtagaatttttccattgtctgtacagtggctcccttaaatacatatatatctaggaactaggatgggcaaatcgaagcctatacaagaggttcttttgtttttgatacacgagagcaactaaaaagagcggaaagtacaattcaaaagatgcgaaaaacgataatgggaccaaaagaaaggaagaggatactgtttaaccgtctaagaaacccgcccatcgaggatccagtccctctcggactaaccacctgtttccacccagccatttcttaaccctctccctgtcgtctttctcctcctcctttccatcgtccagcacagtcatatcgccttctccttccaacgcgagacatgaccatccgatgatcatcattgctggtggccgttgatcgccgacagtctcgactgcttggagaatatgctcaagcgtggaggctaccattcgttgatcggcagaggacgcacgctcgatgatcgctatagacgtgtacggagggaaggcgggtcccgctcggcttcccgcgccatcttcctcagacactcccagaggagactgaaggacagaaagaacggatcggagtctggccacacccatgagaacaagtagcgtccttcccctttcgtaaccggggagggagaccgctttgccctttctgcccacaccggtacaaagcaccatgctctcggccacaccacgttgggtcactggaagattgaacatcaacggcccagccagagccgagctgactcctggtacgacaacagattcgaaaccgtgttttcggaagaataagacttcttctccaccacggccgtagacgaacggatcgccttgtttgagtcggacgactcgttcaccccgtctggcgccttcgagcgcaagggccatcatctcattctgcgctccttccgcgttccccgggaattttttggcaatatgcagcgtcgttgttggaggaatcagagcgaggatctcggaaggcacaagtttgtcggacaaaatcagtgtcgccgtctgcagtgatttatgagcggcgatagtcaagagagatggatggccaggtccagaaccaagtaggtgaatcgagccttttcgagcgggtacaggagggggagagccaggtcggatagataaagagtggttcgttgtcggcccaccaacagaggaagatgagccggcgacgctcgaggaagaggcagtcccgttgatagttgaatcatttgcgaatatagacaaagctccttcctgaccggcagaagaaatgccagaggggctggtactatccacgaagccctcgtcctcaatacctttggaagcataccgccccaatacgctcttcatctggctctcatccatcttgccgaggtactcaaaaggccagtattcagacacttgagcaacccacctcatccttctttttgtttcttcgatgctgcgcacatcgggttcggtcggaggaaagtacgcaggtgatccctcatgaagttgtggaacaggagaattaagaggaaacgcagagagtgaatcttctcctgggatgttgtcaaagattagaggtctacctgactcttttttaattaagctcggtcgggtggcagtggcggtctccttcgcgagttcacgtaacctacccacgttttcgaccgcgcctccaatggatttcggtagagcactcaggacctctcgtttaatcctcgttgccagcctacaacctctgccgttggtcgaaatccctacttgaagagcggaaagacctttggaaggatcggtatgatcgagtgggaaccgatgggtcgaaggaaatgtaaagtcggacaattcgggatgatctgcgatgttgagtggaatccggaggctcgtgcaggcctctcgcagggcgtgtagcgaacgagacgatcggtgggttgagggggatgtggaaggtgcggaatcgtcgatcactaaaagaaggaggatgtcattcgttctcattagtccttgtctgattcgtccattgggttgtttgtcacacacactcgcactgccaactactacaacaccgttggaagcaaacggaacgtagaacactcaccggaatcagtcacacaaaccagactgacatttgacaacgcattcagtgcgttctcccagcctccacatccgtcttcgaggttggtgaactcgacctgctgacgatcgaccctccacctgatctcttctgaggcttgagagagcgaaagtggggaggatacaaggacttttgcgtctgcatcaagcgcggcaaatgatctagaggctgctaatctattggaaccgatgacgaccacgagcttgtcctttggattgaagcatactagaagcgaggctgagccggtaggctgagcaaatcttggcctagacgatgaagaggacgaggaggcgcaggaagccagacgagatgtgagcggcgtggaaggaagagcaagcacagacatgatggatgacagtcaagacagggaataataatctgtagaaagaagaaagaaaaagagaatcgaaaaggaagaggacgagaaaataggaggatgaggttttgaatgatggaatttgatgaattccgaatatctttgcgccatcgtcgtgccatacacgtctttggcttacgtcagcggtcttatcggtaatttactttcagtatcggtgtccttgagttctcagctcaacagttatcttttttttgctagaccgaatgcacaagagtcatatttgtctcaagatgatatacaaagcaatcatgatcgaagagaactaccatacaagagaggaaaagggcacgacgaaagataagggaaggctagccagccagatcctacgattgacccaaaggagtgggaacaggaacaaagtcgatcgttcccgtgccagccaggatggctccaggctttccggttgcaggaacatcacccccgatcatgtcgtgagggaatccgatatcaaactttttgacacctgtaggattgaaaagcatcgtcggtgttttcagatggagacgagaggtcagttaagagactctccagcaacgacaatggtttcactttatcaagagaaagagatattgaaaagaaggaaggatcagaccttcaatggcctgaatctgctccgggcttaacttgatggaaagagctttgatgttatcgtgaaggtgctgatatatcgcgcgaaaaaaaattagatcagctttgtttcgattgttacagcatcgtctctaggcaagcttgagaaacagtcttttacccacctcgacttttcgaccaccaatcagggggaacacgtaagtcgatttggaaaggatgtctaacggacaaaatcataaaacccacggttcagcgaaaacatcgttaagattttgtctcgaccccgaaacgcaagacaggcagaaccatgacaacgtacaagcaagtgcaacagcagtgacgctctcgacacccacttcctgagcgatcttgtcaaggacctctgaatatttgacttcgtcctcactctgatccccttgtcccatcatgctgcgaattttttcaccagcagcttctttggcttgaagctgaattttggtcccagagccacaggtgagaccgcgttcgagtcatgaagtaaggaagaagatcaaagtgtatgacatgtcaaggtacctgcttctttgacaagagccgtccaccaccgatggcatcccaaggtgctaacgccatgccaaacgtccgggccattggaaggatctcccgctcaaagtctcggctataattagttgtgatttttattattaatgatggagaagaaaagaaaaggaaaacgaatgagattgtttccttcaacaacctcgaaaagttggtacataaatagataactaaaatgcacgaacagcatgacattccatcgtccctggtaaatgacgaaaggtgtcttcccgtgcgctctttgaataagacaagaggtagtgaggttgtcagcgcgagaaaatcgagacaaggacagagacgggctttggttggaaaaacatacttggcataagtgttggcagcagagacgatccaggctggggtatcactgattccaaggtacaaaaccttaccggattggacgacgatatgtaaggcgtccatgacctcttcaatggatgtcgtgtaatcccaccaatgaaggtaaaggatgtcgatgctgatttgaagcgaagagacaacgcgaggatgggttggtcaaattatcgcccccggatcaaatccatctgcgctcacgatggaaaaggacatactaatcggtttgaagcttcttgagagagtctcgcagggatatatgaagagacttcttatgattcccggcagagttgacggtctcgtttttgccctcagcgtacgatcggtagctgccagaaacagagtcaacatctgcgcgacagttgcttgtcgaggcgggacgaaggaaggtgacgattgactcacgaggacgtaaacttggtggcgatcaccattctatctcggtttcctctctccttcatccattctccgatccaggtttccgagtcctcgttttggtagttgttggcagtgtcaatgaaatttccaccggcctcaacaaaggcatcaagcaacttgaagcttgactcctataagtttctccgaatcgaagcgaagaatgtataaattgaatatatgcagtacctgaaagagtgttgtaagcgactgaccttatccatagaacccaagacctccttccaaccgcttcccaagctcatcgctcccagctgaagcggagaaactcgaataccggcggaaggagcgaggatccgcagtcgacccaaaggtgtcttcggttcaggagcaggtttgaaaaagtcagtcatagtttgtgcggaatgaggttatgtagttctgagaaacagtcgggatgatgatgatgatgatgatgatgatgaagaagtgcaaacagatatgagggactcagaatccatcaggttcttatactgttctccctatcaccagacattcgtaatcacatcacctccacttcttgactgtggtgttataaattacggcgccggtctcgcggccgggccgtccggcctccactgtgcaactgggttccaaacgaatcgtaagcgtttgaccagcttgttgaatctccatctggttgaactcagttattgatccgttccatcttccttcgtggatacatcatcagagatttgttgttaatgggtgtgtgtatcgcatagcaagcagaaaagatgttcaatgcgcaaacaaataagagacgccgtatactgagacatatctaatctaatctgttcgatgggtattcatgcttcatcgtcatcatcatcaccaccaccatcatcatcatcaccaccatcttcttattcttttcatgcgacccaccactatcaaacaagttggaaaaatgacatctcaagcagcactaccgtcttctactactaccttgacaagatctgctttgccggttatcttcccaaaatacgccggcagaacagcaaagtctgaagctacgatgaaggatttgatcgagaaagatggacaaaaccatcatatctttacgagtaacaacgttggtcttttctcttgattttctcctcttcttctctttctcctctctttactcggagataagctctcaatagccgtttctggttctcgctttgctcgatacaagatctttcacaaccatctgactcatcacgttctgtcggcatggagcctcggtgcttcctcatcacttctcaaacatatctacgatatcaacgctacagagctagtccctcttcaaccgctcgatagacagaaagccctgatatctagaggaatcaaagtgagagtggatgttccagaaatcactgagagcaactggactgaatacctcgggattgcagagtaagccgttcataagttcgggccggctgtcttttccttctcggtgatctcgtcaccccgatggacgtgaatcatctaaatcaggctgtgtaagaggatctaagaggctaaccaataccttggatcttgaatctgcagtgcttacgcagcctacctcgctttcttcctagctcaaacaaaatctttggggatgaaagacacgctcagcagttatgttttcggccacgaagccgtctgtccattttcttaagacatggttcacgatatctcttcttagctcacgagggtcttgtcccttttatagaacttcgggaaggaaggaacagatgcatccaagagaccggtgatgcttgtccgtctgatggcaggggccgttcgtgagctcagccttctactcaatgtgccgttctagtgtcaccctcgcttactttggcttcacaaaagacccgtttattcaaaccggctttggcgctgagttcgcattcattggtcctctgttgtttgctgaaggactggctgaggcagctgtacattccgtcaagtccgtgcaacctatctttccctctgactggcccgaagtgccgttgagtgaacacggtggggatggagcggcagagaacgtatcggtgttggaagcttacaaaagattggtcgatgacgaaaacgttgtgcagggggattatgatcctgataagatgatcagtactcgaatggtaaatctggtttctcatacctgtttccttcaagtaacagatttcaaatcaagtttattatcttctccttttcctctgatgctctattatcgacggccactgaagacggatgtgattaaaaatggaaatgcccccctcatcaggaaattggtctcccagtggactgcttcccagccagatctctcatccaaaaagaaagggaatgcaagtgaagcctgggtggagagaaagatggatgaggtcatggtttttgcggctttcatagcttgcgccacaggtaaactgggcgaggagccgaagatcgacttttttctggttcgtccttgtctattctcctctctgaggcttcttagctaatttcatgaagttactgttaaatcgataccgatcatgaacagatgcatatcttgacttcatcattgttcctaccatcattcatcccccttctgtccgcacctaaccagataaaacttctcgagacataccttgctgcggccttccagctttgtatgtctagaggccttccaaagattgacggtagaataccttggaatagaacacagtggcctgtaaggcccggaaacaagattggacggggaagagagggaaatggatggaatgaaattctcgaggaagcactatacgttcctggttcgttccgctgtgttctctgattgtttcaggtcctatcttccgctcacatctaccttcatctcttcttcttccacatcatggaaaccatttacatgcataagattctcacaccgtcaaaagcatcaggtcactcttttacctttctaccaagttaggtacatctcccgccggtagccttcccggttcttcactctcttcctcgctgaaatcacagcgtcaagacggagaagaagaaacgttcccagggatggggtcggttgatggttcgatcttcatccgaatggcaggcctcatcatggactacatgaaatggaacggaccggaggccgagagtgcgagttgggatcggtctgccttaggttgggatgaagcctggaaatagcgtcaaattcatctctagcgggtttttatacgactatgtctgattgaacttcagttatgtgtatggtatctctatgaatatgtatttttgttaccttatctatcattccttctggactgtcttatgcgcaaagtcattgtcaaagtcgatatattgatcaagatcagggttgagctgattctcctgattgtgtcgaagcatgtctgtctcagatgattctatgatcccacaatgcatgaaacgtgttggaccagggcggctggtaaaaccgaagacataacgcaagacaagaaaggtatcatacatagttccatgctgaaaaacacatatacaacagataagtcttggaaccaacgcagcagacgcataaactcagataccccatcgaagagcgagggaactcgaaacgacgctgacgctactaagtgccatagcaagcgcactgttcaaccccaaacataaaagtttgtcatgtcaatcctagcatgtggttcttctttaaactgaaaaaagacgcacctccagacaggagcgagttttgttcgaccagcagcataaaagactccagcggccagagctacatcaagtagaaaaaaagataaacgccttattcaaaagcgtgagataatgagagcaagaaggcactcacgaagcgcaatcaggttgaatactaaggcccagcaaaagtttagcttcgttcctataaattcataagacctccaaattatatcagtttttgttttcaacgcaagatcgcgtgacaagatgttgcgaagagtagacactaacgactgaaaactcgctggctgatatgcaagagtgagttcagcgagtcgagggacgaatttaaaagaacgaaatctgcagacacgacagagacttgagagccagatcccatggcgacactgatcaagttcgatcaaactgaagctgttagcacaccaaactttcgttcttccaagtagagtgaaatgtcaaagcgtttgtctcacccaacatcagcagcagccaaggctacactatcattcaggccatctccagcgaaaagaacgaaacgatgaccgtcgacgcctgaacctttggtgaacgatatcgttccctggagttttcgaatatgttcagctttttgttcaggaagaacgccagcgacaacacaagtctcatcaatccccactgatgaagttcaagaccatacacaagaaaagcaacctcaaagggtgagaatcacgaaaagcgcagataatgcagagtttaggagtgagcctaccttgcttggcaaccgctttggctgtcgtctcattatcgccactcaacatccaaacatccttcccactacctcttaaggcgtcgatcgtatctctcgcttccggtcggggcggatctgcgatcgcaaaccttgcacagactgtgtaaccatcatgagcatcagatcttgtgttctctgaggataaatgcttgattcccacaagaactactgatttggcttcttgttgccagtttcgaatcgtttcgtcttggacatatgtctttcccatcacttgggtcatgagagcttcgttcccgatagcaatttcaaatcgcaagggggatctactagtaccagtggtggggaggtcacaggtaacgacagctttgagacctctaccgatgatttcttcgcttgaaccagcagacactgtataagcggtatcatactggacaagctgatccgagcaaaatgtgcgaagcgcggttgccaatggatgagaggactgttcctctagctgttgaatcgctgagaggaggacagagataccatgagatttctggtcaatcccatcgctagtggatactgtcgtcagtaaggaaggcatcgaaggagaggggtaatcatggccggtaactgatggtttcccggtggtcaaagtcccggttttatcgaaaatgacggtatcgactttggtagccgcctggaaagcggatccaccaccttgcacaagcacgcctttttgggctgcgagtcctaggccaacagctgcagctgtgggagctgccagcccaatgccacatggacaagcaacaacgaggacggcgatgaaaaactcgaaggcgaaaaagacacggtcaccaacggacacagtgacgtcgagaccttgcttgatccaattgtcaggaagggcgttcgaaagtacaagagcaagccagacgacaaggacacagattgcgaaataaacctttagaaatgtatcgtgtgaaatgattgaattccaaatcaacaacaggtgcgctcggagaaaaagaaaattcgaggcggagaacttacaacaacaggaacaaacaccccagtaatcctctctgccaacagctctaccgggctcttcattccttgcgcctctcctacagctcttacaatcttttcgatcatcgtttcatctcccagcacctccactttcatcagcacggctgaaccaacattcacagttccagtgaagatctgatcgcttggacctttcttgacaggtttggattcgccagtgagagatgattcatcgaaggaagtcattccagagacgattactccatctgtaggaggaagagaaccaggttgtagaagaatgatatcgtcgatctcaagatgagaagcagggatgagtaaagttgagatgtttcccatggaggctggttcaggaaaagatagacttgagtgggttgaaggcttttcatcagtcgcgaccgcggtatcttgagtggaggccgagactacctgggacaacgtatgaggtttgccatcatcggtactcaaatcaatccctttgagagaacgataagaagactctttaggtatggcaagtaatgccgagtctggtcgaagggtccccaagagcgcaactgcatctccggtctgaacggaacgaacatacgtgacatttgagcatgttccgatgactatagaagcaagcacagacgattgtaaagaaaaacttaccctggatttagcgtatgcttcaaggactcgaccgattagaatgaaaaatatcaagaatacactggcatcgaatagggtcatcatcctgtttcaccccagttcgtggcgaatcttgcaaagtcagatcgatatttgctcgaaaaccgcatggcatagaagtacaacaggagtcttacctctcttcactctccaccatatgtccatcaatcattttcatctgtctgggggttgtgatgtcgacaatcatcattgccagacttgaaaagtaagctgtcgtcgtactcattgcaaccaaaaggtccatcgatccaaatgagaaaaatgtctgccaggagattgttttgacttgaactggttgtgaggtagaacctttggattggcgtcgacgggcagatcggatacgagcggcaattggtcggaaggctcgtcgataaaagattcttcgaaaacgaaataacgatcgaatgtaagttatcagacaatgaaatagaaagaaagacaacacacaagataggtactcacttcccgattccaaactgaacgattgtagctaagacccagagaatgaccgtacctctgctggctccaccccaagcttttttcatccaaaacattctgaatgcactttcctttggcatcaataccattccgacgatagagacaatgaatgttggtatggccaggatgagggcaagtgcaaagtacgtaaagagttgtttcgcttcttttcgctggatcgcccgtgctcgagaggagactaaaactgaacggacaagagtcgaactgaactccgagtcgagatcggccagagtagacaagatctgacggatggtgaaactcggcttggggctgtagataatagtgctcgatggcgatttgagagtcgtcggcgtgaacgagacaatacattttgaggaggctagctcggccagagtagcgttgactttttttacacattgagagcagaacattccttcaatcaagactgttactgttcgtagtttgggaccttctaccgggtttgacatacgcgcggcggatccattgtcggacgatacagtcgccatagtgaggggaattgacgagacaagggagcaatcatagccggcgtcatcgacaatttcgatgaggttttcggttgagagaagagaagaatgagtgatggtagccgaggcacttaggacagagatatcgtgagacttgatcaaaggatttggggagagcagttgggagagggtggatgagcaagctctgaaggtgcgagacaacacaaacggtatgagttcatctgaccatgaaaacaccttgagaagagatataccgagaagagaataggtactcacgagcaagtcatgcctccgaccatgaacgtactaactagcgtatgctcttcaaattcttggattctgtctagagcagccatgcctttctcggtttcgaccccagctttgacctttgcgtctatacccaaaggcctgaccgcgttttccgtttcgagttgtagactctcaacgatttcgacgccatagccggtgtcctcaatgatctctgcaacggcctctgtggagagaatattggaatcgtaaactacggtcgctgagttagacagtagcgagacagaagcacggatgatgtttggtttagtggaaagtgactcggtcagggtattcacacaagatctgtcggttcaaaaaagacagaggatggtcgatcagcatccctgggtggttacacagagtcagggaaaggagagaactgagcaagaggaaaaggggaaggatgacaacaagacgaacccgcaaaacatgccttcaacactaaaaattgtttccagaatccgaggcttcaatggtttctccaccgagacagcgatctcttggccttcatcttgcctagactctcccaccggaccgaccatttgggcccggtcttcagcttgacattcatcacaattggctacatgtctttttcgtctctccacgcgctctttctctctagatgagataaatccgagctttgagagccagctagtcttctgccccatccaggcacgttgatcgtcgcttcgagttgcccgttcatcagcattggtatgccagggagaacgatcggagctagcggctcgagaagctgactgaatggagctgaggatctgaccgctcacctggactcgctcgacatcgaaaccagcttgctgtagaactgattcaacgcgattaacgagtcgtacggcctgcttcttaggatgatcttcatggtttccagaagcagtgattagggagggaagacagaaggagaggatatgggtgagataagagaccgataaggaagatatgctggatcgggtgaggaagggatcgagcaggctagtgatatgagagacacaggatggacaatctttcggagaagcatgtttatttcaataaggtgtgtccatgaggaaatagacctagaaagcgcactcacgggcgttaggtactgatattgatcagcgtgttttttttttcgacatcagacatttttgatcacaacgtatacatttgttcggtcaacttagtaagccagtgcatagagtcgaaaagtctagagagaaacgttgaacctaccaaataataccacctgctggggatctacgagagaggttgcacttgaactggcgtgtgtttccatcatagtattagctcgagccattgagtgagaggttgagaaggtgagcaaggtagtaagtggtgagtggtaagcgacaggtggaaatagtaaatgagaatcgcggcgaccgcttgaccttcttatgagcagatgggtgagtgttttagtggacagttgagacaattcaaaaacaaagataccaagagaaagagcaaaagaagaagaaaaattagtttgctggttgatgttggcaaaaagtgttcagaaaagagcgcatctttcggatggctggagggctttctttgattacgtcatcccggaggttatctttgaatacctccccagtcagagctatcgaagacgcacacagaacaagttgagagacaagaattggatatgcttcacaagacacgattgataccaataatttggacgagggtggcaaggagaggaccaagaggagacgttatggaaaccagacatgtaagaagacgtaacgagcaagaataccgaggaggcgacggaagagatgatgatgtactgccttgataagaatggcagtcaggtgttgtcacctttatctaatcacttcgccacagctgctgtacagagctgatgacgcgtttctatccggactctcttcatccgatctcgtgctgggcgctgaatccgatgattgagctccatcctctatcagaataagcgtcaggtcttgatatccttcgctacatccatcaccattaacatcaccatgggtttcaaagacacttttctgcccaccacactctcggcaacgcaggcttccatcagtgtactccttatcctcgcctacgggttctacgcaaggaaacgaaactggatcaccgaggaggccgaaaaggtagtgtcgctaaccttttctttattgataccttcttgatctagagaattcttcgtagtattctcttcaaaagctcctatgttgactccttctttctttgtccttactccagaacatttctttccttggcacgcacatctttcttccagctctcctgttctcagaaattgggcctctagcgtccattcagaatctcaagcactgttcggccttgcttttatctgtcttctgctctactttagtcccttatcccgaactgacctgttcacgtaaatttggtagactggtcaattcctgtcgtcgcgatcacatttcagctactttcacttgccatcagtctcacgctctcaaaactcaaggtggttccgccccatgtcgttccggccttcatcttcaacaacgtgacgtccctcccgctgctcctaattgagtctctcggctcagctggcgcattgaagagcttggcttctggtggggattcttctgatgagatcgttgctaaggccagagtctacttcttgtgaatacactctcccttctctttttttttcttctcttccattgtacttgatgcccgttgctcatatatgcatttgtatcctctcgcttgcatcaccttatagaatcaacgccttagtcggaaacttgactcggtctgtcgactcgttcttaagcgtgaagtgttgacatatgacttcctactcctcgctcaactaatcaatgaccgtctatctttcatctgctctctctttaggtttgctctcggtcccgctctcatgtcctcctccgatccgcttcctacagattggtcgttcagcgagtctcctttcagtaccgtggttcagaaggttcaggatgctctccctacctcatctccatccagacgtggttcatcagacgagcaaacctccctattgccttctagagaaactgttaaagaaaacgcgttcacgatgaaagataacatccaatcagtgatgaatcccccgttgttgggcggattggcagcagtcacactaggcaccgttgaaccaattagaaatgttgtgttcaaaggtggcgccggtggttgggtcaagccattgacggacagtattagcaaacttggagggctgtttacggctttgcagatgtgagctttggttcttattccttgcttgcatgttagaaaccacatggctgacttgacgctatttttgttccaaattacaggttcatcctgtaagaatttcgtttttttccctttctctatcatctgatccatcattcagtctctgaccgagcatcaactcatgtaaaacttcgtgcagaggcgcccatttgtgctctaagccttctactaaggtctctcccgtcttgctcattgttcttttctcctatcgattcttcattgttcccgtcctatcgatttcttggatcttccttctgttaaagtatgctccttgggtgctcaatggagaccccgttctggcattcgtgctctgtctgtgtccagtaggaccaccagcgttgacgttggccagtatcgcacagatgtgggttgttgtatttttagtgcccctcgacttctctttctttgactgaatatttctctcttcatacaccttttgtctacaggtcggacattgatgaggatgcagaggtctgtcctctcaaatgacaacttatacccatctattctgacgtccttttcatcgtttcgcttgtgggcttttctcgtagggccaaatcgctaggattatccttgtgtcatacgctgtcacgccgttgatttcaattgccgtcagcgccgccgtttggatctgctcaatgaagtactaaacctttcgatctcttaatctctctttactgtcattttcttgtgcctctgtgctttctccttcgcaatcttttctcaaatacacgacacgacatgcgcgcttctcgacctaggaagaagaaactcaaaaagaagtttcgttttggtgtcagaagagacggtcaatcttgcatagaattcaaagttccttgtatcctatgtgttgtacaatatctatattcgttgcttttatcaagtcatcagaaagaaggggagaagaacagacaagatatgcactccgatgaagacgcgatgaatagagcttaatggattcagaaaggaaatcaaacagcgggaccatcaagcttgatacccatccccaagtggtctgatcggacaggctctcccggaggcccagagacctctattgaggtcatttgttgatgtacacgtcaatcaagtctaagtcagtgaataaacgactcgcagaccacatatgatgagatttgagagaagggaggggagagggaaagcaacggacctcgtccctctcgaaatgttcgttctagaagatcattaaatctttttgggtgctgattgtaccgttcaagtatttcgtatttgaatttgaaacgatcgtatagagcatcaatgcgtgatacagaaaagggggaaatcaggatggagacataaatcaagacgagatgtaagtttcctgtcaatcaaggattgagatttttatccaacgaagaagtgtagagactttacctgagcatgaactactcagtcagaatataggtgtaatcagtcttatcagtacagattttatccttaggagaaactagtataagctatgatcacactgactggcatgacctgtatcttcccatgtaattacttttcggtcatttgaagagagttagaagtaagaaacacgttgagacgtcacgtcattgaaactttgagctgggtgagtttcgatgtcaagaaaatgtggaacgaaaggcttacactctgctctactcatgtgatctttcatctctctactccgccctggccatatcaacttatctttatcgcctgttagaatgacagtttttcttaaggatctatcaatcatttcaagcctttcaggagagacatagtgagtcaaacaagcagccgtttggaacatgtttcctatgggcatttggggttttgtaccattgtacctccgagtataatcctatttgcgttgtgcgcccgggtgatgtgatcgatgtttgtgtagcttagtcgatcgttgtagctttcgcaaggaaaggagtaggaagagggtaagaaagcctcacctcagtccgagtgatacgccgggttcgacattctgaatcatccggatcttcctcatccaaccagttagcagggtacaacagcctgatttccctttaatcaagtcagcgcctactctcatcattgataataggcatgggaatagaggaccgtactcaacagctgcgtcgattcggtcttcttgtttcttcgtaacaaacatcaacttcatcatcgtttggagaccctctctcttgaatcgaccagcacgcattgataatttttcgatcaggtttcatgtgcgatgaaaacaactcggcatgggattgagaaaaacgcacaggaggaaggtttcgtctgtatttgtctccggcacttgtgacacataatgtcaaggaggccaatcgttcaggaatcaacgtggctaactccagagagatcattcctcctagcgaaatgaatacggttgtgatgcgcgagcgcacgaggtcagagacagaagaaagtcagccatgatgtaccatatagaaagttgccggatgtgacaacgaacccatagaaattccaacctgtaggagttatgggggacaaggacatattttgagttctaactattcactaattctgccggtcaggacgtaccagatggatgctcttgctacctgtccattctacaaagtctaacaagcttacaacgtcttgagccatagcggatgttctgtgtagccctggtttcagccagggaagtgatactctttaaatcgcgcggaaggatggacgtacgtgtatggcccagaaggataaccagagtgaccggatccccgattatcaaataccaaaacagagtaatcggagagggagccgaaatggtcaacctgggtagaccaactggatgatccgttggaaagacccattatgaagagcacgtgctcctttcccgttccgtgcctgcaatcatggagaccagaagaataatgaggaacttcttctcgaagagggatctgaaagaaaacacaatcaacacaaacaattcatagtagatttcatgtccttttcgttcgtccgtattggtgtcctcgggttcatctgcccaaacccaatgtttccctttctggctacatgttgccggattcaataacgtcttgagatcctcatcttcatcatccgcatcggataacctccggcgtggaggattcggtaatcctgatgatgcgaacggagatggaatgagcgttaggatcgacttaaggagtgttgtcatgtttgtgttcgattgttcttgctgttactgatagtgttgttgatgaccttttcttcgagcatcattgattgtctatcgaggttgtgtcgtaaccctagcctcgatttactgaagtttcaatcttcgtcatccaacctttcacccaccatcattatcatcaccaccacgaatacgacaacaatgtctaaccctcgtttgggttggatcaaatcaaactccatctcgtcctcatctagctcgcctctttcgaatacaagacgctctcccgctccttttgcgtcaacgtcctcaataacatatggctcaagcaacgcgaatcatatcgcctctctgaaggatgacaagaaccggatatcagaatatcaagtatgtttgttccagcatatgatcgcctttttgaatggtcgatgatgaatggttcaactttcttttccgttgacgcatctccttatgtttcatagacaccagaggatcagtgtccaatctgcaaatccgaccgctatcttaatcccaaactccggttactcatctcctcagtctgctaccacaagatgtgtgaatcatgtatcgaacggctgttcactctcggaccagcaccttgtccgacatgcggtagtgttttgagaaagtctgggttcaaaactcagacttttgaagatttgagagttgaagaggaggttgccgtaagggcgaggataggaacgcagttcgtttccttctctctctttcctttcctggtggtcgtacttgataccatgaacgattggctgatcgagagtttgatgttgggtgacttttctaagtttcaacaaaaggaaagatgactttgaagatgacgcggcgtacaacgattatctcgaagaggtcgaagatatcagtgcgtttcattaatcttcgtccagtattgttacacaaacgatccataatactcttgtacttatcgttttgtctcgattggacattatcagctttcaacttgctcaacaaagtagatattcccgaaacagaagccaggatcgccgcttactctcgagcaaacgcgctgacgatctcgtccaacgcagctctattgaaccaagaggccgaactcgaacgtgaacgtgaagaagccgagcgtgaagagagagaatggaggagaagccaaggaaaggaacgagagaaggaagagagagagaaggaagaaaagcgacgagaagatgtgctgaaaaaattggttcgtctcgaggttatggacaccggatactctgtcttcttctcattctcaatctcttctattctctggcctccctttgctttctataggaattctcttctttaccaccatcagctatcgtatctactcgatccaaaaccctggcctcatccgacttgcccatcctagacgcgcctcctagatctgcgctctcaaggttgaaaaaacgagttcaaatagaaaagccgcaaggtccaccgaagccatatgttgacccatatgatgggtacgaagatttgatagggttcaagcagagcggttactttgatcctgttcgtctctttttcctcctacctattcgatgacgatttgggccttatcaatcttacgtccgctctttgtccaattatcccttcacataacaaatgaacagtcactagctccgttcctcaatactcaagacaaaaagtcaatccccctgaaagcaggtggcttcaaaccaacagaagtctgggaacgtggactccgctatgccatggctggtttaacatccgacgtcccaaggtgacgcccatcctctttctcatgtgtcctatcgtttgcgtgcagtaattactccacagtatccagaggaaggttgtttttattatagcgatggcactttgtacaacagataaatacacaaattaagagaaaagaacaagacgggaaggtcgtaaagcaacgagtaggtgagggtataaggcaggccgagcgacaacccggacggaccagatgagaagaacgcgcgatcaaaggcacaagaaaagggtataagccacggctttagttctcagacaattccaagatagtcgtcttttatgcttccaatggcgaactggagatcatagacatgtaggcaagcgaaggagggggacagtcaacgacccgtaaactcagacagacacatagggcgaataatttcgagtaacaagcatgtatattttttcatgaacagatagagtacagaaagacgaaaaagaggactgacaatctcggtcgcgtccactcttgtcccaatcagtttgcaacgcagcttcgtacctttctccaccttgatagatccattttcgtctgtatcgtcattgtcttctgtcttggccatcgagtatgcaggcggattcgaattcggatcgaaaatcatatttggcggcaagtgctgcgaaaagagacgtagaagaccgagtcagtcaagatcgttcatgcgcactttggtatcacattcaagttggatagttgatgttggtttcagccataattgtctactaaaacgaattgttacataaatcaacaacctctgcctaattaaggtcagagtcggatgtccctatgctaatgagtcatcatatagagcccacgttgtctccatcttttgccctgcgggttgtaggacatagaagagaacaggaggggaaaggaaatatgaggatgagaaaagtcgaaagaggaacttacgtgagaggaaacaaaaattgagagaggaccatgcccaagaaaaattcccatcttggatacggtctcgacaataccgtcgacgacctctcccttgaagggcttcatgacaatagccgaatattttgttctgaattctgcttgaccagttccaggaataacttttcctgatccaatgtcaagaatggacagaacagagatgatgtaactacatatgtcaacaccaagacaacaaaagcacgcttagattagtcattgtgctaggtcatgattattgcgagcgaagttggatgttaagttgaaagatcagctaaaaacaagtttgttctcatttccatttggggcgttactcccggatacgaagagctgagtttaaaagttctcatcatgtcgaattgactgtgtgtatgtggttgtgcgtagagtagcaatgagcgaagcagagaacacttacccaatacgtccagagcaagtaccttctacgtcggcgtgcagtttctgtttcagatattctgtcatctgtggtccaaagtaggacggatgaagaaggatagtttcttcaagttctttctaggttgaaggttagacagcgaaggggaaaccaggtaagtcgacggctttatgatggacgagaagaacagaaggaacagacataccacaaagaacatgttgagcaaaacgtgttaataataagattaggatgaaaggaagacacaagagatacaataaagaaaagaaaggaaaagaacgatggaggtcgtggtgcgatgagagagagaaatagaaagcgaaaaaaatctcgttcctgtttttgtactccttggtcctgatgcctgtgttactgtcacgcgcgtgacaagcgtaatcgtcagtgggtatacaagctgtgaatcatcacgtggttacacatccctcttctttttccctatagtacccaccaatatatcatcttcgcactcaccatcagtaccatcgtcatgtccacagctatatcctccacagctgttacagctcccaaaaagtcagtatcatgctttatattgcgctgactagatgtgccgtcacttagtcgcgatttcctagagaacacgaaaatatatatcgtatctggtcccgtcgcatactcatctctcgcttcgtctttcaaccaacgcatttcctccttgcacttgactcagactgagaccagctcgaagacaagtaaaaaagggcgagattcaagcgcctgtacaagaacaaacgggtagagagttgagtgagttgtttacttcttatcgatttacagacaacccttgtaatccactgctcactgatgatcgttcttcccaatgatttagacatctggtaagatattttctgtttcttaatccattcttcacctgtgttctttcttttcctcccactcttggcttcagcagtaacacatatcgagagtgtacttaacttatactgacaccgtatcaacatgaaatcttgctgatcgattcgttcatctaattgtaggtatggtaaagtaagttgtaatctttcgtttatctccctcgccccttcatagaatatgctaatatggccaactgactccttctcaccgcgtatcgcgttcatcgaatatccagtggtgagcacgatatccgttctatgaactgattcgatacgaaacgcgtctcaacgaatgatttgtctttccgcaactatcaggtctgggggtgaccgtgaagattctttccacacacaaacaaagtcattaacccgctgtatcctcgcccgagatgccggatacacaagagcagacgctcttggaacgaaatactgctgtctcttctttgcaagaggttgttgctcgttagggttcgttcgatcgatcggctggtccttgtaggattgatgcgtacgcgtcagaggtgatgataatctacagtcaagctaatttattcctacaacttaatatttcgcccgatcaaacacatgaccaatcagatccgactgcactttcttgcatcgactaccttcatcctcgcacatcttaccagacctttccatggactgctttggtcgagagaaacatgctgcttatagagacgatatgggaggagttggatcgatgatgcgggtaaacagaacgtgcgtttattattcgtcttctcgcttcggcatttgccaaaatctctgactaaccgaggtttgcggctatttgtaaacatcaggttgtatatcggaagagtcaaagaggaaggatccaagaaggatacggaagaagtcgtccgtaggcatttcggagagtggggggatatatatcgccgtgcgtcactctttctctcctgctctctagtttcctcccttcacttcgattagtaaccaatacatattctctttattcaatatcaacagtcaacgttcttcccggtcgaggagttgctttcgtcacgtaccagaccgagatcaacgcccagttcgctagagaggccatgtctcatcaatcactcgactcggatgaaacgctgaacgtccgatgggcaacagaggacccaaacccgggcgtgatcaaacgggagaaacgacgggttgagaatgaaggccgtgctgctattcagggaaaggttgatccaactcaggcagaggctgagattgtgctacaagctttggagagaggacaggaggatgagttgtacgcgttagatgaggaggacgctagggacgagaagcgaccgaggctgatcaaaaagtctgaaacgaaccaaccgagctcgcagccagacgatcagattccagatgggggtctgttggatagggatgctctggagggtatgaagtatttcctagagattaagcgaagaagagaaacagaggaggcttcaaagacggagactgcttctcaacctgttgctggcgggctgggcctcttgggagggtatggctccgaagatgattcggattgataagattgtctggtgtttatgttgtatcctgcccatgtgtttataagtttacacatacaaataatataagaaatgaactatcttgcgagacggatgttttccgagacgaggtgactaacccgctcgcaatacgcgtgttcgaagtctgcatgcttggcatcttgcttcaccttcaccttcattctgtgcaccatctaccttcgggttctccaacattcttatttcgattctttgcccatcaattagaactagaatcagtccagtcatgaagttcaccattgttggttgcgccctcggttcgattctctcctttggcttcgctgccggtgagtgttgttttgatcttcattttccgttaacctcaatgctgctctgttcaagtagttccagcatcc

SEQ ID NO: 1371 - DNA, 27772 bp, Xanthophyllomyces dendrorhous
ctctccaccttcgcttctgtcttcttgcctcctcatactacattgacacgtcatgcttctgatgaatcgaacgagatatagctcagacactgacgatcaatacgccgtctagtgtcactcagtgtcaaccggtcttgctctcggtaagttggttcctcagtatcttgagagaagagtgaaagaacggtctgcgaatattcggaaattgaaccttacccctcaattctcgtgtccttttgtctctttgttaccactcctatgtttttcggttgttgttccctctatacctctgaaactcacaacttcacaatgacaacactggcggtcaacaactaacgcttgtttatatcgacacttcgtacttgtcgtacgatggcctggacctgataactttcatattttggtgtatagtggaccgatactttggcgccgtactatgtctacatgtaagagtgcttctctcttcctccattcatttgaacatctgctctgtcaagcaaccagcccactctgatatcgttttctctcagtctaccgggatcgactctcatcaatccatacgagaccctcagcccggtcgatactacctcggtcacctggctctgtgatcttggaactgggacgaccgtgacgttcgccgtcaaggacggtcatggtacatactctcattttgtctcccttgctgagataagtagctgttgtcgttagattatgagaagactaacttcaggctcggattggggcgtgtaatgtaggcgccattcaatacactggagttaattccgttatctctagttcaaacactacgtggtgagtttgtgatctgatcaatcttctgggattgagatgactgatatctcgggagttgacgtgtgcatctattttcagtatcggaacggtgtgtcttgtctttctcgagccctcccaatcagcatacgcatattcatatgcctggttcttcctttcgaaacttttgttttgtagaacgctgtgatccaagcatctattgcggctcaatcgtctgcttcggttgcttcagtagggacgacttctcagtcagcctcggccaccagtgctggtgcttcctcaacgttcgttgttttcaatcatctactttgatatactcttttgcgcgtgcgcgctttggttgaccttcatgatcccctctttttcccatcttatgtatcgataacagagcctcagcttcggctggaagtagcgcctccaatgctgtatcgtcggcctctgcctcggctaccggagttgcctcgtcaggcgcatcgacttctgttcgaactttcaaatccatcggtgagtcaagtcgtatctgtcgtctttcttgaatatcctgtggaaacctatttgtcgaaaaacatcttctgacacttactaacttgtgggcttcctcctgaactctgtttgaatgggttcaaaaggtattgtgcttggcttgtccgccggagttgtcggaggcgcgctattgttgtaggcttatttacctctgaaggctccatcgtcttccacagttcctccgttcctttcttcttctcgtacacattctaaggcgcagtctttcggtttcgtccgttctgtgtcgtctacttcggatattcttgttttgtttcccttctggactgttcaatacagcttcgttagcttggttacctatttacataattgtctccctaacattatatcccaactattcggtttatgtcattttgcttcctaccttgtttagtattggtctttgtgctttcgctcttggtttccttttcaactggcattccctcagaaggatgtcaagtcatgcacagtattcaaacgacaacaacttcacatgcaagttgaaggatgagaacagcctggtatatcaatctgaatacactgtggttttgaaaaaagcagaggatggctcaaaacatgggtacgacggcattcagctttgctgcctctgatacgcaagtattcgttcgagatgatttttgtgattttgattttctggttttgcaatcaacatcgacctttggcttacaccatcatcaacctgtcaccaattccctcaggctcgtaaactcattgacccaattctacgcgtatagcctgtgggacaaacctttctgggcacgcatcttactatcccagttaataccgccggcacggatcgatcaaaccccgggaagtaaacgagagatacgcgtcgaaaattaccttttcttctgagcgagacgcgtctccctttctctagatttataaatcatagacaatcatgcctagagaaatcatcactctacaggttcgttctccttacgactattctttcagattcttacatggataggtgtctagtgaagagaggggtggtgcatgtcaacttatgtatgagaggctaatgcaaaggttggatgcgctttgggctcgtttctgatggggttgtgttccttgatcgggttaaggctggtcaatgcggtaaccaaagttagtcagatcgcctcttcctgtctgttgtgttctgcttaattatcttgactgactcggaactatctttactggctggtgtgatgctcatgtctatttggaatagttggaaacgaggtaagaggatgtttcatgggatccctcggagatttttctgaggtaatatatttgctgatcagatcatgtcttgggttatcatgctcgtggtaccttctcgtattgaatccagttttggcaacgtctatgcgcagaagtaagggtttcatcattccgttccacatgattgtctccttcagccactaatggaggaagagtacacatttggcctcatagcacggtatatcgaaggatggaatcctggaggatttcgctacagaaggtgtcgataggaaggatgtgtttttctatcaggcagatgatgaacattatattcctcgagcaattttgattgatctcgagcctcgagtcagtcctgtttctcttctccctaagttaggaagtatctgctgtatatgtgtgtatgctctgactcctttgaaaatgtacttcgggggatcacaggttatcaacacaatcaaatcatcaccattcgctgggctttacaatccggagaacatcttcatggacaaagaaggtggtggtgcgggcaataattgggcaatgggtcacggcagaggtgaacagaagtatgaagatttgtttgagatgatcgatagagaggcagatggtagtgattcattagaggtgaatgaaacccctcagttgttctgctcctcaacaaaaactgacctcactagtcaacccttgtttatttaaccaaacgtataagggcttttcattgttacactcgatagcaggcggtaccggatccggtcttggttccttcctgctcgaaagattgaacgaccggttcccaaagaaattaattcagacatactcggtttttcctgatcaagagtcctcagatgtcgtcgttcaaccatacaactctcttctgacaatgaaacggttgacgaaccatgcagactcagtagtagtcttagacaacgcggcgttgagacggatagcaaccgacaggttgaacgatgagaacatgtcgcatgatatgtctcaaatcaatcaacttgttcgtcttcttcgtttgcgtgtttttcaaaaaggtcaatgggctgatctgacaatatgttctctatttctatcggctggttgtaggtcgcaactgtcatgtccgcatcgacgatgacccttcgataccctggctatatgaataacgatcttgttggacttatcggctcactcgttcctacaccgcgttgtcatttcctaatgacatcctatacacctttcactaatgataatattgctaaggttcgttttcccttggactttcgcttgcttctcaggagattctgatcctctctctggtctctcctttttcgtttggcctgtgtttcttctcctcctacatcaatttgaaaatcctcattcaggcaaaaccgatacgaaagacgacggtactggatgtgatgctcagactattacaacccaagaaccgaatggtgtccactacgccgaccaggaccagttgttacatcgcctcactggcaatcatccaaggtgatgttgatccaacagatgtatgtctcttttgtccttacatatttctttcttccggtcgaatatctgatggcatttccttctgactgaccattaaaacacatccaggtgcataaatcccttttacgtatccgagaacgaaacctcgtcaacttcattccttggggaccagcttccattcaagtggctttgacgaaacgatcaccttatcttcagaccagtcatcgggtcagcggtctcatgttagggaaccacacatctatcgcctcggttcgttcttcgtgaccttgccactcttcttctaagcatcctctccctctttttggcgtgcctttaatcttgttctaatttatattttaacgtgcgggaaatagttgttccaacgaacattaacacaatacgataaactacgaaaaagagaagcatttatcgagcagtacagaaaagaagctatgttcagcgacggattggaagaatttgatgattctcggttcgtgctcttctttcttccatctttatctttttctttttctatttctttttttaccgcgaaccactaaatgctccgctaatcttgagcttgattctttcgtaatatttgatatcgggaaaaacagagcggtcgttcaagaccttcttgaggaatataaggaatgcgagaagtcgacatacgtcgattacggatcgatgacgacgagcgcttcgggactcggtggtggttccggcgagagtttaccacctagagggacgtctgggtctggttgatatcttcttccttcctcttcttgttggaaaatctaatcgatctttcatcaaggaaagagagaggtagttggtcatatatgttctagtctggtccggtccggttcgatttgattttctctcagggctctttcgatttattttacttcagttcaggtgatgtttgtggtccatgataccttcttctccttatcaagaaatataaacaacttagggagaagttcgtgtattatatcttcattcgtgaggtttcaaaccttaagagggaatttaagtaaggaaaaagaaggttcaccaatcacagatggaaacacaacacaattacaagcttcacgacatacatgacaatcagataatggatagtggacaccttccagaagttttccagggttcgccgccagaaagatatgaagggaacgacacaagaagacatattgaatacaaaggtaagttagagaaggctcaggatcttcctgtctgtgcttctgttcgacgagaattgtgaccaccggatgtaacggatctcgacccaaataccggaggtgctgatgatgccgtcgttgtatatgatggagtttcaaggaagacagctgatctaaggactctggcgattctgtcatctttggcgaactgtacccagtggaaacaaaccccgagtataaatgaggcagtcagacagacgggtacacaagaacttagagcaacgggaagcacagacgcaagaagggagcttactttaggcaatgagtctgtagccataccctcaaagactgacttctgagcttcctcgaaaagcgagatgatcttctgcaactgtcctgccacgcctactggcataaagcccggtgctggtgagggtgcgcgttgagaagactgtagcggttgtggttgattgtttcgaacaaacaaaaaatacgaggcaatatctttcttgatcgaagagggcacattgatctctgctttcgatcggggtgtcaaataggtggtgtatctacgtacaatatgctctattcggtcacttatttgctctgaacagataagaaacaaaaattaggaatgagacttacatctcaattgccagttccaagagcttttgttgatgcgctgccatttgctcggagatccttcccctggtcgacccatatcctgccacaactacggcccccattgtcccaccaacctctgctgagctcgtcatccgatacctctctttgaaatcctcaacgtcgcaccaaaaattcagattctcttcacagaagctgagtctcatgaactccctgaagagtcctctcaatgcaggctctttcagtattcgagaaagtttcgccgctcgagaatccttcagggtttgtgcgatggacactccatccctagtgcctggtctggaaaatggaatgtaccgagtcttggagccttctttgttaggttttggcagaacaggttgcggattaaggtttagattgggaggtggagcgatctgcccgatggacgcagtctcgtttactatgggtaacgttcccgagggaagtttgctcaaagaagcagtcgctagtttcttagtagacaccaaggccgcacgggtcgtcgtttcatgcatgggtttgattggattgcccagagggagtacggtctcggacgattcagtctggtgaaggggaggcaacgacgtcgtgacgttggtggccatgtgttgatgctctgatgatcgctctgaggagagtttgttcgctgtttggtcagactcggcggttgagatcaaagtagaagaaataacagattctttgaaataccctgggctgagcgagcttctcgccctttccgtcctccaggcgagtgtcgtccctgccgaagtgatcttgtatactgtcttttcggatgctcgaaattcttcgttgttcgacgctgtacgatatattccttcgggtgacatatttttcttgcgtgttgttattttatatggcctctccgtctttttgacatctctgcccttgacatcggtagtcacacagatgatccaaccgagtttgacccagagcgcagcaagctggccagcctcagcgtatccgatagagctcgtaaaatcgcaaagccagtcaagagcagagattgagttgaaacagtattcggttgaacttgtgccggctttattcttctggaggcttatcccaggcgtggaaaccagatcatccggattcaagctgtgaagatatgacgtttgggagaggtcactttgatgactcaaatcagaggaaaacgatcctcgacggttaatcttgcccggcatgtttgaaggtttattcagaaacgtgctggctctagaaggatattggtatggagtcctaggaatgagaaacgtcttgggtggttgaccgacaaatcgacgaaagacctcttcaatcatgggttggttttcagagacaatcatatcgtcatccgggtgtcgttcaagatatatgatcggctgaggacctgccgggtatgtcgagcatagcttcgtaaagtagggggtgtgtattccttggcgagcgatgaaccgctcgaggctgatgtgacagagatatgtccgttcagaaacgctgatgactgtgagagacaagtaagggactgaaagagaatatataccgacacgtctaatcccttgggtgatagaacccagaccgctcgttctctgaatctcgtcgagctgagatcagccgcattttccttgaggaaacaaaggtacaaactcagcaccaatcaaaaagcgcaaaggaggagagtgatccatacagaccatcaatctggcgtctaccatttgctgcaatactcctttagcagcgtcctttgtcatagagaacgtggtggtcgttgtcgtcgtctttatacgagggccgtgcttgccagggttcgaatcagcgagacgaatcgattgagagaacctgagggaggccacgttggtcagagcatcatcgctgtagtaaacagacagaagaaaaaaacaacctcatcactctgggaatgttcatgattataaagagagaaaacgtgtgacctacgaggtgaatgaatccggatagattttaaagaactgcctgtttgacttcagattcagtgagatgagcaacgtcgagaataaatcatgtataaactgatgtgaaaacgacatgttccacaaagaaggatgagtgccagtactcaatgatcacaatgggtatatgctaagggtcgagaagataagaagaactgtacttgcgtgagtaaaaagccttcctgaggatgtctgaggaagattagattccgaagttgtggcaggtgacgaagtgtgaggcatggcccttgttcaggaaggggatataagtttgaccgagatgccagcagatgggtggaagagagggagatggagtagaagaaggaatctatggcaagaaggacggggaaaagaaggtacagaaggttgtaaaggagaagggatccgtgcgtcctatctgatgagcagccagtcagtggaatcacagtaggaacccagagagtttctctacagcaagggtcatcagcaacatggtagacgagcggcaggatatgatcgctaacatctagtcagtgttgttcagagtgagccactctagaaatcaaggatgacagaaagaaagagagatgatgagcttcgttccatcgtcgtttcacaagagatggagttcttgtgttttatctcttacttccactaattatctttaccatctcactcatttcctctcttgtttcttatcaaccaccacgactctatacacgccacttctagatgacagactctataaggttactagtcatcaatcccaattcttcggactccgtaacttctgctcttcggacatcttttgatcaatcctcaccgcctggagtgacactctcgttctggaaccctcggtcaggaccggctggaattagtgatgagtgagttatatctctgtttttcagtatagtcaagtgctacaacatcagctctgttctctttgccttctgagacaatactctattcgtatcacttcttcttacctgtttccttcctatttgatagacaaacggccagggagagtacagacgcgtgctgggatgaattgatcggagaggacgatcgggtattgggcaaaggcctagaaggatatgatggatttctcatcgcttgttgtaagttctctctatctttcttcctatttctccggtgcccatttgtgtatatccaatcgaatactgatgcacatactggcgctttcgctttgcttgatgagaacagtctctgagcatccgttgatatctgctcttcaggctcatttgacaagacattcgtctcgcgctaaagttctcggcatgtttcacgctgctatcacccacgctctcctgcttggctcaaagttcgggattatcacatctggaaccggttgggaacccgctctgacgaaaggagtcgccagttttctcggttccccaaactctgatcgtttcgtcggtgttcattctacaggtgtcggcgtggttgaactcagggaaggtgacagacagatggtcaagcaggtgatggaatgtggctccaaagacttgctggtgaaaggggcaggcgtgatcgtgctcggttgtgcggcgatgagcgggatggaaagctggatcaagcaagcagcagacggggtggcagtagtcgatggcgcaagggccggagtggagctcttggttggattggcgagagctggaaactagaacactaaaaagacagtcatatcaggaaaaacgccactcagatatagatgtatcgagggtttcgtatatatatgcacgtatcgaaaacagcgggtcaaaagaaactaatttgatcgagagcggatgtgatagtgattcactcatggtgagtatagcaaaataaaaacaggtcattcttatttctttccagacgacctaagataaaatcaagaagccaatttattcagctggtcagaccttgttgccctagattagatgaatcaacgaaagagctcacttcttgatacctcctccgagagcacctcccttggccactgttgatagtcaagaggattcagcgaaacttcatacgtgtgatcgtcgaaagtgagattcgaaacactcactcttgtctcgagcagccttcatctcggcagcctcattctttcgcctctccaaggcagccatatcatcctgtaggtccgaaaatgatatatattgttgtatcaacagatgtaaccataccgaaaggaaggaatagagcatcaggaacgatgcttacatcgtcgagctccttggtggccttcttggcagccctgtggtggaagtaatttgtcaaggtcagccaaggaccatgaaaagaatggaaatggtttacaagacatacttgagcggcttgagttttcctcctatagatgagcggagataagatcgatttggataagatataaggcttaattcagcatagaaagagacccatgctgctttactcaccttgacgtccagacattgatgttattagagaaaggtagtatgtgtgttgggcagggctgacggtaaggatagaggaaggtaagagagggaggtaggtgcagaaggatttacaccttaggtggtttcgaatataatttcatataacacttatgtaaggtgatgacatatttccagcgggttctctcttttttttctcttctttcttctcccatcggacgaccaccaccaacgacaacgatagcatcgatcggtaagccttcttctcagtctgctcaagcgttgtggacacccagctcttctctgggtggttgatccgtcgaattctcttctgcgtgctcaatcttgtcttttcatcttttctgccctcaccctcgatcgctcatctacatagaatcttctcgaactccctcaccaacatcgtcactcgttttttaacttaaatcttacatattcaaacatcatgtctgactgggactctcacgttgtgtatgtgttcctcttactcttctctttcccttggtttgggagttcggtttgttgaaggacggcatactgatcctttttcaatcgtttctctcgctccactctttcctcacatcacaaaagtattggatcgaagggtcgacgaccggcggttgccaagactgagtctgccgttaatgccgctcgacgatcgggtgttgctgtcgatacttcttccaagggagtcagcaacaaggctgccagaggtcagtcggcttttaccttctctttactccctcatcttcttcactcggccgtgagctccaattggaggccacgactgattgcatgtttctgtcttcttttatctttgatcatatgattgatcgatatgctatctgatctgatcaacaggacctgaccaccaaaagatcgccgctcttgaccgagatgacgaggccaagcctccggctaccgtgaatccttcgtgagtgatctgccggattcaaattcgctttccaacgactgtacgctaatctttggtggttggttactctgcagcgtgggatccgccatgtcgaaagcccgaatggccgttaagagcgcggacggaaagtcgatgacccagaaggatcttgccactaaggtcaacgagaagcccagtgtgatccaggattacgagaacggaaaggccagtaagtgcctaaagcttcctctttgtgttgttggattacatatagtcctgtttgttctttgatttgtggaccaagggcttacaattcatccaccaacctctcgttttgcaacctagttcccaacccggctcttcttgccaagttggagcgggcgctcggtgtcaagttacgtggagatccgtccttgattggaactcctctcaacaagcctggatcgaaaaaataagcgaaacccgtagaaaagaagaaagggaggagaagaaaagacaacaagatcaaagtggtgaagtgattgctggaatcatgcttaggtagatgcacctgtaactttttttttcctctcttcccttttgattttgtttcctcatgaaggaacacatcatgtatcaatgtcctacgtctcgaatacttccccctgtcattggatgacaacgcagttgtaaaaaaacacattgatgaaacagaatacaagtgcggtgcataaccctaacagacgctgttcattcgccccagcaaacatctcaatttctttcctctattctctcttacaacacccatcgctcctttctttcttagttcaggaaggccgattagtcaataattctactctgatgcagagaggatattcctcccgatcagatactcaccctcccagctcttcgacacacccggacctaacgttctccacagactaccaggatactgaggatctagggttaccgctccatcataaccctccttcacatcatcatcatcaacaacatttcaatcagccactcttgaacagctctcacatggatatcaatccagtaggaggaaacccagcttccaggcgaagagggaaactcggagcaggagcagatccagcagaagagatcgataatcgaggctcaggtggaggtatagagatgagacagtttggagttgacggtggaaggcaaggaggtagtaatcagcttgaaagggataggcccggaaaagaaagaagagtcagaccagcgttcaagccgcctgccaagaactgggttcgtttctctcttctttttgtttgactctaagagacatgtgtgtcgccacgacggagatgtctgtgttcactcgccatcctcctcacggctctagtcgtcaatctctcgtccatgaagagaaagaagagctgactagactgattgttttcgtatgcgctctctatcctcattgtaatctctgatcatgtagaaggaattcatcgaaaacaactcagaacacctcatcccgctaggttatctgatcctttcaatgatcactaggtactggaagatcggaaagagcaactctgtcgtttgggacgaggttagttcttcaatacattttccctcgccgatgacggcaataccaatgatgagaagatcacacgggtactaaaagatttggaatcttcgttcatggtcttttcataggcccactttggtttgtccgacctccttccttgtatcaggagtatattcattgaagtgacgcacgaagacaaggaaatactgactagcactttgttgcttcctctcaatgctcatcaggaaagttcggatcgcattacctcagaggagaattttactttgagtacgttgccttttgttacaaacatccgagattgaatttctttcaaagctgagattcctttccccgtctcctttcctctctagtgttcatccgcccttaggaaagatgcttgtcggcctggccggtctattttctggctatgatggaagcttcgactttaaatcaggggaggtctaccctcctactctgcactatactatctggcggatgtacatggccacctatggtgtgctcatggttcctgtcggatggtacaccgccagagggcttggttggagtcggttcgcctgtcatttagtcacactcatggttctcctcggttggtcgattttaaacatttcttatagggggtgacaatcagattcgttaacagtcatccactttctatttttatccttaacgatgagcgatgtagatgtggggtggcttacgatctctaggttcatcctgctagactccatgctccttctttttacgttcactactgtccttggactcgttaacttccataaccaacaacaagagtatgtctgcccttggcatagaggggtttgagttgaagggaatacgcaagcgcgcgcctattgctgattcctgacctggttttggaaaattggtgcatgccagctcgttctcggatgattggtggctttggcttgtgtttaccggtctttctattggttgtgtcattaggtcggtctctttgctgttgcgtgtcaagagctcgttgcaatccgaaaactaaccttttcgtcttgtcgccattttggaatatctcagtgtcaaatgggtcgggttgtttgtgaccgctcttgtcggactctacactatcgaggatctttgggacaagtttggcgacctttccatgccctttgtacgttctctgtatctttctgctttctactttctgttctgattgtatttctggcaggcaagtctgattgatttgaaattgaattaaatacaaaacaaaacccctttctttagaggacttacgtccgacattggatagctcgaatcgtaggcttcatcataattcccgtgtcggtgtatctactcagcttcaagcttcatttcttgatcttgagaaataccggaccaggtgattcccagatgagctcgttgttccaagctaacttgaacggaaacgatttcattcaaaacccgctcggtgagtttacctcttcttcctcactctctattgtgttttggttctttaacactcgatgagaacttcttctttaaaaacagaggcggcgtttggttcgaaggttacactaaagaacgtcggttatggaggcggtctccttcattcccatattcagacataccctgtcggttccttccaacagcaagtcacgtgttatcattacaaggatgataacaatcaatgggtcatcacccccacttgggaagccgatcctatcggatctgaagacgatatcaaattcctccaagatggagatatagttcggcttgtacatgctgcaaccggtcgaaaccttcactctcacccagtagtcgccccggtgacgaagaccaacaatgaagtttcctgctatgggaatgctactatcggtgacgcgaatgactattgggtgatcgaggtcgtggacgatactgttcgtgggaagaaggatgaggttaagaaaagaattcatagtttgaccacgaggatgaggatcagacatctcaattcgggttgttatatcagagcggcgaacggtgtgttgcctcagtgggggttcaagcagattgaggtctcgtgcgataaggacaacaacccaaaagatcctcatacgtattggaacatcgagagtcactggaacgaacgacgtaggtctttcccgtcacctttctcctgctatttgatctgactgctttcttctcccctcaccgtttctgatctggtctattatttctccagtccctaaaggagacgccaagctctacaaatctccgttcttttccgatttctggcatctgaacgtagcgatgatgacctcgaataacgcgctcgtcccagatccagacaaggaggatattctcgcttcgaatccgtttgattggccatggctctacttgggtctcaggatgtgtggttggtcggctgaacaatcgaagtattacttgatcggaaaccctgtcgtttggtggtcgggaagtttcagtttggttctttccgttgtcgtcgtggggctctacctttttagaggacagcggaagtacaacgattttggaattggtaagtgattaatcatacccatcatttacatgtaagaaatcgaggaagcagaaaaggctgatcttcttttggctctgctccttccctcttaggtgaatgggatcgatttatctttgggatcaagctatctttcggaggctgggcccttcacttccttccattcctaatcatgggacgagtcacctatctacaccattaccttcctcctctatggttttccgtcctcatggtcggacacttgaccgatcacttcatattttcgaacaggagattaactctccgggcgaaagccatctttttcggactgtttgcaggagcggtgattctagtcttttggtggttcaaaggagtcagtttcgggatcgatgggctggtggaggaccattggggactcaagtggaggaagagctggaatgtaggtcttttcttctttctttcagcatcttttattcttcttctttccatgttctagggaccatgaactaaatgtgaatcttggtttccattatcttttgtgggaacgatcagatctacaactaagggtagagtacaagccagaaaaaaacgagaaattgaagaacggaaccgacgatcaatggccgttttttccctcccgtcttttcatcgctcaatttcgccagccaataagacgatccctcgagactgactccataagatgacaagcaaacgattgagaacatttcttttctcatatttacgttataaagaatacatagagccgagactgaactttagatgaaagtgaaaatgagagcagagcggagaaaactgggctcgagatgaaaaggacgagaagaggtaaacgaaacgtggggagaaaaacgagacgtaaagaaggctccgttatggttggagatatggtagtcgcaagaaaacacagacaagagagaaagaagacatgaaagaaacccccctatgcgaccttcgagacaaaactaaactatataagatcgaaacactttcatttcacttttttagagcgtgatagaatcttgtttggccgattcgggcatgtaaatatccaaaagcgggtacttgtccttccattgtccatgaagatcgccaaagacttcgtagagaacctctcggacgtggttgacatagatgatctcgatgccttgcttgacagaggcatggacgttggcctcaatgtcacctcggcaagcggcgggaacgataagctctgaaaattgacaatacaaaatgactattaacacgacaagacgaaatgaagcggaagaaggaaaaaatacgaactcttgatattcgctcggtgggcggcaaggatcttctccttgagtcctccaactggcaaaacttggccaccaagagtgatttctccagtcatagctgtattggccaacccaaatttgaacacaaagttagttgggttgtatttatcggccaacatcaaattgacaatgagtaaagaagaactgaccaatgtctgggtcaactctagtcttcgtcatcaaactgacaagcgcggtcaggatggccgtaccggcactcggtccatccttaccaatcgcaccctcaggcatatgcagatggatatcctgatcggaatttcctccgagaataatatccgtctctttgctaacaataccgagattgaaagcgttcgctcgaagataggatacagcgatcttgacagactcgttgatgacctctccaagcttacccgtcgtctggacagcgcccttaccaggcatgacctttttggtaggaacaatcgaatggaccatgattaacaaacgatagtagcgtttgaagagaaagaacgtaactcacggtaacctcgatgggcatcaacgcgcccgctccatttccagtgtaacccaaaccgttgctaactcccggcggcggtgccgtcgagtatattctatccttttggtacaccggaggtcccacataatccttcaggttgtcgcctgttatgcgcatcgacaccgtggtggggatggagagcggtttgacctgttgggtcgtcgtggtaccagtaggaagagtttcgctcggagtcttcaactccgaggatgaagaggttactttttcggcttcggcttcgagagtcgcggacgaaacagtgggttcaggcacagtgccttgagctggtggagtagtagcagaggtagcggcctcgacttcgacctcggtcttggcaggctcagattcgtcaatatcctggacgatcttaaatgcggccttccggtagatctattccacccaaacggttgatccaagcggggttgatgagaatgtgtcttcaccttgtgttatgtatcgagaatgaagagacgtaccttctcaatctgcttcttcaggtttcggacaccactctcccggcagtagtactgaatcagtccgtcgaccgctccgtcctcaatcgttacatcggccgtctctagtccagaagccttcttggcttgaggcatcaagtagttccttgcgatctctttcttctcgtctgagacgtaaccagaaacctcaaggacctccattcgatccaacaacggagcaggaatcgtgttaagcatgttggctgtgcatacgaataaaaccttggaaagatcgataggaaggtccatacttcaagatatgaaagagaaaatatgattaacgacaagatcaatcgtacgttgaagagaaaggattagacggccaagaccaaacttactagtgatcggtgaagtttccgttttgctcaggatccaacatttctaataaggcagaactagggtcgccgccatatgaaccattagcggagcctccaccagagatcttgtcgatctcatcgatcaaaatgagagggttttctgcctgggtctgcttcaatgcttgaaccgctttaccgggcatggcgctataggagaacaagctagttaagaagctgttgaagttcacaaggaaaagagagcaaggagaaacttacgcgacgtaggttcgtcgatgccccttgatttcggccacatcacgaaggcctccaaccgaaacacggtagaacttcctctctaaagctctagcaatcgactatgaagggcgtgcgaagaacgaccgtgagcttatgattttcaacacctattgtgaacctcaagaggacgaaccttggcgatacttgtttttccaactcctggaggcccaaccaaacacaagattttaccctcaactgttccccgaagctttccaactgcaaggaactcgagaattcgatccttgacatcttttaaaccatagtgatcttcgttgaggatccgaagggactgaggaaggttgaaagaatcaaccgttcgctttccgaatggaagggaggtaatccactccaagtatgttcggacgacactgaaaatttggaacagatatcagtacaagtgaggaagaaaagagtggtgcaagacaagggtatggaaggaggacgaacttgaactcgctcgagttgggctcgatcatggagagcttgctcaactcactatcaaagacttgtttgacctgctcaggcataaccaatccctcggccgcctgtttaaacttctccaccaagttatccttgacatcgccctttccatcagcctggccaagctccttcttgattgccctcatctgctccatgagaataacttccttctgcctctcatccagcctagacttcatctcgccagcaatcttggctcgcatgtcatgcctcatgacttcgtttcttaaaatcctggtcaccaactttgatcgttcttctagggaaacacaatcaagaagctcctgtatctcaacaggggtggtgttgggcgaggttccagccatgagatcgcatcgttctccgagaggtagggtcaagatagcgctgtactcgggcaagaccgacgagagcgcctgccggtagccgggggaccgctcacaaagttcggtaaatgtcgcatttagttcgagatcaagttgagtaaggtccgagtaagcgatcgtgttctttgcgggagcagggctgtcagcaacatgagtaatctgtgcgatcgaaacgggatgcgcagagaggacttcaataggggtctttgtaggaagagctgtgtaaagatcaagtagaggcataatcagctatgtctgggtagcccataacctaatgtaaacggcacaagtgatacgaaccatcctcgggttcggactcaaagcttgtcacctcgtcagagctcctgcctgtgatatcccaaggcataagtcaagaaaacttaaatatcagacgcgttccctatcggcgtgctcgagagtggacaggaaaggcaaaccttcgctcttcttggtgactggctgagtatcgtcttcgctcttttcgaaactagtcacaccagcctccggcccctcattcgcctcggctatcacggtttcattttcaactacccccgtcgcgttttcctcgacagtaacagagtcgattgtaatcctgctcagtggctgaagacgcatctgccaagcctcctccacatcaggatctgtctgaccggcaggagcggatatgggctgaaattcatcgatgtggcaatagagaccagtggtgtggacttcggatttgtcgtgaatgatatcggtattctcacccttgagactattgaatcggattagaggagccgataatttagtcagcaaggatagtaaattgaatgataacatatagtcgtgtgcatacctataaactccaacgtagtcgattttctcagagatcaggtgtctcaccgctttaatgacagcagggttggtaacagtgaagactatgtcgataaattcaagaaggaagaaggggattgttggttgagctgaagattaaaagaaagagaggatagataatcgagacgtacatttcttccaaggtgggaggaagctcgtcgtcacagggatgactaagacttggtcgtacttgggaacaggtgttttgatgaccttgatcttactagaccttccacccttattgcctctcgattttggcttgatttctgctgtggcaggaggagaattagacgagggaggggcggctgctgctgccggtggaggggaggtactgtccgacgaaggcgacgcaccgggaggaaccgacgatgaggtcgaggtcgatgatcccgatccggtggcggtggaaatggaagaagatggagacgtggtcgatgtcgatgtcgatgtcgattgggaagagaagaagtcttcaggaagaccgtccggcttttgtgatgttttactagtcaacgtggaagtggcggctgaggaagggtcggcagcagcgggatcggtctttgaggcagcagcagaggccttgctatcagcttccagagccttctggtccttaacatcagcagcaggtgtatccccctcgccttccaaatcagcgtcctcatcttccttgctcacagggttctcccagcttcgtctgctagagaggttcgtccaggtggaagaaaaggatcggacgtttgatggaatggatgccgtcacgatggaagcgacaggtggaggtctgagtgagttaagggaaagtattcgaggtgccaaagaagacagagtccttgtgacagccctctggtgagcgtgtgccaaccttgaggaggatcgagacagcatgcgagtttcgatggagatgacgaaagagaaacgagatgaaatgaatataggtaacagaaggatgggaatcgacgttaagaggttgaagtgcacagaaaaaagacgcgatgggggaggaacaaatcagaagagggtgacagattatgtaatctgtatatttgatatgcatatatgagtttatcagataagcaaaagttacataagtgtcactcagtcatccatgcccaaacacgagaagaactgctcatagttccatttttgttttctatcaaaagaatagaggaaccatctagagttgatcgcaacaatgagcgtgccggggacgagatctgaaggttgtagagagtggaggatgggaagaggagggcggagtggtattacagacggagaaacaggcacatgccgtataaaaggatggaaagaaccaaatggaaatagcacacggggccaagaagaaaacgactaagaggagaaacagaaaaaggaataaaaagaccaaagagaagtagataaagatcgattcatgatttctactcgtcgtcctcctcatcatccatctcctcggtcgacttcttctcgactaccttgggttgcttgaccacgagtgccggtttgggtgcgttcgcagcggtcaagggaccggccttgaaaccctggtcctcacaccagaatccggaaagagtcacctggaacgttctgtgatccggttttcacgcgcgaggaagatatttacaagtggacagcatgcatccgttagttaaatgcatcggagttttgatgatagtgtgcagatatgccaaacagaacttacgccatcatctctccgcagagcttcaagagctgggcctgctcggccgtcagtactttacccttcttgcagattacatggggagccgtcaatgagggaacacctttaacaagagaagtggcgagtccgagcttccgaagctgggggtccattgagtgggggaagggcgacgtcgggtcgttgtacatgagaagaggacctgtaacgtatacaagagaactcagtacagaggaaaccggagttggcataggcagaaactgataacgaaccaacgggaagggtaacatccctggcagcaacgttaccggctcgagcgaaatcgggcttctggaaagactcgaagtactcgagcgtctcctttggagggtggttggtgaagaacaaaccagtgggcccgttaagttgctatttgagacatcgaggggagagtcgagtgagcctgaggatatttggaaaagaacagaaaaataaagaacgaacagccgacactttcgacaatccctccttgtactcgtcttcaggagtagttcccagagccttgcccataaccttgttccttccaaagaagagtcggccggttctagatatagttcaaagtcataactatcattagacggtcgaagaacacactgtgctaccatcactgagactatgacttaccctctccaagcagctcgaacctctttcaagtgcgagtttctcatgtctccgacgttgaacaaccaacagtaggtccactcatccgcgctttctctaacctgtaggttcccaccaagatacatgcccaccaaggaacaatcccaacacgacacgcaagattacacaccggacatccgaacacgagcaggttgttggaagagcatatagatgacgttgtagagatcgagaacaaggcatataagtaaggtcagacaatcacgcaggactgtaagtaaaaggtttgactctctgtgtcttgttcagaagaaatatcatgcgaaaagagaaaagagggacgaacggcttcaatcagaccagacttgtgctgcttagtcttcttatcggtcttggtcaaagagacgaccttctctctcttggacttaggcatgatagataagagtgtttgtgtgggttgggaagaacgagggtatgaggtgcaagtggtcgagactacgggtggatgagggatcaagagaaatattgaagggagggagcggaagaggtcaaaaatctgtgaaacgtgacttgtaacttatggaaagggctgtgtatatattttaattttatttcctctcacgaaatttgagaataatctgattatcccctttcgttgctcgattcatccagattttctcaccctctcacctacccacttttagttctctatacaacaatggatctcacccaggctcagatcgatgcgctcgagcacactttgctcgatcagactggtgctagcccgttgcacaatagattccgagctctttttaccatcaaggccgtcggaggaaagaccgcaattgatatcatctccaagggtctgttcgactttttgtcttcctttctattcttcgcttgttccgtttatcccggatcgagttcgattttctcttgttcttcctcacctgactcagataattgctcctgttcttaaaatctcggcaggtttcgccgatccttctgctttgctcaagcatgagttcgcgtacgttctcggacagctcaagtctgtcgaagccatccctaccctctctgcggttctccgagatttgaaggaagatcccatggtccgacacgaggtttgttttcttcctagactcttttttttctctttttctttgtccatctcaaacatgtcttgacgtccgtcgttccttttacgcataggctgctgaggcactcggtgctatctcatccttggaatcgctccctttgctgagagagtacctcaatgatgagcatgtcgaggtcagggagacctgcgagattgcgatcgaaaagatcgaatgggataactctgaagccggtgagaaagaggctcggaaggtgctagattctggaggagtgttagttaattttctctcgatcactctaccgcacatacacgctaacatattttcttggcattgtctccgcgtagcccttactcctcgatcgatcctgctcctggtcactacaccccatcaccgatggctgacccgtcgaaaggcccgcagatgaacctctcaatcccagagctccgagcaactctattggatgcgtcactccccctgttcactcgataccgggctatgttctcgcttcgaaacttgccaccaagccaagcctcggtcgaggctctcgtcgatggatttggagactctagcgcgttgttcagacacgagatcgcgtatgtatttggtcagcttagcagcaaatggagtgtgaagggcttagtagatcgattaagggacgacggagagtgcgagatggtgaggcacgagtgtgccgaagcgcttggtggtattgctagtgaaggagaaggtcagtgttcatttcgattattctcctttgttgttgccagacacatcacatcatgcttacccgtttaatttgctttccttgggatccatgacgaaaatgaacatatacagacgatagcgttcttcctctcctccgggaactctcaacagatatgtctctcccttcggtcgttcgtgaatcctgcatggtcgccgtcgacatgtacgaggtccgtgtccctcttctttttcaaagccccatccagtctattggcttgtgctgacctatatctttcttcgttccatcaccctcacttctggtatatcgtgcacaccaactctataaacaatacatagtatgagacctcgaatcagttccagccattggacgaactttcctctggcaccgttgttgatcaggacgctttccagaagacgatgggtggtggaaccgggtttgagcgatcggtcgggactgtcgctcattgattgcactctttgcgattcatactccatcctgtctattgaggattctctattttctctttccttctggccttagcttcttttcttcaaccttaaaaaacgaacagagactgagatatcctctctctttcttcaacgtgttctcttataacctctcctctatatgtttttctcctgatccacgatccacctcttcagtctctttgcactttgtttaaaccccttgctcctctgcttccattctctcatcgttgttgtataagaagcgagagaagggaaacgaagaaagagccttcactacaaaatctttacctctgcctcctctttttctctctttacttgctcttatcctctacccttctttcttcctattctctttctgtcattattctctcaatctctactccgctctgctttgttctctctctatatcttatctctctagaagaaaagcatcccgatagaattccatctcaaatacggacagctcctacacacgcatgaacaaagaacgagttcacagaaagaagtaaacaagcgagacggtgcctaatggaaaaaatatcaacagccaggacgtcccgagatgatgaacaatccatcggctttccgtctaaattgattgccttcaaccaatagtaagctcactcccttgcttctatcgcgcgctttgaagatatgtctgtcgagtcacctacatgaacgtggatcgaaacaaagacagtagaagatatgtttagagtatgaaagaaatcaggattatccagattatccgaactatataccggactcaacgtaagctaaggaggaagaaacagggcaggctaacgcgaaaagatcagtgtagagcagatcatgagtatttaacatataaagaaaggatagcaaaagaaaaaggaagaagaagaaagaagaggttggaataagaagaaaggatgcctgcaggagaaggagcatcgatggaatgcgtttgagaatgaaggaatctctcttcaaccgatgtaatctaccgccgacctcttgcgttctcttcatccagtccgtcgacagcacccaactctgagccaccagtagagttctgcctgcctggacgtcgctcattgtccggagtcaggccgcggcctggtctgatgttcgatctgggcgctctgaacagaggttcggcacgattttggataggccattcgtactgatcaattccgggacctgagacgttccaattttgttgagaatgaggatgctgtgatagtagttgttggtactgatgttgctgagaatgggggggatattgttgaacacgagggggaacctgttccgaatggaagcccatcatggaggggtgcatatgaccacgccgcgaggctagctcttgggcccgagaactacccggttccggctcaagatgttgttccaccagcgactcactctgaaacgcctgtgtttgtatttggtgttgatactgagagtaagaattggaatgcaagtgtccgtggttggcagcgtttgacgagtggtttgagaaggagaaatttgtatagagagcatggtcgactggaaagttcgaaggatgagaaggataccgatatggactttgagactctagaggacgttgcataagatagccaactggctggttctgattttgaacctgactttggccttgaccgtgagacgagttattacttgattgatgtcgggaagaaaaactcgtgggaggttgagattgggagatctgcgtcgtcggatatggtaaacaagcagtatgggtacctgagtaggatgaagatggcattgatggagtcggagtcggagtcgaagtttcagtcctagaggatagatgaaagtgtgtagaatttcttgttggcaatgatgttgctgttgctggtgtttctgcttctgtttctatctctgccatggataggagtggctcaacgctagatccatcatacatgttgaagttcgtttgagacagatttccgccaagaagattgacgtattggttccatgaatctggaaaacccctggaagagctcctgattggcccacctgctgcaggggaaacattgagtgaagaattccagtcaaaggccgatagtacaagttccctgatggaaggaaggtgcgacctagatggctgaattgattctaaggacgaagagggcatcagagcagaaagagggtgtgtaaatggtaatgatgggtcgtctttgtcgaaccaagaaaacatcaagtgagtgaagaatggcatgaagccgatacacacgtatcataccgaacgaatccttctgaacttacctgcaccaaattcgacagggtcgattcctatatccttactcgctctatcaaatgatcctacagcttctccggtgctgccaatatgaggatccctctctctaccgagagcgccattgttcggaccccgttctgtatcaatcacgctttcttccaataccgaccaagagacggcagaagaggatttgtggattgatcggaccttggcggtcgaaccattggggggactttccgccaggcgtttccgtcctctacctttccccggtcctgacttttggcttgtattggactcaagttccggttctttctctgcctccttcgcctttgcctttcctgccttggtggctgtctgcttggttcctctcgtgcctgttccgttggtacccctggatactgctccgtcttcctccctaattagttcatctagcccagtggtcaccgcggtagctgagtttcgagcgacgcctgctcttagtttcaacttcatcccctggctggcaaagtaccgtgtgaggtccgtcgaaggcatcattccagggtatttctattgataggaaagtcgtagaacatatgatagcatgcatctctaagtaagactatggcttggtaggtaaaacagttggtgcagatcaggaagatagacgcacttttggagaaaacacctcaaacggatctgtgaccgtgcttgagaccttgtgtacgctcgtcctttggatcacatttattagagatttgttagtctatgcaaaga

SEQ ID NO: 1372 - DNA, 11508 bp, Xanthophyllomyces dendrorhous
aaattgaagcgtgtcttttcagggactcacccgtttttttcgtaaaggatgaaccgcaaacgaaattttccaggtacgcgaatggagagcttcgaaaatacgcagaaacttccctctgagaaacaaagcgcgcaaacgtcaaaaaaagggaacaaatgacggatcttctgtttcatagcaagagaccggatccataaagatccagagtacttacggccaccattgatatcgcagagcatttcagtcgacataacccagtcgcctgccgttgcatttgcgccggtggccgtcttgacgaccgggtacggatcggtcggtcttatttgttccgcttgagaggtagtctgaaagagagagattggggtgagaatgggcacaggggtagtaggagtaagcatcggagacgtgagattggtactatagacataattgggcgtaggaaattgagttggcccattcgagaattgatcgacatcgatccgatcaatctcgctaatggcaggggtgagagcagtaaaaggagcgtcggtggtaggaggaacagtagcacgcactgaggtgagtggtcgtgtgcgtgatgcagaaacggatggtgatcgaagagcgggattaggaggattgaatctggatgtggctgaagacgattgcgcagaaacaagggtggcagtgacgaaaaagttgttggatgctctgaattcagccgtttctttttcgaacgactgcacctcaacgatgatcggaggatcgatcggtcggcggctagggtgttataaatatattcgggaaagaagaggggaggagctgattagcttagacttcggatgcaatacatgaattgaagacgatagacttactcggcttatgagttttccaacggatgttatatacagatacgcaaagacaaatacatagaatccagaagtaaacatcagcgaacaccgatgtacgaggcctatgtatttgagtagaagagaaggatggaaaactcacaggtttcgttcgcttccttgaatgaactgagtcgagcacgaacgggctgctgcaggacagaaagcttgtaggatctgtcgatcggaaagtgttgaccaaaccgagtcaatgtatgaagagacttggtgagcgagaaagacgggatgtggagagaccaagatgtgcacgacgaacctttgctggttaggaagttcatccctcttgaagcgttgtatccaatgcttctcagtgttccctgaggtaagcttcttgccagtcgacgctggatttagccttctcgtcaagtgtggaatgagctttacttgagcctgagtagatagatgagtgatggaagcagatgtggactggtcggactgtcggttattgtcgcgactggtacctgaggccatggctgtggataggcgaagaaaaatgttgcaaggatcagagtaaaacagaagtatatggtgcaactttttttttgtctatcaaaagagacgacgacaacgacgagggaatgagaagaagagggaggggggaagaaaacgaaatctggattgtcaagaatggaccatatgctagtgctctgggtatggatgacggagactataggaaacctcagcctagatgtaccgaaggaggcgagcgtttcatctcgattgaaaaagctaaaagtcttaagagaacagtctcttctcgaagggcaagctcgtgtgtgatcttccccgctttctgttcaggttagggttgctctagtccgaattcagatcttttcttggtgttccaaaagagcatccgatttcgtctgtcctttcattgggatcaatctagttctggcagttgcctagggatcggaagctattctaatagggctgatctagaaagaatttctccgaaggcgcgcagtggaatttccgatctctctttgacgatcgacagcgcagctttcttatattcagcaggattcatcgacatgaactatgtgatagagggaaaaaaagaaataatcgaaataatcgaaagactcacgtaagataacaaacttcgtcagcgcatagcgcattatgccctgctggcggacaacccaccacaacgtttaatttcaatttgttaatgtctgtttttataaaacgatatgatacaagatatgacaaacaaatagacccaaaaaaaacacacacgcaaaaccaaaaaataaaacaaaaacaaagaacatgaaaaggatgatgcgcagtaaaatcgaccgattagtaagcctcgggctagtgatgctgtgctgcgcctcccctcaagttgccctgttctcaaaagtaaagaagtaaaaagaacaacaacaaccaccggaatgtccagagaggcaggaagcccgagaacaatcacctaccaaggagactatacaagaaacaagaaacaacgatcagaacctgggctaatcttcttcttcttttttctcttgtatcctagtaactttctgcgcacagctcaacagggcctgaaatgttgtttcttgactgacccaggcctttccattatttcattttaatctatgtttcctgttactgaccactaaatttacaaagctgaccctctgaccactctactcactatgtcgcgtatgattttcttgttgactttccttcaactttgttttattttgttttccttcttccttctccttttcctctttcttcttctcaatccatctcccttgaccacctcatcctatcttcacctgtgttcttttttatttctctattctccttgttctttgggtcctcagacctgtccagtcgtttccggtgtcaccattctctttcgcgctttcctttcagcaaccaactctttctcctcacatccaaccagccactttgtaccggacaaagtcatctcacattcacttgatatctcacactccttcaaactcctcttgtctgcgtcatcttcttctcctcctccccttcttcctaactctctaatcacgcgtcccccaagatgtttcacgtaaacatccctcgactacactcgtcgcgcgcacgaccgattacctatcttgttctcctctgtctttgggcatgtttgttcccctcggcttgtgtcaacgctgccaccaaagagcaatggaaaggtcgatccatctatcagtaagcagagtatcgtccgattggagaaatcacgcgagcagagaaataagtcagctctccttccacccctcctttcgctcactactacaaatactccaccttcattcaatcgttagggtcattaccgatcgttatgctcttccgacagagaccgctccggctctgacgactccgttacctacggtgtgtgatccacaggatcagacatggtgtggtggaaactggcgaacgatcattgagaacttggattacattcagtctatggggtttaccgcgatttggatctctcctgttcacaaaaacattgatacctctaccccgtacaaatacgcgtaccatggtccgtttttttgttgatttaaatctctcaccccctcctagtcccacgggacgtgctgttttattcttctctagagtcagccgtttgttctgatgtcatattgactctcaaccttcaggctactgggtaaccgaccaacgagctcttaacccccgtttcggagacgaagacgaccttcacgcactcgtccaggccgttcacgacagagggatgtatatcatggtcgacattgtcattcaaaacgttcccctcgtcgcgaacccgacccatctggatgtaacgacgagcatgatgcaagcgaacggatactggtttactgaaccggcggaatgtaagtcacaaagatttatgttgatcgatcagtcaaaaacgtcctggagatcagaagctcacagttggtcatgggatatacttgatggtaaaaatcgagtttagatcacccgtactgcgctatggactactcgaatgatgccagtgccgaaatctgctggcttggagatactgagctggcgttgatggatattaacaccgaaaaacaaatgtcatccagtcgttcgacgcttggattggccaatttgtctcaaactactcaattgatggattgcgaatcgatgctgccaaggttcgtgcctcttttaaattgaatcttttacatgaacgcgtccaattcttagtcaccataagctgatgagatatcgattgtctgtcatggcgagtagcacgtcagagagaccttctggcccggattttgtcaggccggtggagttttctgtatcggtgaagtctttgctaacgatatgaagtgtgtatctcttccatatccactgtcgtttgatctgaggcggatccatgaacttcactgacgctgtattcattgtcgtgtatcgtctttgttatcacggttgtctttctattgagataggacgataaaacgatatgctgataacatggactctgtaatgaactagtacgccctccttatatctgtcgtacattgtccggagaatttgaaccaacgtgttgtattaacttgagtgtttttgtagtccggcgtaccagggaatgatggatgcgttccagctgcccgggccagcgaacatgagtagcttggtaaattacatggttcagatgaacacgaccgtcaacgtacgttcattgtatctgtctcccccctcgtctttctcgtgcagagactgatcaggattctcgcccctcacctcccaaataggatacacatgtcctaggaaactttatcgaaaatcatgacttggtttgtctgagtttctctcaatctcggccgtgtgaatatgagcatagttgacctgatagggttggtcttactttcgtttctctcttttcttgatcatcctcctgccgtatcatgcagcctcggttcgccaacacgtgagtgcatatttagatttctatcacaaaaatatattcatgtggaaaaaacatgctgataaacgagttgcatctgatcacgtatacgacaattttcatccagaacggtggatccattattgcagtacaatgctctagcttttcaattcattggtaacgatggaatcccaatcgtctactatggacaggaacaaggatttcatgtacgttcctcttctgaaaccctatgtatgctaatatctgatgtttgtccgaccactttgtatgctcccatcctttttgcttctttttttgtcagggaattgctgatcccgtaaatccatccacgcgtcatgccagacgggtttgatagaggcgatctattagactgactttgattctgttgtaaattatcttgaatcaaaacttctctaagtcaaaccgagagcctctgtggacatcagaatatgcaaacacgacgtatcgtcaacgagtcgctttcctgcacgagtttcggagtcttatggccaccacgggtgccaccttcaatggctatacctttgagaacgcttcggcccagatcctctcgcatgatcaacagacggtggccatcagaaaagggccaatgatgagcgtgttaaccaacgtgagtttcttttttctgcgcttcttctaagcaggcacaccgtcccgatacatgggactgatagcatcacacaactgacaacgatccaattcatctgaaccctcatttttggtcacaactagcgagggtccccaccgacaaacgagccatattcgatcttaaactctggttggccaatgtatactcagttagttgatatctggtcgtgcgataaactcgtggtcggctcgagcgaatctttcctgatttcgtataatgtccgaggcggccgacctgttgtatgtttcgctgctgctttcttgttccctctaaatcttatgtgagctgtcgacgctgactgtgatactcttatgacttgcgctcttacatcaaagattctcgtgccgctagcgctcatttcgaatacgacgttctgcccgtccatacaacagataactatcacacagaaggtctctgattccagctcatcttcctcaatgctcggtagatgctcaggatgggcatcgtgggcaggactgctagggttcagcataagctgtttgcttaccctctaagggaccatcctgtgttccgctctcttttcttgtgggtctaaaccaaaacaacaaagaatgaacaaaagacggccatataggtgtcgcatcgagcaacaacatcagaactactagcattgtctacacctcttatcaacacatgggaaccatcataatcatcatcatcagtatcgtcgtcattttcattcaggtcttcctttgtactttatcatcaacgcgccacttgcagctcaaggaaacaaatctcatgaaccatcatccgtctcgacttatccttacctcaacgctttcagttttatctatctatctatttcatccttacagctttccttgttgtacttttctttcaaaaatgttgatccgcctttcaccttttccgtccgcgtctcccttgacagtttgcccatgtttgttcattgagggttgatcttccgctctgtaatcccttcaaaatatgtactattacgccaggactcgtactatctcaagttcagcttggaaacccctttgctctcacattcttctcttctctatccgacattcgtttttaacctgaccgccccacgttcttttcttatttctacttcaaagcattcaactggaaccgttcgtttgatgtaacatcatgggtgtacaatgactattcctctcgtttttcgtctctattcttttcttatcagatccctcacttttgtgatacagaaacaaagatcgatccaatcttaatcctgtttccaggactagcgcgaaagatgtggattttgtagaacacggatgcaaacgaggtgacgatttttcatgggcttcctaaatatttgtttacgaagtgcatcaaacctttggcgctttacgtaatttcattgactatcactagccgtcctgcctctcttttcaatgtctcttattcacaggaagtatttaatcaatttcctgtcccaacaacttatatctgccatctcctcgactcaaccagataagctaccaccaccatcaccatcatcatccccttccatcctcccagggcgctatgtcgtccgaaccgtcttcatcgtcctcgggcaatctcagacggggcgcggcgtgagatatctcattcttgccagagatactttgttctgatattggcagctaaagcagacaactaacctaatgtctcggtcgtctggttcattggcaactactcatcggtcttcttctcttgctcatattcagttgtcagcgttgcaggtgatatactctacttggtagctgattctgaatattgaacgagcgtcttgaactcatcatcatcatcatcaccacaatttggttccatctgaacgacaggaagagaaagctggtgggtgataccttgtccatgcatgacgcttaatatagtacgctgacacatacgagacacatgcggtctgtcttttgtatctttgttccattgcttattcacttgttgctagaaatggtttgttgctcagcgtccttttcttacagatgaacacaagtgaatataacctgaatttagattactgttgactgttgcagtacgggtgacaaaccatcttgcgggatgtgtcttaaagtgagactagcctgatagatttctgtaaggctaaatcttgctcatcttaagcttattttctttatctttctgggtcaacgctctcagcactcaaaggagtgcacatacgaagattcatatcgaccaaagactaggctttcgaagctggaggaaaagatctgttggtgctagacctgtcttgtcgctttcttttgcggctgatcaattttttcttgtcttttgtcgaccatactcaccacttccctttgtcatctgtattacttgacttcagcacggctagagaacaacctcgcatactcggaacctagcaaagccggccaagtcagaccgcctcacttggcccagagacaaagattttcaacagggtttccctatcctggctcgaacgaaaccagatcggaaaatcacacccgcccttctaattctgttcagcaggtaaagtttaacagccgaaaggcctgctcgccgtctctcgaagagccaaagaggttgcgctctacactcgtcatgaacgaatcacagcctgttggagatcagcctctgactcctattcaaacgagttcgaacagtatgcctgaatgtactgtgaagacagacttttctcctctggaggctcatagtcaactgctcatcgaagcagatcaagcagaaattagatttgatgattgggtctatgactttgatccatacgcagatgatagcctatcatctactccaaaccaggccgttgtaacagaacttgagctctcagcatctctgcggatccataccgatcaacgttctcaaccggtgattagttctcagttgcccactccggaagagtctccatcatctctttcaccgttcgcgccgctggaggaccgtgcggcagctttgaaggtagccgtggttgatcgggaagagcttccgaaagaagttagaaacagtctgctcagcttgttcttcttgaagaaggccatgttcgcgttcagtctaaatctcgatagattctggaggtcagtcttcaacctttctctgacatccaaaaatgaccaagaagaagaggacacgttcttgcgatactgacgtttttgcttgtatgccatttctgccgttggtctcaaatctgtcagttctcttgaccaagagacatgcgatgatcaaccgcatcctgcttttctttttgctatggtgcgtatcgttcttttctcgtttgacggttgcttgtatatatattgataataactctcagctctcgcaacaaactctgtcgcgtatgtttgatattccgatatacctctgcaaaaaattactcttgttctctaccgacctcagtatcattgcgctagtgtattttctcccgatgtggccgtccaagcgttggacgatgtgtttttcgatatcgccaagaggaagctggacgaggctttcagagactgggactgtagaacaattgatctgatcagagccgccataatcctgagcttcacatcatgtgagttgatcaatgattgactctctgggaggaatagaatattcgtgatatcgtcagattctgactgttcaaaccgtcgatgctgatctgcactagatgcgagagcaaggccatggttcgcttgggtcttttctggggtaaggtttattttaccttctttaacgctctaccattcatattctgttgtttgttgacgcccgtctcctgggtcacatggctctcagatggcgatgcgcctttgttctttcgcccatcttcagagaatcagcttcccgttctccatgacgtctatccagaatctaggatccgacgcatatgatcagatcaaagggcctcccggacgtgagtacaagcgtgtgaaacctccgaaggattctattgagctcggagaatacattcacgtattctggatggcatgcgtgagtcgcgtgccctctctgccgagactagaggctgttttgtctaactctgaattgatgccgaacatatccctgtaactttgcatctgctcttggtcgtttgtgccaatcagactatagacaaggtcacctcaacatcttccggatgcgctcctgtaggtttcctttcagtgagatgatacagaaacatatggaacttaagagcacttctcttattcgaatggtcaactttatacttagacgatgcactggtcagaaatcgagacgccttttccgttgccactggagttgtacgccaatgcaagttccaccgagtagcttctcatcacacttaacggcattgtttctcaaccaaaggatctgaccattgtgttgtgatattatagattgatctggtcaatagcttccccaaaacggcggtgtacgatttgtttaatgactctcagcatgtcattgttggaaacatgtatgtgaacgttaactcattaagctctcgtggtaaagggaaacctgatagagctgattgttcgttgaaatcttggtcgtgatctagaagcgcatcttgccattacattgcatccttgttcttgagtgaggcgtcccggctaagggatgagttcatccagccttccgtccggaacgggtatctctctcgccggatgtcgtcttcaaccaaccctttagcctctcccgcctcgattaagaatttcttcgaggatttcttgagcgagagcactgtttctcactcgatgggctgtgtgccagaagaggtcattcagctccagaacgcggttctcagattcatccggtctcttcctgctgaccgatcgaaccctactagaaggatgtacgtctgtctgatgattcagataaaggctgttttggagagctccctggctgatgattgacaccttttttttcttttctttctttggtcgaatggatgatatagtcttgggggagtcccgtcttggaagtcagactctacgttcaattttgagtcgatcacaggaacgatgaacgagctgtccggtcagacatggggagtcgacccggaaactatccttatccataccgaaatccatacgtacgtatacaaagacatggatacgcactaccgctatttttttttcttcgaccgtttctacttgtcatttgcacgtgttctgatgagaccgcacctgattaccttttattttttgtattatttcattcgtgggaacagcgcgctcgccttaatcttccaggagcgatcgaaatatgaacccgatgcgtgggcccaagcggtgtcgtccgctcggtccgtagttaagatccttcagatcatcgtcgatgtggactttagtcaagtgtgtgtcatcatggcggttcgtgtctgtttcatcttttatattcgccccgacgtctctttctggcttgcaccatgggttagactcttgaggaaaggctgactcaagattcctacgggcgcagacctgttggcgaatcgcggctcgaatcttgtctgacgaagtgagacgtcatcgttcggccgaaaggaaggaaggttcgtctttagctatcgtcccggtgactatgtcgaggacgtttgctgatcgacagagaccgttcgacctggtttgctcacagagccgaattgtgcgatggttgacgtcgatcgtgagtgttttatgcttgtttcgataggttgatccgagggggatcaaaaactgacaacgaccgggctttgtcttttttttttcgaccggtggtcgatgtagtcttactcctcgcgcttgaacggatcggtcaagtctttgtggccgagtaagaatagccgatcgttgaggtctttcctttgtttttcttttctcctcaacggagatttccaaagcctatggttcctcaccgttcgttgctgggcttatcgacagggacgagtgtcgaacgacttctacgcacgacgtgcagtcgtgatagagttttctctctccttttttctctatcttttttctttcgtgtgtgtgtgt

SEQ ID NO: 1373 - DNA, 687 bp, Xanthophyllomyces dendrorhous
atatatatctatatatatttcatgaaaaattcgcttcttcgttgtcgtcatcatcctttccgagatctccacgacttaacctgactgcgttttgagtatttcgatctctcgtgagactccttctaccaacccagcgatctccagcccgacgagaccaccctggggctttccgaacccgactcttgactctctcagcgcgtccatcagaacggtccgggcgaggacgagtctgtggatgggatctctggggatcgactcgatctttgtctgagccaggtcaaacaggttcttgggcaggaccgaacgggccgcgtcgctagggttcggcgagtgttgagggacaggaagaagcggcggcggcggcggcggcagcagcaggagtttaccgagttccgcccgggcgagcgctcggaccggatggttgtccgggtagatcgacggcaggcccatgcactccgacaccaggagcgcacaccggatcgagtcttccagccggtcagtgtccgtaggatgggcgccgagcgaggtcaccagcagggtgcacacaagtcggacaagagggaacaacgggtacgcccatggtgggtaaaagtaggcgagtgaaccaatgacgctcatcgggcttgctttgcttagtagttgatcaaagtctgtttgaaagagaggttgtgtgtgtgtgtgtgtgtg

SEQ ID NO: 1374 - DNA, 323 bp, Xanthophyllomyces dendrorhous
tgtgtgtgtgtgtgtgtgggaatcagtctcgcgagcattcagtcgaccgaccatgaaaggcaaggagacagagagaaaaaaagaaaaaaaaggaacgaaaccaaccgacaagagtaccctgttgttccatcttcaacaacttcatcccggacaagacccagtcttccagtccgtcgtagctctctctcggtctgaccatttctctcgggtcggtcgagggtttggcgcataggtcacagtcgcacttgaaaaagtatctggtctggagctcggtctgccggagttgggacggaagggagatgtcgatatatgctgtgacgatc

SEQ ID NO: 1375 - DNA, 1066 bp, Xanthophyllomyces dendrorhous
aaaagaaaagaaaagaaaagtgaaacctgggaaacccacctgttcacccgggacaaggtctctgagggcgacgacgtccatgcaattgccatcggccttggagccgtatccaccgaaaggaaagacgacgacggcgttcggccagcatgagtgattgaagagcgcgaccggtggtgagatcgccacaccgaccggggcgagtgaaggggaagaaagcgtgaaggagtttgtcatgaacgccgcgcatagatcgaggacttctgctacggatgcgaacccgaactgggacatgtctgccggcgggatctcttcgttttccgagctgttggaggagtggagggcatgtccgaggtagacgcctagttggagagcgagttgagcgtagggcgctggcgcgccggtcgagggatctgcgaggggcatggctgatcgttggcaatcgagttgagcgatttgtgtccaccagtagtcgatttctccgcctttggctttggctttggccgaggcttcgatcagtctctttcgtttggcacaaagtcgactcaacgctctaacggcctctcccgggatccatccgtcgtcgtcgtcgtcgtcgtcgtcggtggtgccatggtcgtctttgtcgctgttgcttttgcctttgatgttgtggctgcggaggtggtgtgcatggagagagctcaacgcacgacactccaactgatggtctagccagccggtcgatcgacattcagacgagcagtaacggaccacgcgacacccagtacactctgtgagctcgggagtgtcttttagagggaaggagtttgacggcgtgctccgtcgacgactacggtcttgatggatctcgtgggggttgagaaaacaggccgaacagacggttcggagggaggaggtggatagactggctgcgtagggtgctgtcgagaggatggttgagcctgctttgaaggtgaccggggctgactggacttttttgatccatacggctctgcctttggttgggtgtgttttgatttcgagctgtggagggaggggtggtggtggtggtgaggaggaggaggag

SEQ ID NO: 1376 - DNA, 338 bp, Xanthophyllomyces dendrorhous
gaggaggaggaggaggcggcggctgaaggtagagtgatcgaggccgagggggaaacaggagcacttgctggtgtggacgagcggtctttggggagtggggctgatggcgctgtgactgagggtggtagaggtgatggtgttgataaagatgatggtgttgatggtgttgatgaacggattggattcctggcgagtctgtttgctcttgcctttgagagtgactggaaggagctcatgggggggatgtgtgagggagagagagagagtgtgtgcttttgggagggaagaaggattcccacgtggcgagagagtgatcgctttggttagtaaccgggggg

SEQ ID NO: 1377 - DNA, 758 bp, Xanthophyllomyces dendrorhous
cggtgtgcacagtgagccgggtcagagtaggcaagagcagagtgcactgagctgcactgagctgcactgcactacactagaacaggccagaacgagcgatggccttgacggaccgcagagtgtgctccagcggtaggccggagagagtactatggagtgttccacagatcacaccgccaactgtgttacagcgttgatgaaacgagcgacacttgccgagttgtgtgtctctatacgagcccgagcttgactgggggtgtgttggagggcatgaagagagcttcaagagagcatcaaacagcatcaaagagcgctaggaagcacaacagaaggagcgctgtgtgttctgtgtagattgcttgtagtccattttgtagtacactcccaaatgcggtctgtagtgttctttgtggtccactctgtggcactctctctgatgcgctctgatgcgctctgatgcgctctgatgcgctctgtagtatgctctttcttgtactctttcttgtactctctgttgcactctgtgttgagcgttgtaatgcactgtgtagtgcactgtgtagtacattctctattacaactttccattacaaatcctaatacaacttcctaatacaacttcctaatgcagccgtccccagccgcacgcgttcaccagggtgggtgagtcaccggcaaattttccgttcctgagaaacgtattaggaattctgaccggccgtttgtagtgtggtattagggggaatttgtagtatgtg

SEQ ID NO: 1378 - DNA, 717 bp, Xanthophyllomyces dendrorhous
gaaaaaaaagaaagaaaaaaaaatccaaactacatttctctcttctcctcatttccccccccccaaatccatccatccaaaggttttaggctaggtcactgaaaaaaaaaacatacacacatcgtacgtcttctctcgtctctctttctcttagccttccaagacggcgtgtttcctttgcggtgttccggtgtgttgcacaaacacacaccagtccccaccactgtactcgatgggtgagcgtcgaatgtcagtcaaaaggacggctggctggctggttggtttacaagattctctcggaacatccggttgagagagaggagagaatcaaaacgaacatttcccaacacacaaacaatcatcccatcgatgggtctgtccatgggatgtgataaagactctccccctcccccggcttaaggccaacacactcagccccgctcgccaggctcttctgattgattgattgattgattgattgactgcctgcttcccaccgagcggtgttccgttgtcggcagtcttggtgtcttgcgagctttgaattttgtcgattttttttaaatcgtcaaccgaaatctcaccacctttttttattttttttggtgtccttccctcttcttcttctcctcctcctcggctcctctctcgtccttctcgtctggtctggtctggatcggcctcttctttatctcgtactccttctcgtactccttc

SEQ ID NO: 1379 - DNA, 939 bp, Xanthophyllomyces dendrorhous
agaatcctctttgttccaacctcaacatcttccacaatcaaacctcaccaagcttgccttcctcttccccaaacagccaccgagtcccccgccgctgaggccgtcgctgccacctccccggccgccgcccctgtcgcgcttcccaccgccacttcggccaacacccagcccgctgtggtcgcggccgcgaacgccgccaacaacgctcccccctcggcctcgctctacgtcggagagctcgatccctccgtcaccgaggccatgctcttcgagatcttcaacatgatcggccccgtggcttccatccgggtctgcagggatgctgtcaccaggcgatcgttgggttacgcgtacgtcaactacctcaacgccgccgatggtgagcgagcgctcgactcgctcaactactctctcatcaagggtcgagcctgccgaatcatgtggtcccagcgagatcccgtcctccgaaagaccggtcagggaaacatctttatcaagaacctcgacgaggccattgacaacaaggtgggttttctttttttcacttgcctttttcttttctactctcttcaattccatggctatatgcgggcaggcccttttttttttcctcgctcctttcaaaacaaaaaacacacacgctcacctttcgtctttctttcattcccctctacaggccctccacgacacctttgccgcctttggaaacgtcctttcctgcaaggtcgctaccgacgaggccggaaactcccgaggttacggtttcgttcactacgagaccgccgaggccgccaacgacgccatcaaggccgtcaacggtatgcttctcaacgacaagaaggtctttgtcggacaccacgtctccaagaaggagaggcagtccaagctcgacgagcagaaggctcagttcaccaacatctttgtcaagaacattgatcc

SEQ ID NO: 1380 - DNA, 726 bp, Xanthophyllomyces dendrorhous
aggacgagttctcggccatgttcgacaagttcggagtcgtcacctccgccgtgctcgccatggaggaggagggcaagacctccaagggtttcggtttcgtcaactacgagtcccacgaggacgcccgaaaggccgtcgacgagctcaacgacaccgaggtcaagggcaagaagatctttgtcgcccgagcccagaaaaagtccgagcgagaggaggagctccgaaggtcctacgaggcctcccgacaggaaaagatggccaagttcgccggtgtcaacttgtacatcaagaacatcgacgacgagtgggacgacgagcgactccgaaccgagtttgagaactttggaaccatcacctcggccaaggtcatgcgagacgaatccggtcgatcccgaggtttcggtttcgtctgcttcaacgcccccgacgaggccaccaaggcggtctctgagatgaacggccgactttcgtccaacaacaagccgctctacgtcgccctcgcccagcgacgggacgtccgacgatcccagctcgagtcccagatctcgatgcgggcgaaccagcgaatgtcgatggtgaaccagatgaacccgatgggtggcttctacgccgccggtatgccccctcccggagcttacccccagcagcgaggaccgatgttccagggcatgcccggtggcgtccgaccccggtacgctcctcctcccggttacccccagggcccct

SEQ ID NO: 1381 - DNA, 17270 bp, Xanthophyllomyces dendrorhous
ttcatatcctcctttcacaatcttttttctggatgaaaagtctattgtgccccgagatcaagagtcatcgtcatccttctcctctttccggagcgagcgcgaaaagaataccactgctccgcacgtacaaaaatctctcgcttgatctgtgtgtgtgtgtgtgtgtgttcccgggaaaggggggggggaaagaaagaaaatcgacgggaaggaaaatcgtcatagatggtgtaaagacgttcgagcgcacggacgacagagaaagaaagaaaacaagggggaaaaaaagaggccgagtcgattagggatacagttaaagaggaggggggaagaacagaagaagaagaaaaaagtgtatggaaaagaaaagaagacgggaccacagagggaaaaaagaaagaaaaaaaaaggaaagccctagtggtggtcctttctagacagagacgttgattagagatggtcttggtaatattaggatgagacgaaaaattaaaatgatgtgttcatgtatgtataaagttgaatgtcctggggtcaatttcactcagctaaaaaaaattgaaaaaaaaagaaagaagaagaaaaaaaaaacaggacaaatccaaaaactatcagtgactgtcttgacggtcgtgaaaacaaagacatccaacaaaagggaaaagcaagaaagcaattcaaagaaagggagggagacaaactgtttgaaggcgcccatgatggcttgaatgccgctcattcccaatccatgggatgggtaacagatgtacaacttttcttcttccgccccgaacttttctctgaacccggtcttcctgctcaatccgaactggttcaacaaaacggaacagtctattaggtcaggaaaaaatgttgatcgtgctttcatgcagaccgccgacgaaggtcgttactttaaaacaaaaagaaaaacaaaggaactcacactcttggaaacccggctgtatacaccagaaagaatctttgcctggaacttggagatactgttgacagcctctagatggtctgccgcgcccgcgccgaacgtagccgtcttcacaccggccccgctcatcaccttcatcgcttccgtcaacaacaactcggatgtcccgttcggtgctccggggaacatcagggaccacttgatctgcagtccgttctcggcggccagatgatggagcacggtgaaaccgacgacgtgaccttcggcgttccgggcgatcaaatacgttcggtgttctgcatcggtgaacggtcggatctgatgagggcgaaaagcaggagggtcaacacgtcgttccaaacacacacacacacacacacacgccaaaggggatataatctcaacaacaagggggaaaaaatgacgcctgtcgggcttacactagtggtgtggatctgcttgctgctcttcctgttctcctgccatcgggcgattccatcctcaatttcctttcgaagatcagccttgatctcacgctcgatcagttcgaccgtgactcctttgttctgagcttgatggaccttcttctcgatcgctcgtccgtcgtcgctgtcgtcgtcgttggcctggtggttcttcggtcgtccttgtgggctcaccctttgttcgttcgtcaccgccaaagctggaaagtatcaaagaggtgtatgtgtgtgaggagaggaggaaaggcgagataaaagggtgggaggaaacgtcaataaaaggcatcaagaaacgagacgaagcagataaacataccatgccaatgaagaccgttggtgaggatttgctcggttccctcattgcagttcaaccagatcggcttgagcctcctgtgatgcttcaaccaatcagtgtaatctctgatgacatcaggaagcgccgactgtgggcaaagaggagatccccaggtgatggcatggcctacgaagagaaatttaagaaatcagtgattcgttcttacgagatacttccctgaaaggaaaaaatcgatcgtcacctttagagtcggtgaacccgatggcgtaaccgtgtctttcctctcgccagatctcgtacccttcgtctgtccaagcctgaagggtttccaatcaaaaggaatcagcctggagaacccccacttcgggacgagcgaaacaaataagaaacgagcgactcacagtactggtcgagtctccgtattttgcgatcagatcctccaacttggggtgtttctccttcttcatttcatccttcgagagcacgttttggtcgttctcactaccagcaaccttggtgggcacaggcaacgcggcctccgcgacctctgccatctctttcagctgagactttggaggcgccgggaacgaatggggatccctggggaacaaggtggcgtgtctgatgtttccgagtttgaggaacaacatgacaagtcgctcgagaccgattcctccaccggcgtgaggaggcatggctgcctggaaagcctcaagatagtccgacatcgagctctctgcgatatgagccttcttgagtcgttctttcatcacggcggccgaatgaattctctgaccgcccgagatgatttcctccccacggacaaagacgtcgaacgaatttgtgatctctgggttgtcagcatccggcatggtgtaaaatggtctggcggcgaccgggaatttatcgaggatgtagtagtctgggagagcctcatggttacgtcaggacatagtgaaggagatttaaaaggaactgaaagaaaaagaaaagaaaaaaagctctgggacctaccggtattgtacttctctttcactagagctcctagccgaacctctgccctggtggagaggtcgtccatatccggagggtcctcgtcccatccagaatccatcaagagttggacaccctgtttgaatgtgagaacaacggtctcatccgggaagacaaggtcctcggacggatgtttcttccggacgacatcgatctcttttgcacactctttctggacggtacggaagatgtgcttgagcatattgtcgatcatgtgcattgcctcgtgataactcgagtcaattgccatctcaagatcgctgttcgatgtaagaaaattcgaaatctgagtctgatggaagagaaatagatatgaaagagacctaagaaactccgtagactcacactccagtgtattcagtcagatgtcgatgagtgttcgaattttccgctcggaagactttgaacaaagggcaatcatcgagagatcagtcaagcgacacgtaccaaaaggtacacttataagcaaagctcacctggtccgatctcatagaccctctcgagatctgcaccaatacacatctctttcgcgagctgggggctctgtgcgaggaaggcttcacggccaaagtattcaaccttgaacacagacgcgccagactcggtggctccctgttgaagttttgccgagtgaatctctaaaaagtcatgcgagtcaaggctggcaaggaagggcaatatttaaaatgatcagagcagagaacgaagaaggatagccagccaagaacagaccaaaaactactaacaacccacgggccgctcgggtgacggcggcggtgaccctgaagatggcgtgtgcgtctgcagttcgaagggacaccgctcggtgttgaagttggtaaccaaagggaacggtctgatgaggctcattctggtcatcgagatcgacatgatctgcctgtgcggcaccaaaaggaagagtggaagtgacttcagagaggacaaagattttgtagatctcgatctctgcctgatgaacctcggccgacttgacgcctccctgaacctctggcttcttgactttgccttcgacaagaacgattgtttctcgcggcaatttttccacccagcggaccatggtttcggacaccggagggagctcattcgtatcggtcgagatcggttcgagcaagtttttgggagaatgaccgtccgcgttgggaccggtaacggaggatgaggcgttgatggaggatggggcagtgctgacggcggtagaaatggaagagtcggcagaggatgtggcggtcatgggttgggaggcggtaacatcggtaataggtggaccgagatgaagattgttcagatcggtgggcaagtcggcagagtgatcgtgagtggagacatttatcgccctatcgacgctgacggtggcgtcccggctgtccggactgtctaaaacgtgggaagcctgggctgaagaatactgggagtgaagagaaggtgtggaacttgattcctgcgcgatgtgctcggtgctcgtgcctgtgcctatccggacaataccctgcacggtctgcagtctatggcgaaagaccacaaatgctagcttggaccctaagagtgtatatatgtgtgtgcgcgcgcgcgcaaaagagagagagagagggaaaggggaaaaggagaaagataaaaaaaaatcgaagagagagcatcagtcagtggctcaacacgggcacggagtgtacgttccgcttaccgagccgacgggtagagtgaattctcgctcggaacagcacggtatcaccgatagaatcttctgtgatgtgctcaagcggcgttcgctctctgccttcgacatccttggttctgtccttgccagagtgctcgatgtgaccgtacctgcctgcggctggatcgttcttgatggcctgagcaaagttctgtttgagctgttgctccttctgttcgagctcccgcttatgtttttcgtgttgctcctccttctgtttggcttcctccctctggcgcagccttctggcctcttcgtctgagacctgactgctccccggacttggagtgtgaatcttctgatggagtttatgtatgattgatgacatcagaaaagggggaaaaagagaggtatggacgggagaagagagagaagagaagaagggaaggaagagaaaagaggaagaaactgccacgcttaaaaaaggaaaaaacggtggaaaaacggctacgtaatcgaagaggcaaaaggggaagattaaactataacgtcaaaaaacctctaggtggtaaatacaaacactaagctgaccacacaatttaatagggagagtaatacgaaccgactacaaaccggccaagaatgatacatacaagcacttagcccctccggcgaagagggaggatgacgtcagctaggtccgtatgcgactgtggaaccccgcttggggtgataaccgttcctcgacgcgcaattggtacgcgtgcggacgcgttcttgagacgcaacgatccgctcaagcatattcactggggacggaattggaagagtttccccacatggccggctttcttttcctcttccacctcaaccctgaaacacgtgtcgtcatcagtcaacgaatcattttcacgtgtcctcacagcttaatggtcaacacgtgatttgcttatatctagctcgtctttcaaataaccttagacaaccttaaaattgaagactgatgaatttgaacactccctcgagtgtagaaagcagagtagaatatacagtagacacacacacatatacttaccaacccacagcacctatagtcccaccatggccagaaagagaaagaacagaactcatcttaaaggagctgccaaggatgagacgaacgacgttagtgtattcctttgtatccggtctttcgctcttgttcttactttaccttctatgtcccttctctcacacccgtttggatttctttcgaaacagccgaaagcacctaagtcattcgtgattaaagtacgtttggtctcattctcttgaacgtttgattgagccactttcaacatagttaacttttgtgttgtctcccttgcactctcttctccgctccatttgtagtcaggtcatgtaggcacatctgtcgctcagcttgttagagacattcgaaagatcatggagcccaataccgcttccaggctcaaagtttgttatctctactactatgcgttctttctagcgttccacctaaccaccatccctgacttctgtctcgcttctctatattcctataggaacgagcatcggccaggctgagagattatcttactatggcccctgctttgaacgtgacccaccttttggtcctcacgctctccccgcagacagcctctctccacatgagagttgcccgattgccagccggtccaaccctgacctttaaagtagagagatatagtcttatgaagtgagtgccttgtcctcttctcctttgatccctctcagagtctcccgtttcctgggcggaattttttgttgttgtcagcactcgttgttaaatacggtttcctccatctaacatacatcgccctttcctatcaacccctctgtagagatttgtcaaacgcaaagaccaagaatgtaggacacgcgcccagcttgggagagttccgaaccccccctctagtacgtgtattggttatgcttcaatacgtgagttgatcgtgtatgctaatgcaagctatctcacctttctctcatgctagttggtgctcagtaacttcaatcctgctcctggggagaaaccacaaccgcaactgaaactgatgagctcaatgttccagggaatgttccctcccatccagattgacaaagttcgtttgtacccttcatttttcgctcgatcattctatacccagatcctgtaatgaacccatcacgtctatctttatggtttccttcagtccgctttgccctcattccggcgagtgctcttgatatcctaccatgcgccgacccatctgatctctatcagacattatatcatctccattcgaccgactggtgtgtccagacggctccgacggacgctcgaatcatctaccaaccctcagtcgttctcccgaccggttgacctgtcgaacgacaatgatatctccgactatctccttcgagctcaacaggatggatacgaaaccggatcagaaacagaaggtgagagcgagggtgaaggaagcgagggcgagaacggaatgaagtcaggtagggtagagcttccggccgactatgtcggtagaggaaacaaaaagggaactaacaaggccgtcaggttggtcgaggtcggacctagaatggagtgcaagcttgtcaaggttgtagaaggcatcgttggtagtcttcgaggagagggtgagaccgtgttccacgaattcggtgagtgtttctcttctttttctgttcctctttgtcttcctcttaccttcatactcatacttctcttgttctttccttcaccgcgccactcttctcagtccataaaacggcggctgagagatcagaactcaagacatctcacgcgcaacgccagaaagaaaaggcggcccgtcgttcagaacaagctgcgaacgtggccagaaagaaagaagcggccgagaaagcggccgctgccaagacttccaaacgtggtaaacgacccgatgccgctgatgctaatccggccgatggggaggaaagtgaagacgagttagtccacgattactccggtgaagacgagtttgagttcgaagaccgactcgccgctaaggctactaagaagtcttcccgatcgaccgaggctggacagcccgaagacgaagatgtcatggaggaaagtgatgccgaagacgaggttagagtgggaggtgatgaaccattggatttcgatgaggaggacgaagcgggtgatgtcagttcctccgaggatgaagcccccggtggagaggacggcgagtcgagtgagagcgatgatgaggttgatagaccggcggcggtcaagcagaggttcatcaagaaacctagggtcgttagcgcagggaagacaaaaggtcggattggaaagtgagaatatatcatgtaacaccagaagacaaataaataagatcccaccggaagataaaagatctcatatacatatatatatatcaatcatcttcttacatcacaatcaaacatatgaacacctcaactgaacggatcaaactcatcggccacagctttcagattccccacgcgaccgtccaaaccagtcgacgatgaatgagagctcgacttcatggttggctgtaagactcctccggaagcataacccggtggaagactcggttggtatgtaggtgtgcgcgtgtttgacgtgaaagaagatacagctggagagttcacagaaagatcgtacatcgtttttggacgttggttgtaactttgtgtcggatgggaattcataggaggcgtaggaaacgagaggttgttcagagtgtttggattaggacttggaatagttgacgatgatagtgcagaagcaggggcagatgcagtagcgggggcgatcggttttggcatgaatagagaggggttgatagtattgaagggcaacggcctagccccaaggcctcctccactcttcgtccgactattcgatccaactagaatttgagaaactggttgggcaacagccatcgtagttgccatcggactcgacgcaacgccggtcgggacggaatcccacgagtcatcaccccatggatcaaccgaaccagattcttcaaccgggcggccggtggatctcttcgaggccccaccgacaagcgactcgaacgtgacctcgcctgtggacccagaacgaccgttgagagcgtcggtaaaggaagatccactagtagtttgactctgaatccgttggttctcccgaaggtgttgagcttattccgtttcaattcgatttcctagagttttgatgctttatttgtgaccgaaacttatgatatcaggctagatttatacaaagaatctatgcaatgaaatgactcacgtcgacataaaccgattaaactgttccagattcaacactatcaagagagaaataaacggtgaatcactcgatccgaaggataatctgaaaatttggtcggactcgcgcgatctttactcacaaggacccatggagaacgtccaaagctggggcaatacaagagtagccaccgcttcccggtccactttggcacccattctctcgtgtacatctgaggcgaatttccgttatacatgtcagcacaaatcgaaatggatcgatagttcgcttgtgttatcaaaagaacaggctactcactcaaagtcgccatctgtacaatcaaataagaggccattcagcatgtgttacacaaacataccaaagagagagggacgaaccataacatccggttccttggtcttgatttttgctagcaggggtactagtttcgaggtgagagtcatctgttacacgatgcgatacatgagctatttgcgcagaggaaataatttagaacaacatgatcagaaagaaacttactttatccaacacatttatcatagcaaggaaacactcgagtgtcttgacttttactgtgaacgaaaaaagaatgacgtttgtgtgtataacatagtctcacagaacttcggaatggtttgtcaaacttaccactcaatacccttgtttttgtaaataaaatctaccattttattcacaccgggaggaaaagggtcaacgaaagataccggtatgcaaatgagagatctcaacaagatgtgtactcaccgccactctcacaaacagtacgtcttgcacgcttcccacatccagtacatctagtagattgggaatcgctgcgagagccttttcttgaacctgtccgtcatctcagacatcacactatcagctcgggcgtcactgaaaaacaagaacaaagaagaaaaatctacctcgggatgttccgaatcaagagaattgtaaattaatggcatgatatctagagtgcattgtgagatggctcagctattgtgaaaagagagtggcagaaaagacaacaacaacaacaacaacaacaaaaaagctgacgtactttcccgaaagactctcgggtttgttttctccatgaacagaggcagactattcaacagagctacatgtacatggtcacaaggatcgatggttacgacattattagccatagaagcgagaaatgtatagagtgattgaacgtactgagcatattctgcggagggtctgtcaagctgaatagcggcttgagagcagccaacgtgatagcattgaactcttctaacgattgagatttagagatctcgaaaacatttggcaagatgaacggtagcaaccatgcatctttcatctatggccaaattcgcgatcaggtaagctcaagtatctggcatagcctgaagcaaaaaaaaagaaacaaacctcttcgagtagacttggcagaatcttcctcttacgcaatctttcagagaaggttggaagaacgttaagcaacccccttaggaaagttgctttctcttctttaggttttgaactaaatgttgatcgatccaagaagaggagggtagagatggccatgttggaaaaaaagggatggcttgggagggtcaaggcagtcagccgattttggggataccgagttatgaggtttgacaagatgtctacacagaaagaagatcagaagcagatctgtaacaacgcatgagacatatacacaagcgaaagaaacacaacccatacctttgagatcattgctcagcctgccccaagcggcaggatttccaattgcccctcggccgagctgattgacgttttgtctcaaattggtcaacgcgtttctattttggaagggaggccttccacctaggtgaacagcgtagatgacacagcccagagaatacagatcggacgacgtgcagagttgctcatctagcgcgtactccggtgcttgataggtgtaatacgactcaacattgtgaattaacaaaagttccggaaattaaaatgaagaaaaacaggtggattactcacccatgtagtcccattttcgttgaaggctctctggcattcgactatcccattccggaaaaacccatctacctccagatcctccttcgtccgaaagcgtggtagtaagaccaagcgcacctagcttccaatctcctttcaaatttatcagaactgcttcaggcgagatattttggtgaatgattttagcttgggtgtgtaggaaagagaggccgtgagtgatttgaaggattcccttctgaatctaaataacgaggtgaaagcgagtttgaggacttgcgcacaccactttatgtcgtcaagttcgatgcaaaagacatacctctacttcatccaagtcaactccttctaatacaccgccaggcctggccgagcttaaagtgctagctaaagatgacagtataagctcggtagcgaacataagctctgatctggactcctccataggttccaccgtttcgagtatcgaaggatgtctaagtctagataaagacgttgcctaaatgtatagaggggacgtcaaacaggaagattccaagagttcgacaaaagatgagtaactcatagttaatctcacctcttttttgaggacttctagcgcctggtcttttgctggtcctcggagactgtcgaggacatttttgttcaagatccaaacagagacaacctgacgatcgatacagatcctgaccgtaagccaagacgttttccgatcagagagtttaagagaacaaaccttctgagtggtcttgttggtagctcggacgatcttccaaaggccgacgtagaatggcttgtcgtctgattgattggaggatgcaccaaaagcgggtgatgctgatgctgactgttggctatgaatctgatagttagcagaaattgaggacctgttgaacagtgaggaagcaaccgcaagcatggctgtcaggtcctactggataagcagaaggagagggtaaggattgaaaaagcgagagatcgagaatgtatgctgtagtggattggatgttgatgccaaactcgggatgccggtcgataaggttagggttatttcaaggtcagagatggggaaatttcgttatatcgacgaggtgttcaatacccaacaattactctcggaatgcctttcagtacaacagaaatgtcaaatgaaacacatcggaagcgacagatgaagaatcaagaatcgtcaactcatcctcaagaatgatagagtgttagcctgtagataggcgtcatacttcatgtcgccggtctcatatttattggataggtgcgggctctgcaagtcctgtccataacacatgtttcgaaggtagggttacgattacggttacggttatccgcatagccataactacacaagacctgttagatgaagctcaagctgtggaaatgatttctcccgaagagcatgcatcacacaagacaagaaaaagccatacttgaacgctcccgaagcagggagaaccaagagactgtctgattcggtatacgtgtttgttcatcagctgttctcctaacagacaaggctgagtacaaacggacaaagttgaatacaagcggatatgattaacactccttgggtttagaagatagctaacgttccgcaacaaatatcgtcggtgatcactgatagttgagagcgtcggcgagattcaatgtcaatcagtcaagatggtatttcttctccactaaccggagagcaatgatggggtttctttgttctcatgaggttcttcaagtgaagaatgacgaatagactaaaatgataacgtcctcccaaggtcaagtccgaagaaggtgagagattgaacgaaatccgtctggtcgctgacgtgctttgacttttctagtttctcatctctccggttttctcattcttccgctctgcattcttcacttgaccttctcgctgcttattttatcaatccaagctctatcagcccggatattgcacaataattcaaggatgcctatttaccggtcttcccagatagaacgacttatgtcctaatccttgtccagtgaactttcgcacatcggcattttataatctcttctatcctctctatttcttctccactttctctccctctacttatccatcctttgagaattgaatgatggtgcaataccgcacgatactgagcacttcaaatccatttcccttctaccatcttttttttcccaagcattattcttgtcggcatatgtcgttttttcgaacatttttcgtaacgtggtcttcagaaagctgtatatatacccaaccatctctcatgtgttcttgatcaagaagagaactcaccaatctcgaaacttgcttcagtatccttcagcgccaatgtctgctcctcatcaccactctccgattgctgagcctcaacctgttccctccgcccgttccaattcggtcacatctaccatctcggcagaggacaagaagctgtatgatgataaagtgatcgatcaggtcgtgctcgcctccgacataccgcctttggctgaccgagcgtccattgatggaaacgccactattggctcaaagatattgatcgctctcagactaaagaaacgtcctgccgtccatggcctcgactcgatcgccacccagccatcagtgtacgatactgctcaagccgaattctataaacctagaagcgactgggaggttcgtgcaatgatcttgatttaactgagtattctagtttcccttgcccactttgctcatgccttgccatcttacccctcgccattgacactgcagaacatctcattcttcgatccgttattccgctggacctggagagaagaaaaaacggcagtgaggaagatcgatctcaagatcatggcctgggtgctggtcatgtttctggctctagatatcgacagatcaaacatctccactgccactgccgataatctgctggatgatctaaatctgacacaaggagactacaacctgggaactactcttgccagactcgggttcttattggccgagcttccgtcccaactgatctctaaaaggttcgtttttctaccctcatggcctttaatgtccctagcgctatactaaaatcataactcatctattttctttcgcatcaaagacttggtcctgatcgttggatccctattcaaattgtcattttctcgttgatatctggtgctcaattcttcatgaaaggccgatcaagcttcctcgctatcagattcttgatgtaagccaattaaaagttgtcaatttccttcaattttatcgcttttccagagggctgaccatattctattttatttacgccagtgccgccttccagggtggatttattcccgatatcattctgtatttgtcttacttttacacaaaaaatgagcttcccgtcaggctctctttcttctggtccataaattatgtcgccgacatgcttgttggatttctggccgtggggcttttgcaaatgagaggagttttaggctacgctggttggagatgggtaagcccacttttctcaattcgtaacatatcttgaaaatcgctgatctgaatactttgccttgttcacttcagatgttccttatcgagggcctctttacctttgtaattggaattgcctccttctggctgatgccaagtgaccctgttgcttcttcagtatctaggaagtggaggcccaatggatatttgaccaaaaacgaggcgaaaatcatcgtgaacaggtctgttagagacgaccatgccaaagttcgtcccgtaattctattcatatgtactctatcttttgacctggcttataatcgtttttcatccatatctctagggaggaatgcacaaccgacagcccctcaccttgtcaatgatcaagcgatccctctttgattacgacctgtacccgctgtatttcattgggttgacattcggcattgctgcagtacctgtcaagcaatacctccaactatctttcaagacacttggattcagcacgatcaacgctaacttgctttcgatcccaaacaccgtcatctcaatcatcaatgtaagtcgaatggttgttgtttatcctgtcctcgatggttgctgagctcaactttgttatgtcgtccatacagttgctcgcaatcactgccatctcggagctcgtagacaaccgatctttcgtgtctatggctgaaaacttgtggatgcttcccttattcattgccttgtgagtctggtccttctatgctcttattctcttcgaccacgttcactcaatatcatctgttacctatctgcttgatcagagatgcactcccatcgataggtgcttggcagtactttgccatcgccactgtgttgctcgggtttccttacgttcatgctatccaagtttcgtggtgtagtcgaaattctggaagtgtgcgaacgcgaacggtgtctgcttcagtttacaacatggcaggtaagtcagacggccctatcagccaaagtcgtatccgaagaatcgtcttgctgaccaagtctccttcaatttgtcctccaacaacagtccaactctcgtcgattattggagcgaacgtataccaagcctcagacaaaccccggtatcacaaggccaacaggtggctcattggaattctgtgctttaatctggtaagtgaaatcatttctcatctactgtgtttgatggtacctacaatactggctgatcaatcatgcttccgtggtcaattggtttgcattgggcacctagataattgtgtatcccggcacatacttctactacggatggagaaatgcttcaaagaacaaaatctgggacgctatgacgtcggaagagaagtcggaatacttggccactactaccgacgagggaaacaaacggttcgtcatacagttcccttcttttcccttgctctctggactgactttgactaacccatttgatgctctgatctctttgtgttgctccagactcgactttcaattctctagatagattatctctattcctacatcatctttctgctatatctttaatcgttgttctgtcatctattgaatcggtttacagttgtatattaccgtatattgccatacaaaaaagattgtatgtctttggctcctgaaaagtgacatcaaccgatgatggttgatacatggcccttccggacttaagtgccttcaaaccacccagattccacgagccatgtgtttggtttatgccagcttcagcctcaacagtcatggcagtctcaacgttagcctcatgagcgacagcctaaaaatctcagattcttgccacctggattttctcttgatgaagggctaggtgcagcatgttgcgcgatgcgttccaatgtctgttccactaatcttgagagagagcagagaaaacaataagcaattgaaacactatcctgagacacgcgatacacgtcacttactcgacagacgcttcgacactccatgtgcgtccacgctttgctcctctctgagaactcgccatagcacttggagcacaccctcgacgtccgatgctcccagactttacggacctggagcagtgcaggagcatccagcttggcaaacagcatcttgacaggaccaggagcatgcccacgagaggccaatgggaaggcgccgtccccgaaggctagagaaatacgtagatgtccttccagcagacagaccggcagcttgtagtatgcttgctcgcggctgatatgcgcgctccagcgaagacacctccaccatcggacggcgaagaacgtcgcgagtcatgagtggaaccgagaatgcgaggcgagagtagcgcagagaccatcgagcctggatgttctgaacgaaggaagacctgacagaaggaagcaaaacaagaaaaccaaggtgagtagagcagttcacaaatccggcaaggcaatttgtacagtcggcatgagcgtgagcgtgagcggcacttatcacggagagctgttaacacttccgcgttgcttttcatccacagccgctttttctgacggtctcggtccatgcccacaaggcacttccatgatttgagagagagcgaccactgcgtgccgtgctcagccagaccgccgttgtccagagacatgtcgggccctcctgcggtcgtcgagagcagcgtccgacgaccagagtcgtgagtcacggccttgtcctctggccgcacaccctaccgaacgcaccctgctcgctgtcaacctttgtcttcgcccttctatctccacccttagtcgtccccttcaactggtgtcgacgtcggtctcagcactctggtagacgcccagacaccccgatgccgtccgtactgagtgaccggacgaatgactagacgagcgaccgggcgaaccgtcggtgttgggtctcgactctggatatacggaaagacctcctccactcttcccccccacttccccccctccac

SEQ ID NO: 1382 - DNA, 13509 bp, Xanthophyllomyces dendrorhous
agacgacatgatgaacagactgattgtatctggagaatgagcaacgcagcttggcagatcggagcgggtgaaccgatgagatagatctatctggacaagatggcatgcgacaacctgggtcaacctgacgtcatctagtccaaggtgatccaccggtcggtcagtcaggtattgcatgttgcatggtgtcgaacctccaagatgggttcctttcatataccgataagctgctgtgaacagtcgttcgttatgacactgataggtggatcatgagtcgctccgaactactttggccgccgaactgttcgaaggaaacggcgtaacttgcggtcatggctcgggcgcacatcggcgtagtcatctggatcttctcgttgataggaaagtccgtagtgaactcacgagtctcgctcgaccacatctacaagtaaccgatttccgacgacttccatgacatcctcccgccgtcatcgtcgtcgtcgtcttcatcgccatttgcagactgactaagatcacgtacttcatgccgtatttgaccaatgacagtggtagagactttgccagatctgtgcgagactggcatccatagacttcacggcttgctaatgggctttgctctcgcaggggtacgctggtcgtaccaatgttccggtgagacgtctgcttgcaatttgacagcaataataacctggctaccgcattctggcttacaatcggacagattgaccggaggctctgacccacatcgaaacagtacactcggatgttctcggactgcttatagactggctggtcgtagatgctgacacctgcaaggttcataaaggcaacgtcaataagtacagcgtcatgagtgtggggtggttgaggtcaacttctagagaacccatctttctttgatccgatgcctgccagcttctttccgactccagtgagccccaacgatgatcatccccaacggacactcgagacttttggcaatcatgagacgggtgtgagtgaactatgggctataaagctgcaccagttttgtgctgtcctcattctaagtttctttttcgcttcttgctgatcttctttccccaccctaaatgagactcgacttgagagaaatgctttactctgccgtcgttcctgccctctgggcctccctttctctggcctattctgtggacgcggctcctttgacggcccatcagaccagcacgtccgatcctgccgctgtgttcaacacgacgatgtttgctcccggtcgtgagccaggtgtctactcgtccaacttttcccgcttggtcatgttcggggattcactcagtgacaacggaaacggcaccggtgtgctctcgaatggcacgagaccaaaccccgacgtaagaaactccctgtttaattgatgagagacgtggtaatcgacaccagcaccctgacatccgtgcacacttgtctgaacagcttttctggagataccgctggtcgaacggaccggtctggatcgaagatctggctgaacgtatgtcggcttcgttttgtagtcaatggttggtgtgaagtcttctgatctgtttctcatctatgaccatttccagggatggacgtcccgttgtttgactatggtctgtccacgcaggttctgatatgtgtgctctggccgagcgtggtttcctgatctgacgaggtgtgatcatatttctctacatcggcgtcgtcctctagctagcggaggggctaccgtcaacaatactcggacgcctgcttatcttaccaatgtcaccggtcgtgttccgtcggccctcgagcagatcgatacgttcatcagcttgacaaactcgtcgtccggtcgcaacacccttgacgacacgctgtttgccatctggatcggatcgaacgacctgttcgccaagatcgaaagcaacatctcgttcacaggggctgatctcatccgggataccttcatcggtatcgagaagctgcaagctgccggtaagttctggcatgttctcatcgtgctcttctatcattcattctactgtgcttctcgttctcggctggccggctgcttgcatcggctgtggagcgacgtcaccacctggatgggacctgaagactgactagatatgactgtttcaggtgccaaatactttgtcatcaacaacatctacgacatcggccgccctttcatcgatctcatgggatcagaaatcgcgtctgtgatgacgaacagcctgatcgactacaacaacgctcttgactctgaggtcaattcccaggcatcagccgtccagaacgcgacgttgcccactgctgagttcgtcgtggtcgacacatgggtggctgcgaaggccatcctcagccagcctcaggcttacgggctggcgaacgagacgatcggccggaggtgtgtcatcggctcgagcatatgttccgacccggactcatacttctactgggatgcggtgcgtcttttcgttgctttgtatatgtttactgatggtcgatgatcattcgaactaagcatggctttctgtgtatctcttgagttcagatccatcctacgcgggtggtgcattccctgtttgctaaagccgtagccgctactctcctcagagcaggttggatctctcgaaaatgagtgatgcacaaacgctactcctatgagtatcccatccatcgagaagggatttgtttctttctcatgagccagctctgggtagtcctgctccagaatcggccgctgccgttctcacactgagatgtgaaggcttttcttcctttcttcctttttactttctttctcttgtaccacttctctcctagattagttaagtcaggattaagcaacataaggtacattagttcgaaactgtcatgactttgttgattgtggccaacttctctcctttctgtattcatcacttgattcttgttctttgggcgagcgtcgtccgccatcagtgtctactgattttcctacatggtaacataaagccaacaccctcatccgctgaccctgcgctacccacatctgacacccttgttctcccttccacttttgtcgcacttatgcctatttttgtcggatcactactcatgttcatttagtacgatggccgcgccggtagagtagcggagctgtgtgctcatgggtgtttgtgcttttatcacccgttgtgtctgaagcatatgctttcacttcctaccttcttttccttgtcgcctcttgttccgccatagctcaagatcctgatgcggatgaggaaaactcggagagtatgggagtaacaagtgcgcttcgatatttttctgatgatcttctatatgtatttcttgagcttagacctcttcaatcatcatagttgcacatcagaaaccttttaatgttactttccctctcatttctaacaatctctgatcgcatatacgtccatatagctgccaggcatgtactttgtacgaagcagaatatcgacgaaatcaacattttgatcatattggttgttagtgcggattatttgtcttgattgaaaattccccaatcccctctatacacattttttcagttctctttccctttttcctgtcctttgcttgtcaataccttctctcttggttttttttttaatttcatttgctttctacctcctccttccattccctcattttcctttctccttcctctcctttctcatttctgaatgtatcctctccgctttatttcatgatgctcaaactgagtcgtcctccattttgaaatcctttctttttcgatcatattcttgataaaatagcaaattggagctggcaggattcaatctgcgctccctgaactacgtagggccgctcttcccactgagctacaaccctgacgttaaagtgaagaatgcccacattctacaatttctccacctctgtctccgatgatccttttccttttcctttcatcatctcttcataagatcaaaacttcggctatgtacatatgtatagatattgtatcctgtcacctgaatgtagaagtataggatgtagtattggcagaagcccattctgctcagaacaactaagagagaggataggatcaataagagtagacaaaagccttgatcatgtgtcaaagagtgtctgtactataatccgaaggcttcgttttcgaattcatggtcagagatgttgatcaaaaggattgatttgacaaagaggattgagcgcaagacggatcaggataaatagtgagaatgagaaaaagactctcagcaatcaagtcaagcttcacaagggcttgatatgacttgatcgtattcatattgatctcatcattatactaaatagacaccgaaatctggccgtgcttgatctgaatagttgccatcgtctcaggagaccatgcgaagatgtccattaaaaagagaagcggctggaagacggtatgcgatttggaatagtatctaatgagtacaatctgaatttaaggagaatgacagaggctacgatactggacattcagcaaagcgagcctgaagaatattgaaagcaggttgtagaagatgacgagcttgaacatggtgaatatgaccggctagataagagaaagattacttgactcagacgataaatgacatgtagaacgaacggcgagacggattgatctgtgaaagaaatcagtgcgttggtagatgcccaaggcaaccataagaaaaggaaggggtgggccgatactgtcagtaaaacctcatgtgtcaacgtcatgtggtgccttgatactaagcaagtagccatgaccgttgtcgagcaatcgtagtgatattgacgagtcaaatagtgaagctattgaaaaactctcgcagtcttccttcttcagtacgaactctttttgttgctgctatataatatcgaggcaggcgcaaatcaaggtcgcgattttcaattgtggacaacgcttgatagatgatgatgtacaagtccgtctatcggtggctttttttgtatcagctttagcatgctcgacagagatagaccgagttgaaacgagccaagagatgttccgaagccatctgtggactgtcatatttatatagaaagcggggagtccgaaatcaggatcacagacatcgcctgatatatcaacctcgcataagaaagaaatcactatgatcatggtattcattcgtgtttcctgttcatttacaggacgcgtccttgacttggaaacaatgcttgcgacgaattagtcctgcatcgaacttttgtgatacatcgcaggtgtttctagacagcatcttcggcccgagaaacatgaaacatacgaacatgcattggcaatgagaggtaagaggtgcatcgacctcgatgaactgtatgagttgtgtatcgtcagatatgcgtccatcaatcgaagcgctcatccattagatgccggtcacaactctgattagttgggcggatgtcagcgcacagataacatttttgtacctcacatgagtgagcgaacagcgaatttggggaactgttcaagttgatatatatggaagagtcatcgagatacagcgccaatatacttcatgcttgattgtatatttctcaacctgggtccaataataagacaaaaaaacgttcctatataagatgcgataaggtagttcagaggatcaggaacatgacgaaaaaaataacctattgtatatatatgcgtttgtgaaatctgtttgaactacaaacaaaacgatcaaaaagcatgcaatgatactcttaacactagttccatgactaccgaataccagactcatgtcagaaatgatacatctaaacagcgaacgatgagaattttgaagtatactctgaactctcactgttgagatgcttatgaaccgccgatttcggcttttgagagatcttatgatttgataagctaccgccttcaagttgagaccgtctcgcaaggcaacacaccgcgcgtccgccagtcacactgacatatccctccaaccccctctacgttctcctctttgcctgacatgaagtggtttgacagtgccaaaaaatccagcagtgaatctacaagcctcgtcgactgcattcgccaatcagtcataggtgagggcaacatcttcgatggtcctttcggtcctaggcgcatcacctacgcagactacgctgcgtcaggtcgaagcttgtcgttcattgaagatgtcattcgtctcgaggtgttgccattatatgccaacacgcataccgaggcttcccagactggccgtcagacatctcgtcttcgcgaaaacgcaagagatatcattcagcaagcggtaggcgcaggagtcgaagatgtggtgatttttgggggatcaggatctacctttgcagttaacaggatggtggatatactggacctcaaaaatggggataacgtatcggacgccaggaccgtcgtctttatcggtccgtatgagcatcattccaacattcttccatggcgagaagcgaaggcagatgtcgtagtcatccaagcgagcagctcgggacatatcgatcaagtcgaacttgcagctgaacttgatcgatataaagaccgccctatcaaaattggcagtttctcggcgggttccaatgttacaggaattttgactgatgtggacgctatcagttccctccttcatcaacactctgctctcgctttatgggattatgccgccgccgctccacacgtcagtatcaatatgaatcctgatggcaagcaaggcccgcgaaacaaggacggtgtttttatctcgcctcacaagtttgttggcggtccaggtacgcccggcattctagtcatcaagcgacatcttttgaacaataggaagccaactcagccgggcggtggaactgtagcatttgtctccaaacactcgcagcgatacgagaagaatccggtgcatagggaggagggaggaacaccggatatcattggatctatacgcgcggggttggtatttagaatcaagcaagagataggagtggattatatcgagaggcaagaacagctttacaaccaattggcaatagctcaatggagccgaaatccttctatcgagatacttggtaatatcaatgcccctcgtctctctataatcagctttgttgtcaagcatgcggagggagcgctacattacaactttctggtcgcccttctgaacgatctcttcggcatacaagctcgaggcggctgctcctgcgccggactatacggcgcagatctgcttaatatcggcgacgagcgattacacaggctggactcagtcatctcgcaggggtatatcggcctcaagccaggatggacgcgtatcagtttcaattactccatggcactgccgtctattcgcttcatcatcgatgctgtcgactttgtcgccacgcatggtggggcgtttctgaatcaatataccctgaatgtgtttactgggttatggacgcatcgcaacaaccgcccagtgaagttactaccatccgtgacctctatgctagcgacccgacgaccgactcctaatgttggagaggagacatttccggtctatctcaagagggcacaaatgctcgcttttaatgcctcatgtccatcagatgctgcgacatcaactctgccagaacatgtcgaggcgatgcgatggtttcctctcgttactgatgagaagtagtatggctttcaatgtattatcttaaacatgtatgatatggaccggcatcgtgagtccttgttaaagtgtgcttttcattcttggtcacagtcagaaatgcttccagcttgtgattctggcgatgatgagtacccaaatctctccaagaagaaagagtagaaaaaggcaagtaaaaatggattcggaacggatcatggaagcctttttaagtcttataaagatatcaggttgcatacatacatctacacgatagcagagtttgtctcggcgtgacttccgtgagcttcagtagatgctatagtaacaacgataaatgtgtcgttcaatctctaccaccctcaaagagactgttgggtggcttgagcggaatgagcaattttttaacggcacggcttatgtgtagatcctcatacgacggtgatacaaacatcgacatctagtgagaatcttagaggaattaaacaaagagcttgcaatatcaactatacataacctcaaaagtatatctggtctatctccgggcaaccagcgggagttgattatatagcgcattggtatacagctgagcagtgatgaggaaaaatcttgacagaagttgaaggatgaccaacagccaaacccgatactgtaccaaaagatcaattggcttatctttactgcgataagtttcgtagcctcaaagcaaattcaagtcgctggagaacttccaggcgaacgcttagccatgaagaacaacgttgacaagaaataatgggcaaagcgataacaattcgaagaattcgctatcctcctcactgtcatcctctacttccccctctactccttcctcattcatcttggttgtcgccggcgatttatgctttgtctgacttggcaagtgtctgggattaaaccgggtgggttataccaaacatcagtagatacattcctgactgcacaaatttctcgtctagcccctctcaatattcatatgcactctacctgtcttatctttatgcctgagcaacgaaaagatgcaggcgctttggcgcttgtcctttcttcgaaattctctctttgtcttcctttctcttcattcctcaattcggatttggtccagacagatgaacgagacatctatatatacatatggttatgacaagagtttatttctcttttccatttgagcagatgctacatggacagaaaaagaagagaaccaaccgcaccgattagacctatctgattttaaggatgtaatccgtaacacgagcccacccccagcagcagtagtattggcatagcaatcatatagagatgtgaaaagatactttgacacctagcttgatacctactgtttcaaacaaacatataggtcatcctgattgaccttcttatgtcctcccatcttcgacagaacacccagtgccatcaacagcagttccgccctcttcctctctgagttccataactatatctctcttacccctgcctctccagatctctagagcgatctggttatccttctgattacaccaatcgagaacaccggctgcacaagcgataccagtactcatcgcgacagtgacgtgggccatcatcacgcctgtatcgccacaagcgaagacgccaggcatactcgtactgttgaaaggcggagtcgcggtgaggtagctcccgaaaggtgagttcgatgtctcaagctccaactggctaatcaaatccggaaccgagggctcagtaggaggtttatgggcaatccaccctaaatggatagacgacgttggattaggggttttgctagcacaaatgtcgttagcaagatgtatatgcacaccctccttgctgtctggaactagtttcaatactttgcgttggtcgacggttatgccgtaggcggcacaaatctcgagggcacttgcatggctgggttcatcagaagggctgagaggaccgttggtgaagaatgtcacttttgactttgggggtgacgttccacttccctttccggatggaggtatgacacgcgctctgtctggtggaagagagatgaagtgcgccgtggtgagtagcttgatcgtcatgggattgaagaccgggtatgctaagactcctgatggaagatgagatcgctcgtgaccgtcacaaaagaggcactggtagctgtaaagaaaaggtacaggtcattttctcaatttctttatcaaaagattgaacaagaggaaaggcaggcaaagaaaaacacaaacatgttttccccccaattatctgcgtatcctgcgagatctgggaagatatcgcggcatccggtggcaaaaaccaaagtgcgtcctctccaccgtcgtcctcccttgtcagcatcctcctcgacaacaaactcataattatctccagcctccttcttcaccttcgtgatcttgccctcgataaagtcggtatttccgtaacgctcgatctgctcgcgaccaatccttcgaatctcttccggatcggtgtgatcgcgagtcaaaattgcatgagcagcgtggctccgtgcgttgcggtattgcgagtttgagattacagcacaagtccggtgaactcaagcaaggccaagagcagtgctgagtcctgcggggccagagccgaggatgatagcatcgtatattttggaggctgtcatttccaagatggagagtgtctgaaggcaaggagcactatgtttgtatccgttgaaatctgtttcgaagtaacttggctaatagcgagaactatctggttttatgctgcctgagaaagcctatcggtggtaaacttcaaaagtgaggtagaacggaattgcgcgacgtcagtgtcatgtcaggaggtctattctgaggtcggcacagtcgttagtcacttggcgcagagactaacatcatgactgttacaaaccgaaattcgggacgatgagggcgtcagcttcgagtgtgaaggagagctgagaaagagagatgaagataggagagaactaagaatgcgattcgagtgatttatcgaacaagctagaggagaggaaggcgatggccaaaagagctcagacgaaatatagtgaataaacacatgaccttgactgagtagaccgtgtaaggggcggaggctgggttggtaacaaggttgcaaagtagtaaccacacaagacttttagatttcaagggaggagttcaagctctcgagacttggaaacaggattgatagggtcactaggaccaggacaagagagcaaggataaggacaaggataagaataagggaaggagtggaatcaacaaaaaattcaagactggggttttatctacaagtggtcagaagcctgtcttgcacctatttttcagaccctacaaacagtatgaaaggacgcgctggcattactgtgctctggcagtacaatgcgctagaattaggagcgggagaagtagtggaagtgaaggtgtagattatatgggttacggcttatcaatcaggcggaactcaggttacattcctgacagaccgacacacgcatgagactgtcctgaacccttgtcagaaatgtgacccgagtgtcacacccaggtaaccttcttctacttctgtttcttctcctgcctcgttattcctcatgatctctcattgcaacaacacgcaggtatatagtctggtagcgtaggtgcttctagcacttcctatgatatgttctcttacgcataatcgttggagtctgaggatgatatataagacgtgattcctttaccaccgatagtgtagtttctgaagcctgaatcctttgtcactctttggttccctagtactcttgttcccagtgtcatatcaatcttgtccttccaacctctctaccttgcgccctcgtcacagtcatcaagtcagagagcctgaacttccctcctgccggccacattgccgtctggttagacccctcgtaacctctccgttactctctaaacccggatcccgacatccttgacacaaggcttctaggtcacggggatcatgagacgcttattggaactagtcgctatcgagggaagttcttgcgcgagaattcagagttgcaggtctggaggaaacaaggacaacatttattggacagaaaggacagcttgtaaaaggtagtcaacaaacaaataccaatttgaagacccgcatcaaaagaaatgcgcaagcgctcctttcgtgtcatcatcaatcagaatgataatgaagcagagaattttcaagtgacagatcaccatgcagtcgcatcaagagaaatgaggataagttaggatcatctagtgcattaaatggaaaggaaaggcatgatgacatgggaaggcatgacgaattatagatcatgagaagcgtccaccacggtgcgtgcacatgttacctgatctttgacagtgttcgcacgtcgactcttttcttctcctgcttgcccttgttttccgtcgatcagctttgcaaatgttttgatgaatgcacatacaatgtacatgtacacacaaactcgacttgaatttgttttaggcagaagtcgcgggggaataaaagacaattggtgcttcagtcaaaaaaccggctttgtcttttaaggggaaccagtcgaaacgcatgcttcatggttaaacatccatcacaaaccaacactcagaacagaaagacactcatgttcgttagcattctcttcttctgctttcagtatccaaacatgtctctgcgatctgatcgatgtttgacgggtgttctttcccacgcctctcgatgtgatacagatgaacgtacgaagcccatggcaaaatatcgatctgagacacgctcaccgtctgttccaccgaactcagactgaactaccttgacgtggtagacatgtccttctttgttcagccgactggcccccagcccatcagagctaccgactcagatggatacccgtcctgtccctccgatcagtttagttccttcctaccttgtctatgcccgtaccggaaccccatcggttaaatcaccaacggaagaaggccgccctccagacccggcccgcagcaaacgctggtgaacgacgaccggtcgattacaccggcgatgtcggctccgaaggccatactccaactctgtctccggtatattacatcccggggtcactgacagcggccgcggttaccgctgtctgtctagcgtgtcttcccgaccaatcactcaccatccaccgtcttccgtctggcagaacgaatggcagaacgatcgtcatcaggccctcagacgtaggctcgactgcagcgcccgtcatgtccgatgaacttccttttagacttgtagcgttcgttgtctgaacgagagaggggcgacatatatagcaagtgagtctccttaggatacggctgaaagcttcttgttcctcacaactcctctctctctctctctctctgtctattcccggttgtccattctctttcaatctacgctttcctttcctgttcccaaaagatgcgacgtgcattgagtccccttctcttgggctctgtcggccttgctgcctctctctccgagatctgcacgacgtcgaacgtccaggctgcccttccagccgatggcttcatcgagggtgtcaccttcaatgcgtcctctgttactgcagctctcgtctacaacgagacctacaccggcgagaacaactttccggatgccacgatctcctactgcaacgttacctttgcctacagccatgccggtctgggtgacaacgtccaggttcagtactggctgccgtccaacttctcgaaccgatttttgaccaccggtggaggcggatatgccatcaactctgtcagcaccagtctcccggaggccgtgttctacggcgctgt

SEQ ID NO: 1383 - DNA, 1882 bp, Xanthophyllomyces dendrorhous
cgagaggggtggagtcaagtccagcggtacggcggccagtttgatggtgccgtcgttggcgctcccgccttccggttctccttccagcagttgaaccactttggagcgaactttgttcagcagacgcttgactactaccctccttcgtgcgagcttgacaagatcatcagcgagaccatcgctgcttgtgaccctctggacgggttcaccgacggtgtcgtcagccgatcggacctctgcaagctggacttcaacatgacatccctcatcggcaccgcttactcgtgcgaggagagcagcgcatcgtctgtccctctgagaaagaggcagatggtcacctcatcggccacgcctgcccagaacggatcgatcaccgcccagggtgtcgccgtcgtgcagaccatcatcgacggccttcatgacaccgatgggaacgccttctacttttcctatcagcccggcgcggacatctcgtttgatgctgcgaccgcctataactcgaccagcggcgagtgggggatctctgtttccggcgtcggtgccgagttctaccagcggttcctcaagctcgttgactctagcagtctggactcgatcgagggctacacgtacgacaccctgaaagcatggatgatcgagggttggtacaggtaccaggactcggttcacaccacgaaccctgacttgacagagttccaacaggccggcggcaagatcatccactaccatggcgaacaggacaactcgatcccgaccgcatcctccatccgatactgggactctgtccgacaggtcatgtatcccggtatgtcgttcaacgagtcgaccgctgccctcgccgagtggtaccagctgtaccttgtcccgggcgctgctcactgcgccccaaacacggccgagccgaacggtccgtggtgccagactgccctgggagtgatgatcgactgggtcgagagcgggatcgagccggtcactctgaacgcgacctacctggcgggcgactacatcggtcagaacgctcagatctgccaatggccgttgcgaccgatgtggtcgaacaacggaacgagcatggagtgcgagtatgaccagaggagcttggacgcctggttctacgactttaccgacagcttgaagcttcctttgtactagacaatgacgtttgctagcttttgtattgaaaaagagagaaggatcatgatataatgtggcacttttgttttgtacactcgtttgctggaatctagagtattcagtcaaacattctgtgtgaacatgcgtgtattttgtcggacaagtaatgaatcgaacagaagaaactgaagagattgtcatcaaaaagagacacatctctacaaacgtagagacggctgactgctggtctggacggcatcattattcagcccacgactgtaaccctaactcgccccgaggattcctcagttatctctccttactacgatcgcgcattcatccctaacctcatctcaacacttaatggtggcaccactgaacgccttcaccgaccatgcttgacgaacctcttccgatgtcgcttccggcgatccttgtcaatcccaaacctgcagctgtctcttatcctcgtctggattccagagcgtctggatcccggtcgatcaaaccgcttacatccaccaagcgagctcaaggtcggagggctcggctgagaaaggagaacggtaagtgttgtgcttcaggtgctcagtgttgttcttttctagtctggcaggtactgatcgtgttgcctgttctgtttgtctgtggaaacatatcgatgttcagactctctggctggcaatccccatgccgtcgctcctagccggcacgatcttccacttgctcctcagaggcttccgccacc

SEQ ID NO: 1384 - DNA, 1506 bp, Xanthophyllomyces dendrorhous
agctggaagaaggaggttaggcgagaggtgatcgtattttccggtcgaccgcaccagtcaaacgaaggcgggaggatcgtcgatgcttttctggttcccacacccgctcgagacagcccgtcgactccatatcagagtgccagtgggcgggccggacctctgccgctggacatggtgagcagatcgttcgaccatgacggtttctgtccggccatcgtagagcttgcaagaagcgaaggaagcctgacgtgggcgatagcggaaggtttcgaaaggttcgtcttgcacatcgcctctgcatgggtctcattcggtagtacctttttgacgtcatgacgaccattctatagatacgtcgtacactgtgtcgctcgataccacggccttgtgactttctccaagacatcaccttatggcactcgactgacatacatcctcgtccggccatcccgtgttccggccagatcatcggaccgcacggtcacagccggcactttggatactcctccgacaactgacatgtctagtgttggtggaagcggtacagacaccgatcgagcgctcttcacggatgggcagagcgagagcgaggtcgagactggatggggagggtgggattcggagaatgagcgactcgaagaggttgagacaagagcagaggaagagaaggctcgattattagcgcggcctaccggacttgtttccacggttccgaaaaccctcgagctggtctccctggcgaatcatcacgacctggaagctgatgtcgaatcttcagacgatgagtcggcctcgtctacgactgatgcacttgcgtcctctctggtgtctctggactttgtttcgacaccttcctctccatcaaccttgagtcatgactcgtattccagctcgatgtcccgtgtcatccgaccatcatctttgtcattcttgtcttctgccatagcggaggacgaagaggaggatgctgatcagactcttacctcgagtccatctttcgaaacttccgcacacgtggattcaccgacgatcgatcgtacgaaagaggatgcttcaccaggccctgtggacgatgaagaaggaagaggacgacacttgaatggaaagagcacacgtagtttttggcagtacgtgtacggctgaacaagtgtcaacagttctgtcagacggcgtgcatcagcatcaatatcggcatcagcagcatcagcatcagcatgaacatcaatatcaatatcattatccagcattagtgaaacagtagattgtcatcaagctcattatggaatattcctgaaggatatatgtctgtctgcttgtgaattcgagcttagcttgactcttcttatgagatgttggccagcataaggacatgccatcttgtaggtatggcgtgtctgagtctaccttcatcatcgacattagggcaggtaatctaacatgagcggcggactcaactatgtatcgagcgtgaaactagaaagaacaaaaaaaaaagagcagagaaaa

SEQ ID NO: 1385 - DNA, 302 bp, Xanthophyllomyces dendrorhous
cgacccacaactctgcaaatcacatcggtccatcccatgcgagatacgagtacatgaatgacagaaggatggcaggaggatgagagaacgtaaatatgaatagaaacagtgacatcaagtcagccagtgcaaaattcctttccttgcacacccacaccttcccatcggcgcggtttctcgctcagtgacgccactcacccgatcttctctcctgcaccaaccgaaaaagacaggcccttcaacacaggaggcaagtccgctcgatatttcagcaccacatctcggaacgtgatagcacctga

SEQ ID NO: 1386 - DNA, 890 bp, Xanthophyllomyces dendrorhous
tatatatggttgcagagctacccattcagtgatgtgatgtcagatgaagaacacacaaacagcatatacttacccgctgagactctctgcagtggtcagaaggtgagaaacgtgactgtgcgatcagcttctatccgtcagatcaacatcgttggtccggcatcacctcgaagaacagactaacctccgaactgagcgtagatcgtagatcggaaaatagagtccagtcgttttgcctctcgcgaggatgctcggtagtagacagcagtgatgtagtacagcgagagcagtggtatgaagatcaaacccagataggggaaggctatcgagtgaagcgataaggccatcgaaccatcaggacatgctcagattcgagcccactgatcacatatacatccaagaagaaaagggagtaactcacagtagaagaccaaggcgatagtaccaaacacattcagactcatagtcaggaaagtgttcctgttgatacaaagaaagtgatgtctcagccatggcatacacctcatcacccatcattcgatcggcgcaatgatccatctacagtgataggaactcaacataccactgcatcggtagctgatcatccagcgtggttatatcttttgacaaccgactaatgattcggccgatctgatcgatgattcatgtcagcttgaacttgtaataccatatcgccagtggatgaaagaccgtgcttactggggtcgcatcgaaccacgagactggggtggccatgacgccatcataagccgagttgaacaagttgaaactggcattgatagccgatagatatctgtttgggatgatggatggatccccatgatcacagtcagccggatagatcagtcattcgcccacaaggacaaggt

SEQ ID NO: 1387 - DNA, 7621 bp, Xanthophyllomyces dendrorhous
  misc_feature (3770)..(3779): n is a, c, g, or t
  misc_feature (4886)..(4895): n is a, c, g, or t
gaaaaccgacaggaggaacgttccagcgactgtccgtcatacaaccggtcgttggtgtggccagtgtcgttgatcaagataccaagagatcaagtcccgatgaataatgcttacaagtcaagatagtgtatgccagaccgagctgtgggtagaaaccatggatgaagaggtcgatatgaggactttgatctgagaggaaacaatatgctgaaagaaagatagaacgcgaaccccagcatacaaccccatatctgagaggaggatcaggcgcagagagaaggattaagaagaggcatttcctgatcagtatgatgtcttcacatgtacaatcccgacacagcttgacgtacaatcactctgagaccatccaacgatagagctatcagaccactttccgaggaaaatggtgttcccaacgatggaagcctgagtggtcgcgacgagagatcgtcgagagaacagtcagacgagaaaaagagaggaagccgacacaaaacacctcaagagaacaggactctacagacctgagctaatatgaagcatgacatgacttcatcaatcagccatcgaagatagccatcatcagtaacagattcggatggtcaagaacacgccagctacgtgctacacagaatctcacagactcacaagcgagcgcccaccagacagatcccatactgtttatgtacctcgtataaactttcgaagataccgctccgaccgcacgctcttccttcatcgtcacaagcgcaccaggagcctgtgatttcgccaactcatcagccgtaccctcgttcgttcgaccttcaccggtttgtttctcgagctcgtcctctatcgcaaccttcttgagctcgatatcctcttgcgtctcgatgagccctgcagaatctatgtctaaatccggatcagtcacggtctcagaactaccatcatgcgcaaccgacatgtgctctgccatgagttttgcaagcgccccgcttgttgcgagtagctcttgatacgtccctttctcagcgattttaccatcgaccatcttccagagcagcattcgagccaaacggacgccgataagagagggagtaagcaaaaacgcgagaccgaaagacatcgtcatcgtcagaaacgctcattccgtaactcggcctcactcctggtcatacatagagacaggcaatatactcaccgtgatgataagatcagctttcgaaagcacctccaggtgatgggtgatcaagatccgagttttagtccgcaacggtccgttgacgaggccgtcaactagcgacttgcttacatgagcatcaactgtgacacacggaaacgtatgataaaacgtatgcaaaggcagcgagtttcagccagagaaggacggtctgcaatcgcttggacggagtataggccatcagcattggactcaccggcagatagctgcaggcgggaaggttgtttgtatcagagcaaagccggatatatggcgagcacgttcgaacatcaccgaaaaaatgagataaggcaaagaccccccatgatacgtctcagtcaacatctctcgcctacattgagcaaacagatgacttgagaaggaagcacgtaccggatcatcgaagaaattgatctcgttgccacagtacacagctcgggctagacacactcgggcctgagcggatgagtcgatgcgatttaggaagaagataagatagagagtgcattggtcttgtaagcaaatcaacccaccaactgtatcgaaataactaggaatctgtcgatgagatatcatcctctgcgcctatcgctcagactcaccttctgtccaccggatatgttgattcctttttctacaagattcaatcgtgatgtccaccagcaacatacatgacacaaccgatccaaacaagatggacgtcagcacactgccggtctagtacactagcgtgcccccaagagcatgagttacctccgatctcggtgtagatcccatggttgagcatcgcaatatctctctccacttttgaccgtgcgcagatggaacacatggtgagaatgatgaccacgtaacagaaacgtacagaaccaacgatcagagctgttaaatctgccatcgagccgacatcgttcctgatgaactgtactcacaggcacaggccttgacagcagcgtcgaaacgcttatcgtccatctctgagccaaaaaggatgttctctttgagagtcgcatttctgatcagacgttgatgcagaccagaaacaggtggaaaacggccatggcaatatccaacgagaaagtgcaagaaaaaagaggtggtgagtctgcatggacagtttctacagcgaccagacgtatccgtttcactcagtctgaccactgggtagacacatcactcacaatatccaaggcgattgaggaactagttgcgcccgttcagatagtatgacagtatccgaagatacaacagaatgaaacagaacataccccggaagaagcgtctcttgtcagtggctgtctcaagcactcgccaggggtaagacagaccaggaatgtcatctcgacacgttgaacgataacagtgcagacgtacagtaagcggaagtgcctccgagatactacgtgcagtagacaggcagacccatgtgtatccccactaagtcagtcacacagtcacaaaaaagggacataaagaatcggtctacttacagcttcacccgacacaagcttcatctctccgagcagcgcctgcatcaaactagacttgccagacccgacccgaccgcagaccacgacaaagctgcctcgagggatatcaagatcgatgtccttcaatgcgaatggaacgacagggggtgcattcaatcgctccagcctctttctctttcgctcctccttctctgccgccttttctttctttgacttctttggtggcttgccctttcccatcggcccgccctttcctggagtcaccctaacaggctcatcgcttggcttctcggcactctcccaagagtagcttccatgagcagagacagcctagatgaacacaaatagtacacgttgcaacgattcagtcggtgcacaggcaaggctttgtcacatgcaacacacccggcctatcagaaagccactcacatattccgcatcaggatatacaggtactgggttatcgatctcgtctcccaaaaggcataaggacactctaccgagtccgacatatgcatctgagaccgcctgaatagcaagcggaatgagttgcagcggttgccggatgttgttgaacaactggagggcggtgaagatgattgccgcgttcagatcatggccagagagcgaatatgtgatctgtattgaaagatgacatatgcgtttgtcgtatcagcagcagatctcagtagctcatctcattcagtcgacgactcacgaatgacaacaccgcggcaaagacaggaatgaacgccatgacagcactcattatagctagccggtccgaatataagtggtcagatctactggtcagcatgacacaatcgcttctctgaggtcttcttccgtcactttcgaatcctagtcgacaggagcacaccaagcgcaacatacctcgcatcaaacagttcttctttagttcttccatctcgtcttgtcgatagtccgagatccgactgccaaagtattcttcgtaggccatgaacttgatgactcggatgcccgagaggatctcctgcagcaacctaactcgagagtcgacgatcttcatttgccgttgtcgagttccaatcatnnnnnnnnnngaagggtatcccgatgacaagcaccgcaaagcctacaagggccgagtacccgatagtgtgcagcaggatgataagtctgtgacgtgtttgacaaagagaagcatgtcggtcaggctgataaactacaatggaacggtatgggtatcggatgaaacgcaagacacacatacccgacaatgacctgcgcaggttggagatagagctcatgggtgagaagggcagcataatccatgaatgaggcatcggacgagatgtgcgtgacgagctttccattggtatgcaccattctggcttctccggacagccgaacggactttcttgagacgaccgagatgaccgctgctcggagcatgaacctgaaagcgaatggagatgtaagccggtgtgtgagtctatcagaaggcttggtctttgttctgagaactgtgtcagatgctgaaggttcacctacccagtgatcaaccctctctgaagaaacatattcatgaacagactagaaacctgctgcatgaggtagagcgcaaagcttatcccgatcccatagcccacagacttcggtacggacaccgtttctccagtttctcgatgcgagtattcgtacgactcggtgatgtagttcaagatcatccgtgataccaaaggagaagtcgacgttaaggcgatccaacacactccaagcattcccccggtccagaacctgtacatgtgttcatagaaacaaatcacaccaagatcaacacagccataataaggagctcaacaactccgaaagtctgacacgtacctccacatcactgttctgtgtattgccagcagcaaattttgatcatagatctttccatcctcctcgattttctccggatgcgtccgctctttctcgtcatcgtcatctgtcttcttcctcttgctagtctttccagtcttacccaacttgacttgttttcctgtaagctcgtcttccacatccacgccttctccagactccacatcctttaactccattcctgtaggcttcttgtcagtcacgtcccgtttagtggcagggccagttgacgagggtcgtagatgttggggtcgtcgactcggaggaacacgtccatagaagtnnnnnnnnnngtcgagttgctttgaactcgtcggtgagctccctgttgggaaacaaatgaagaaaagagtggccagtgagcatcactcgatcgagttctcaagacatacatcgtcatgtcagcagacgacttcgaacgactgaaacacgctgcctcaccagaaatcatcaatctcgaactataccccaggtcatagagcaatcagtcagacagagcagtcttccatggttatgcaactcaacaagggactcacaggtctcgaaacaccgacctattgagagaagcaagatcacgtcatccagtcagtataccccacgtatatgacaagccataacaagcgatgacaagccatgagaacctgacggagacctactcgtagtaaaggagtcaaccatgagaacagaacccaagaaaagaagttgacatggttctgagggatctctttcccttctgcgaaccctgccggtcgaggtttgatcttgaaaccaagaaagctctgttgggcgacttcggaaatttcgcctctctcggctttgtccgaagttccctgggtcgcactcttgccaggcgacatgatcgatagaaaattgagcagacagagaagcaagcagacgtctatggatctgtttcagtgaagtcgggtctaactgacaaagctgaatcgaaagaccaccgggaatgatgagtgttggttgccacaacgaagaacaagaccgatcagatacgtagagtcgagtttggactgacatctgcggcccggtcgtaatctgatttgatcttgctgtcgtgaccgcgtggacacttcagtatgagcactagtttatcttgacctcatctaacgttgtaccgcagctatcagtctcgtgttcaacatctccatatgcgcaagctgattcatcatataatattctatgtcctcttcagtccaagctcgccagaatctctccctctatcgtccatccgccctcgggcacggtgaccacgccagctttggtcagtgtcctatcagtaccggtgggataaaagaacagcatgaagtgtatcagtcctcgaacgagctatgtgagacgttgaatgagaatcaaacatagataactgactcgagagtggtgaggatcatgcttttgtccatgccttcgagcttcgagaagtaggagaccgtctgaagccaagcctcgacatcggttctgagttgttcaagatgtatacaagcgaaacggtcgtcagtcgttgcatcatccgtctcgcacccatcgcctgcagcgctgcccggcctctcgatcgagtggtaggaaacgacagacctgggatacccaaactccttctcgaccaagtcgccactcttcttcttccggctcgtctcagagtcaaactcgttcaccttggcctccagcctgtgcaagatctctcggacttgactcttggacaccgcagaggcaagcgtcggggcagatgcagcgatggcccacgagggccatggtgttggcaccgagccgatgaagcggacctcggacaggtatggcttggtagtaaaatgctcccacatctgaccatgccggacacacacaaatatatgcaagaaagacaaaatccaaggagtggagcaagtcgagatcagtggccactactactgagcagtaagacacataagacaagtcctgcgcgaacatacaaagtaagcggtcgacccgtcgttgacggactggcggagtctctcgaaggacccgttcactggaaggggtgtttccggccagcacagtgcatcagccttaaatatgaacggaggatgtgcaaacacgcacaaacaagcagagacacttatcacatacccacaaagtccattgcttcaggtcgaccttcgtcgtccacccagccctgctggtcggccatgacttgcgccatgacctagagagacaacagttacacaccgcacatcagcacgtgtgtcgctggcgtgaagaccaagtgatagctacggtacttacttgagaaccacttccaatccgagacactccacacttctgtcccctcaggtcggctatcgagttgaactgggtgtccagtccagtgatcacagccctggaacatacggcagaaaagtacgggtaagagcatgttcaccgacaggcgtctagtccggaagcagagaagcatctaactgaccagttgagaggagagctgacgtagctgccgatcatcttgtaggccttggatccgttgacgatgcctgcgatcagactctccgtcaacgcgctacacacattcaaaccgagaggcagcatgtcacatgtcagagctgaggagatacaggcggatggttccatacagatagactgacattgaaatatcgatctcgttggctgtgagtcgagagatcatttctccagttccggctggacacttgaccagggtgaacgtctgaccgccatcttccttagctagctcaagcagaggggtactgcaatggacatggcagggcgatgaaggggagaaaagaaggacaaatcagatgctgacggaggagacgttcgaacagtttgaataagacgagcaaagatcgcttttacctaaaatgctctgggacatatccgattcggagagaagtcatgttggttatgtgatgaagatgagagaagaaatgatgaacagacgacaaaacagaataagctgattgagcattaaccctaacctttgtgatgatcagatatgtcaaacaaaaaaagtggagattgtaag

SEQ ID NO: 1388 - DNA, 1310 bp, Xanthophyllomyces dendrorhous
tctgccaactgagctaaatccccttgtattgaaaatgagagtgatgcttccatataatgaactcagcagcgttagatgttttgaagaatattactgaaataaaagggtgaaaatggctttttcgttctggcacttgttcccaatcaagtttcactggtttcccaaaccatatacacaccacccaggtgtttcagtaaaatggattgagaaaccaggataacagaagggaaacccgctagaaaatttatagctcttcggagagagaggcttgggactccgcgcaaacggaagtcggaaggtgatgcctcaagaagaaataacaaattgcaaccgaaataatgtcaagactgctgaaatttcaacaccaatcaagttctcaccggtctcccaaagccatatgtatactgcaagaagcatggtgagagttacctcagccgatggtgatcgatacatggtccttttggacttgggtgtccttagaccataaaccaccaagatccccatgggttatgggttcaatttgtgcctgcctcagcctcagcgatcagcgtaacagcagtggtgtcaagcaccagcattcttgctccttcgttcttttcctggtgaagggcaaggtgcatcatgttgcgtgatgtgtttaaatcactgtttcaccaagtctgagagcatgtatagcgcacagtgagcaatcgacacatgatcttgaggcacacaacacacatcacttactcggcagacgctgcgacactccttgatcgcccacactttgctcctttcagagaactcgccatggcacttcgagcacaccctcgatgtccgaaactcccagattttgcggacctaaagcaactgaaaggccctcagcttgggatgcatcatcttcgcaggaccaggagcatgcccacgagaagacgacgagaaggctccgtcgccgaaggccaggaaggtgcgtggacgtcctgccgacagacggagcgccaccttgtggtacgcttgatcgcggctgatgtgtgcgccccagcgaagacatctccaccgtcgagcagcgaagaatgtcgcgagccaggagtaggactgagagtgtatgacgagagcagcacgaagaccatcgagactgtcagatatgaacgaaggaagatctggagaaagacaccgaggtggtcaaggcagttgcaaggtcagtaatgctatctatacagttagctcaaacgtgagcgtggacgtaagcggtactcatcacggagagtggtttacactttcggatggttcttcatccacagccgctgtttccgagcgtctcggtccatccc

SEQ ID NO: 1389 - DNA, 431 bp, Xanthophyllomyces dendrorhous
gctcggccagaccgccgttgtccagagacatgtcgagccctcctgcggtcgtcatgagtaacgtccggcggcctgagtcgaaacctacgacctcgtcctctggccgcacacccacggaacatactctgctcggtgacgatccttgcctctgccctcccatctccatccgtagtcgtcgatgccagatggaggcgacgtcggtttcagcattctggcagacacaccgatgccgaccgtactaggcgaccgggcgaaccaccgccatctggtctcgactttggatacataaaacgaccgcctccaccaagtgtctgagtcagcccgaaagaacttctgcgttaccccgcgcacatgtcccatttttgcatcttccaatctgagctgacatcaaaggttgtaaagaatcatggcatctacaaagacgtaggacg

SEQ ID NO: 1390 - DNA, 611 bp, Xanthophyllomyces dendrorhous
tctacaaagacgtaggacgaccggtgagatgagaggggcaggagtgacgatgaattaaactaaaggttaaacaagttaattcgggctcggcgaaattcagtcgtctaattaacctttatcagtcggtcagtcatcgatatcggtcccgtcggtaacgaccttggcgttgatctttgcctgaccgaacgatagcgttgctgactgagcaccatctttgcttactgatacctcatcgatttcgataactatctgctgtctactctttgttctttctgctgagtgagcatgtcggattgttaaagattgctcatcagcgacagtctataagaatgaggagggtagctttaagaaacggctccatttgattctcactctcatccgctcacacacacacacatctctatcactgaacctctcttgaaaatcccatagcactacttttcattctatacactaatctggatacgtctttcgttatgtcgtctcctgacagttcgactcgtcaccccaccgctgaatcagaagcggcgcaggtggtaacatcacctgctccctccctgagtaataccgtgattggtctcaatggagctcctgagaaacatgacaaaaca

SEQ ID NO: 1391 - DNA, 730 bp, Xanthophyllomyces dendrorhous
agcccttttccccgcatgtgccccagatcggtaggtgccgccctgagctagttcaaaaggttgtagagaaccccggtgtccagaaaagcggaggacgatcggttgaaccaggccggcaggggcaagaataagatcaaaccaagatgagcaggagttgatccgggcttggcgagattcagatgtctggtaaagttatattagtcgatcagtcactgaattcgatcttgtcagcaacgactatagtgctgacctcgacctgaccgaatactgttgctgctgactgagcaccatcattgcttactggtgccgcgatgcttactgataacacatcgattttgattatcgatcactatctgctatctactcttatttcttattctgctgagtgagcatgtcgggctgttcaagactgctcatcatcgacggtctataagaacgaggagggtagcttctaaaacggctccatttgaatctcactctcatctgcatacacacatctctatcactaaacctctcttcgacaaacccctagcactacttgcatttcatatactcactagacacatccttccttatgtcgtctcctgatagttcgactcgtctctctcccactgaatcagtaccgacgcaggtgataccatcgcccgttccttcattaagtgacaccgtgattggtctcaatggagctcccgagaaacatgacaaaacatcacttccagtggaggagccc

SEQ ID NO: 1392 - DNA, 1489 bp, Xanthophyllomyces dendrorhous
tgaaccagcagaaggttgaagccgaaaggccaatgaagctctctcagagaaagaaatggtcgttactggctgtgttttcgctaggcttctttgtggacgtgtggtcatacagtgctttcttcatcttcaccggtccgatatcggtgtcgctcgatattctattcgaacaacagacctgggtgatcaccagttatgccgtcaccttcgcggctttcctgctcttgtggggacgggtgtctgatctttggtctgcaaagccagtgttctcgtatgggtaggtctggctttctcgtctctcttccggatgtagataacccatcaatctcagagactgactgtatcacgcgcgttccatctttcatcctcctagattcatcgttctgggcatcctcgacctcatcatctccttcctacccgacaagtactctttctttgtccttcgagctatctctggtatcgccggcgcgactctgatcccggcgtcgttccggctgatcgtcgctgttttcgaaccgcacgagctcggcaaggcttttactctttacggaatgtctggtgctctagccaacacgactggtatcatcatcgccggctttgtggagtacatcccgaacggtggccagggtgaggcgtggaggtggttcttccgtatactcgccattctgatcatgcccttcgccatcgggtcgctctactttatccctaccccgaagggtgcgatcgcccaagcggatgacaagtggaagcggctcgacattgtcggtactttcagcatgctcgccggcatcgtcctcctcatcctcggtctcacccttggggcgtcgtacggatggaagaaggccggcttcctcgcgccgttcctgattgcctgggtgttgatcgtgtttttcttcttctgggaggccagactatcggatgagtgcgcgatcttgccgtccaagacgtggaggatcccgaactttgccgtgcttatcactctgggtctgttcatctacggctggtggtccgtcaactttctgccctttgtcgagatctttgtccgggttcacaacgagagagcgatcatcgcggccgtccggatgttgccacaagggatcgcggctggggtggtgaccgtggtgctgacgctgtatccgaagcttacgtcgaacccgagatggccgatctcggtcggtctgatcggcggagctatcggtctcatcctgttcacccagtccgagggagacgtcgtcggctctggctactggcgatgggtgttcaccggcggtgccatcggaagttcgggcgtgatgatcgcattcacgggtacgaatgtcggggtcatgacatccgttcctcccgagatggcgggtgtggccggtgcggtgctgcaggtgtcgctccaggtcggctcggctgtcgcgctctccatccagagcggtctgttgacgatcaacccggggaacttggagaacttttcgaacgtcaaggcttcctggtactttgagct

SEQ ID NO: 1393 - DNA, 808 bp, Xanthophyllomyces dendrorhous; identical to SEQ ID NO: 135

SEQ ID NO: 1394 - DNA, 5425 bp, Xanthophyllomyces dendrorhous
agactgctatatccaatatagagtaccattgaaatcctcaatgtcaatgtgtttcaaagtggaagattgatcgttcaacttgcgtttgtgccaaaaatcggtcatactctggataaataaactttatacaaactcataagaatggacattttaaaaagatcgtatagtatagtggttagtacttccgcttgtggtgcatcagccgaaacgcaatatcgcggacgacgggtgttcaattcaccctacggtcaattttttctaactcagtcaatttctttttgtcaagattttaatggaaaacgtgataaaatgagatagtacaaactatcagagtatttgggacatcgtttgaaccctcaaaacaaactttagacttggaacaatgtaaactcttgatgatgtatgtgaaacgtgatgtaaaaacattgtaaaataaaaagctgatgaagacgagattcgaactcgcgccacgaatgactgcgaaacaaggctgaaaacctgaacacagcgccttagaccactcggccacttcaccttttcttatattcctgaaagcgttgtttcttatatcaaggacttataccacaagcgccaattttttaaaatttattttatctcgagttcaaccatcatcattctgggttaacaacctccaaagatcaaaagtggcggtctaaagaatagcgtaacacggcagaaaagaaggcagtgtgtattacttcaagggccgcgaatcaacatgaattatcactgcattcaaccttatggctcttctccccggttgtcctttgcctttgaccaagggctcggacgacaagcatttcaaatttagccaggttgttcccttcagcgttcatctcaatatccaagccttggagtgttaaaatctcaccccttcgagacagatcagattcattctgtaagctcgttgttcaggtttgaacgaagtcattcaaacctctagggatactgtcactgacatcggctctcgtctccttccgatcaatgatagcaacgataccgttctgcccctccacaacacctacgccggatgcgagtactcagccgacggcttttgctcattcgataccgtgttgaccgcgctcaaggctagaattgacgagatcgattacgaccacgtctgatatggaaatcagtaaaaacctttcgtcactttctcccatagaaggcgttgcgttaggtaacaataaacctggattaaccatctgtctgcactattctcctacagcactgttaaggctggtgtgaactacaacggtcttgctccatatccgtaaagatgggttgtctgttaacggagatttatatgactcattttatcatcatctgactatattcataaaactggatattgtgtatcaaactctacttttggattaatattcattgttataaacaacatctggcacaattgagccaacgagtctgaacaaagaggaatataatctagcaagtcaaatattcgaggatctgctaaattgagcctgtgtacacgggtgattcagaacgacagcaagaccgttggttgactcaactatcttgatattcatgttatgtaccttacaccagagttccggatgaagacatgagattgcttgcatgcgacctgctcagatatatcatctatgtctcttcgtatctctattccatcgcctgatggtctccctgtctgctcatgttcgtcttaggggagcgtgtcgagaactcatcgctctctctggtctctctgctctaccttagactgacaccgctgctgaggatgatgtctagactgaagctgctctatcgatggggtgactttaacccatggccggtgggatcctagtggtctgtgggctgaggtcctccaagtccaagaggggcatgtatcgaccatcatcggttaagatcactctcaccatgactaagctataccaaccaaaataatgtatttactccttatccgaaacaacttagtgatacaatcgaattgttaaccgcagccgcgacatagttcatttgattgtttttccgactcacacggataaacaaatggcaaaccctccgactccctcacatgtgtcttttaggtagcataccaacgactctacaggttgattgcagcggcggaagacgttgtttatcgagtgatacgagtagtgtgaagcagtggtatatttcaaggatcttctataaattatacgacttacgaacggagggacggactggccggctatgacgccaagagactgaccgattgatcgatcgaccgatcgaccgaccgaccgaccgactgaccgaccgactgacagatcaatctattgcttggctgacagattgcctcttcgatatagaactacatagattcttgttttcgggaacagatgaatgggttgcattcgtttacaaatagatgtacagcaaagagtccgggatgaaaggacatctttcacagggcacccgattccttttgtcttatccgtttctttgatcgatttcattgtcccttaagaaatcgtccctttctcgatgagcgtcgggagagctggctgaggatcattgctcggagccgactgatcactcagcttccgagtgtctttctagtgggctgtccggtattgatcaaaattactatttcagttgtctcggtctgttcaaactgatatcatcatccgttgagagttctccggaatgcttcccgtaggaaatttggggaagacttttgagttcagtctcggatcaacttttctccctcctcgtcctccgttttgtctttttctcacttctgccccatcgatccttgtgttccatatttctgaacgcatcagggtccactcaactataacttcatagacatgcgtccttcctcaactttgtataccctggccaccggctcgatatgtttgttcttctatgtctggggtatgttctctgaggcggatcaatctgtcggtctctcttttagggacgagctcatccagagtatccgcggccatgaccagggaacgacatggagtagtatctatgtgatcaacatggccacccgcccaggtatgtctagctgtttccttgtctgtgtccgttctcttctctattcactttgcatccggactgatcgttgacaagctattgttacctgacgcttcctgcagaccggaaagagcatatggaactgatcgctcatgctctagagctcaactttacctatatcgatgccgttctcaaagactcaccggtggtccactggatcatggaacgtatgcgggaagagcttgtcgtgaaagatctgaccagggaaggcgcctactccccaatgcagcaaagcatggcggacagactttgggatggcaagacctggtaggtccttttgtcttgcgttgcttatatttatcttctcaaatggacagatctgtctgatcggctgaacccatcgttgaatgcgcacacatcttaacaggagagagtatgtgctctcatctttcgatagcaacagcacagagtttcttctcgagggaacgaacccggacgtgcagtttgattatccgctctggccacctggtgaggcttgcgtcagtttgtggtctcaggcttctggctgctctggactgaccgatggccacctttcttgtcgacgttcatgttgatctagaggccccactggcgtgctacctttcccatctcaagacctggcacactgccctcaagaatgacgacgatgatatcctgatcctggaggacgacattgatgccgagttctcgctcgtcgaacggtggagggagatgactcgctctcttgccgaagaggctgagggctgggatatagtgtacgtcttggcgactgttgcagatgcgtccgccgcccatccgtccttgctagggtttgcttactggttcctctgtcgaacacctaatcctataggtaccttggatggatcctcggacaggaacgagtgaacaaacctaccttccaccccggcctgcgcaaatcaaaccatccgatgggaacccatgcgtactcgctctcccgccgtggtctccgccgactaaatggcctcgtccacgacttgcccaatctgttctcggcgccagttgaccacgagcttccgttcaagtatgtagcccagcactacaacatgggcactcttcagagcttttctgcaacgcccgcgatcatcattcccttttccgagttgggtacggacatcggaggatgcgcctcgaaagactggggaggcatgtaagtgaccttcagacttatacaacctcatctctactgtagacatcaatatggtctcattgcctctccttctatgatgcactcatctgacatccggtgttttctttttgcacgatagtctggccgactccactgtagagagaatagcagcgtgcaaaggccatcctctccccaagaagaacccagtagacatctggatgatgcaaagtgtggaagacatgtgatgtgtgttagtcacttattcatcccttcctctctttctctctctgtttcttctctcttcgaagggtttcgtggccggcccaaagtagccttatagttcattcttccttcgatttttctcttcttcttcaattctttcgctgcccttgttgctctttcttacaatcaagcgaactagaatattttgaatgaagccttacgtaaactgtcttatgaatcaaagcagttcatgaaaaaaataaaaataaaaatcgtttggtcgggtagactgtactgatttgaattactatcggaaatagttctgggcgttgcatttgggtgaaacgtcatgaatctcatttagttccggatcatcttttgttaagaatcacagccatgcttgccacgtggacggagagagctgagtgatcggccgtatggatgaacaccgccgagatcagctgcgcgcggctgataaagtgactgatctctatcaaaatgctctcacccttgtctcttcgaatattgatctctctccatctgtttctttgtttgatggtttcttcatctgttcgtgttcaccacaggatggttcgttaaacaacaattctgctctctgcttgctctgagacttggtcgaacagatatgccatcgcgtctcgcgacatgctctgcctggccctgcaccaggaggagaacgagggggcttggatactggtccttgacacggttgacaccgctgacgccgccgctctggctgcagatgctaatggacatggcgattgaaagaggataaaaattaatcgactggtctagccatgaaggtttttctgcgaaaggtttttacatcctctttgtcttcacggatatcttctggttgtcgtcctttcttaacttcctcatatttagggtcttagattcatagatagttcttttagcaaggtctggttgtagcgagcagaaagaagaaagaaagaggaccgacag

SEQ ID NO: 1395 - DNA, 1237 bp, Xanthophyllomyces dendrorhous
gcttcctggtactttgagctcggctggacgctgctctggctcgtcggtttctcggttctctatcgacctaggaagagacctgtgagttcggcggaggatggagccgagcagggagagagacctattatggcacactagatgtggttagagcgtaggatatgcttagtgtgattgagcggtagatagatcatcaaagtgtatacataaatacgacagagttaggtatcaagattgtattattatgtaaacgtgttttgtatcaatcttgcttttcgatgaatgtctttagttggccatatctttttcttcctcttggatcttgtcagcgaggcagcacaacgagatctcacagactctctcactctcactctcagagatatgttgggcaagtcattcggatatgcatttactaattgaacacgttgctcaaggtacatttgttgcagaggcaacacccaaatctggaaacccattccaagggacgagcgatatccaattaggttatgagcccggaatccagtcgctcagatcgtatccgacatcaggaagttggatctgacgtgaacgactcgatgccgggctcatagcctattggatatcgaatgtttccttgggagggttgagtctagctttgagcaaggacgctcaacccgatgtgttcagcagatgggatgaaagagaaagcaaggtagggttagcgaaattgactgtgtttatttttatttttaatagtgtaagattgatgaaaaagaacgtcacggccgcccctccgtttccgtgacaacaagaggagggcaaggagaaaattaacgaggtactatgcgtgattgagacaagttgttcacgcgagccagtcacgggctaacacgacttaatgtttgatagatagtatctttttttgaagcacactcaacaagatcgtatagtatagtggttagtacttccgcttgtggttcctcaatcgaaacgcaaaagtcgcggacgacgggtgttcaattcaccctacggtcaaatcttttaaatttttctttttctttttgtggaaaggcatctttcttctttctcttagacgtatatatacatgtctattagaatgatgtttgaaggggatttttttttcttccctggattgattttcattgttgttcttatcagtgtacgctcgcacgcacacgcatggtatgtttcattatagtagaatacatatatatatatatatatatgtgtgtgtgtgtgt

SEQ ID NO: 1396 - DNA, 1560 bp, Xanthophyllomyces dendrorhous
atatatgtgtgtgtgtgtgtgtgtgtatcactgtcggataaaagccaaggaaaagaaggatcattggggctctctttctgaccgtggacagagtatccagccttgtgctgtcaacccgacacgacctccgagagtgacggtgctgacgagagcgcgatcgagtctgatggatccttcgacgagggtccgtctgccggagggcgggcggtgaccttcgaggaagctgtaccgggtctttccgttcgctggtgtcaagggtgtgagggagagggcgaacgtgaggctgtaaaggacaacagagggaaaaaagagagagagagagagacagagagtagattgacgataaagtaaagtcaataaagtgagggcaggaaagaagaagaagaaagaaagaaacagacgaacgccaaggcgagggatgcgcaaccagaggatgtttcgtggtggccagtctgagtgaacgccttggctgtggtgaggacgtcccgtttcttcccgaccgagccaatcttgaggccagcccagaagacgacggtgagttttcggatgtctaccgatgtagaggctgtgtgatcgatggtaaactcgcgggcgagaccggcgatctgctcggggtcgagatcgagctggtcgagatcggtttggaatgggagttgaacgaagagataggtttggatgggcgtgtcgacggacgaggcgcttgttattgtgatggaggtcgaggtgagtgatcgaatggaggtcaagtctgcatacgggctggtgaccgtgtagggcaagaggtcggcttggacgaggatgatggggtccgacggattgaacgggcgagacacttggagacggacgggactggtatctccggtgtgctcgtgtgggacttgggtgatggttggatctgtgggacgaagggcgcctctgttgaggagtctgtttgtgggtgggtagtggtgtgaagggcggacgtgaataggagagggagagggagagagagagagagagagagagattatgtgtgagtgtgtagtgtcagatgtaagagttgaatgagcacagagagagagagagagagcaaagaaagatggctttacgaccaacaggctgctatcgacagggctggaccaggatgtcgtaccggctggtgatggaaagggatgcggttggtcaagaacggcccttgatgagagggagggtaggcaaagaacaaggcaaagaacaaggcaaagagccaaagcaacgagacgtacggtgtgtttatagaagggttggatccggaagctgcttggcgtgagggcctgtgcgaatacgatgtcatccaggttgagctctggggacggggtggaaggtacggatgagggtacgacaagacatggtgtttaggggaagggtgcacacggagggagaagagaaagtagaagagaagaaagaaaaaggaaacccctctggagagaaggaccttgtggctgtcggaccttgagagatggtgagtagctcggtgagctcgagctttgtgtccgaggtgaggatgacgactgcgacgggcgtgccggtgtatggttcgat

SEQ ID NO: 1397 - DNA, 1120 bp, Xanthophyllomyces dendrorhous
gggtgggagtgtggttgaaagggtgtaatttggtgtaggagagggtgagggcgagggcgagggcgagagcgagggtgaggctgagggtgagtatgagaatgagaatgaaggggtgagagtgtgagcgaacgggttgaggatatcgtactcgacgaaaggcactgtgggcaatggttgtctgtgtgggaagggagggagtaagagagcgtctgggtagggaaagaatggcatgggagaggagtatgtgagcagaaacaagacgaggatgatgatgatggatgtgatgtgatgtagtaagggaagggaggggaaagaatggaaagggaagggaaagaatggaaaatgaaattcgccggtgtgtttacaaccggccttgtccgtttgtgaggacgctctttgtacggtgggtcttctagagagtgtgtgtttctgtagtgagtttttgtagtgattctgtagtgattctgtattaaaccaccactctgatgttttctctgtatgtgtgtgtgcgtgtgtgttgacctgtgtgatgggttgtatgtagtgctttgtggcctgtatgtagtgtgatctgtgtgtgtgtgttctgtagtactctctgacacgctttctaacacgctttctaatacgctttctaatacgctttctaatacgctttctaatacgctttctaatacgctttctaatacactctctaatacactctctagcacagtgcctgatacactctctatcatctcttagggttatcctccctctctctctctttcttgcctctgtgttgtgtgcattctattgactgggtgtgttgtagtgtgtagtctgcatagtgcatagggcatagggcatagggcatagggcatagggcatagggcatagggcatagggcatagggcatagggcatagggcatagggcatagggcatagtatgtattacctattacctattacctattacctattgcccatcacctatcaatcactccgtactgaacacagccaactctatacagccaactctatagagtcttccgtatgcaatcgatcaaacggcctctgatctctctatgctttgttccctctgttccctctcgccccccgccttgtgtgtgtgtgtgt

SEQ ID NO: 1398 - DNA, 1115 bp, Xanthophyllomyces dendrorhous
  misc_feature (442)..(451): n is a, c, g, or t
tttctcttcttttctcttctcctctctgctctctctccctccctctccttcccccatcctacagcatcgaaacctccatccatcaaccgccgtacccgtcccgccacctgggtcccaacagcagcagcaacagcaacaacatagtcatcaacaacaacagcagcagccatcccacccacaacagcagcagcaacaacaacaacaacatccatccaccgtgcccggcccatccggagctcacgcatccaggctcggcgacatgctcgacgccgtcaaaagagagtttgaagcactcaacgccgatgccagtctctggaaaagtcaacgagacgagatgaaagcaaagagtgagagcactcatcttttttcgttttccttttgccctttcttctctgcctctctgatatctttgtttccttctttctttctttctttctttctnnnnnnnnnnttcttgggttctttccctgtttctttctttctttcttctccctccctcgctccgtcgaatctacgcgtcgctctctccttccccgtcggcccccagtcgcgctacagatccaagagaccgctttgatcagacagaatctctacgacctcgaagcccaacacgtcaaaatcagaaacgagcaagtctctctctctttctctctctctttcttcctctactctcttttcctggaaagccttactgaccgtccgacaacccttccatccatccattcattcatccacctactcacccactcacccactcacccactcacccactcacccactcacccactcacccactcacccactcacccactcacccactcacccactcacccactaccacaaacacagctacgaaaacgaaatctctcacctgcgacgagaactcgaactccgaggaccaaaggtcctgcccggaatcccccttccccatcaacaacaccaggctcccatccttccctccgtctcgtcccctcacggcagagaagaccgagggagaaacagcaccggctttatgggtgccccgccaggcttggccggcaaatccaaagattcagtcggacgtgagtttcctcttctctcttctttctgaaatcatctctctctctctctctctc

SEQ ID NO: 1399 - DNA, 3647 bp, Xanthophyllomyces dendrorhous
gctcacgcgacatttaactgacccgatcaacttctatgggactcgtctccggacgtcaagtccctggtcatcaacattcagcctccacatcatccaccaactcccaaccgcctcaacaccctcttcccagtctttccaacggttccgtcagctccaacacaccctcactccctccgatgcagatccaaaatagctcgattcccggtttgctccctcaccagcagcagcagcaacagcaacctcaatcccagccttcctccactcactcccccttgccctcgtcctcccatctggccggctcggccggtaacactggctcgatccccttgaggggtagtccgaatctgtcgagcgcatcggcaggcccggccttgaccggcccgttcgcgtccaaccctcccccaccgccgagagtcgtcccccagctacaacaacagcagcaacagcaacagcaacaccagcagatgcttcctcccccgcccaactcccaacagcaaagggacattcatgaccggcaggctcgactcggcacaagaactcccactcccggccctggtggtatccctcctccccctgtcggaggggtcgtcagagaacaacagaccgtcgtctcggatatcgatccagacgtcacctccagagacctcaaaaaggaaggctcagactgggtcgtcatctggagcccaaaagcaaaaaaagtgttggacgtcaacctcgttcacaatctcgtccacgaaaggtaagtttttctttttttttgtgtgtgtgtgtgtgtgtgtgtgtgtgtgagatccagagcgacggccctctctttctccctctatatgccaatctaaccgactcccactctatcttccaaccccccttccccctcgtgcttatcgatccacagtatcgtttgctgcgtcaagttctcaaacgatggaaaatggctcggcacaggttgcaaccgaacggtccagatctttgacacaaagaccggagccaaaagctggtaagtcgcttttgttttcatctcgctctctcgctcttcttcttttttcttcttttttttttctcttccttctttccatttgtttttcctaacctactcggtacatcctattgttcaccaataatcctctcgttcaccggaccctcccctcgtagtgtgctgcaagacgatagcacgccttataatggagacctctacatccgaacgatttgtttctccccggatggaaagcttttggccacaggtgctgaagatcgacagatcagagtttgtccactcttcttcaaaacttccacctctaaaaaatcttctttcgctcacaaacgttctctcgtattttttccctcctgcttttttcttcttcttctgctcttacagatctgggacatcaaagctcgcagaatccgacaccttctccaaggccactcgcaagagatctactcactcgagttcagcagcgacggcagacaccttgtctctggcagcggtgacaagagcgctcggatctgggatatcgagaacggcgcttgcgtgtttgatcttcgggtcgaagactttgttatcggagagtccggaccggtcgatgccggcctcaccaggtaagtcatcgatccccccccccctttttctttttgtcactcacgacccgaaagcaacaagagataccacagatgtatcgcttgattattgaccccccttttatatgattttatttctattaacacttcacttttctggctttgctcatctcatcctttctcccgaacgcttgcagtgtggctgtctcgcccgatggtcgatacgtagcagccggttcgttggacgccgtcgtacgcatctgggacacccagacgggtgttcagctcggtcgattcaccggtcattccgattcggtatacagtgtggcgtttgcccctgatggaagcgttcgtcgcctcatcttcaatcctgcttgtcttcccttgcgccaagacttgtctgactttcggcattttttttctatctctctctctctctctccccgcccgtacagttcctttgctcgggatcccttgaccgaacattacgaatctgggatctatcccccccgcctccttcaccgccttcaaactcgcggacgctcgagttcatgcccaatggagaacccggaacagggtacggcgcctgccacaacgttcttgccggacacaaggattatgttctttccgttggaggtttgttctctctcctttttttttctctcattgttctcttcctcgtcgctccccgctgtctcgctgtccctgacatcacacccaccttctctatagtttcaaatgacgggcgatggattgcctctggttcaaaggacagaagtgtgcttttctttgattccgctacgaaccagccccagctgatgctccaaggccataaaaactcgggtgagtttcccttccgtcgtcatggcaatctttcaagagacctgtaccgactcctctaaactcgtttttctcctttactctttcagtcatctcgatcgatctttccaagtcgtccggtctgttggccacagggtctggagatctgaacgcacggatatggaggtatgattccgttagggattagtatctcttctttttctttcgatatcttttctctccctcaaggtcaagtgagtgcgattggggaggatcggtccaaatcaagagcgggatgataagaatccagtttctctgctttccttctttctccttttcttttctttccttgttttccttgttttcttcaaccctcccccctttggttccatcttcttttctacaaactcgacgttgttttctcgacagagccgcccttgaccgcttccctcgtaccttgtcttttcctctccttttctgtttcctcgagttcgttgtaatcatcttccaactatggtcattggtttttgttgctttcttttcctttccccccctttttttttcctatttttatatcatctatataaatcttaatccttctttttcgccccgaccctcgacctcgacctcgaactcgaactcgaactcgaccgaccctgctcacatttttgattcccctttcttctcttctcatcttttccttcctactctatcttcctcctctttttctttcgatcaatcctcttgttcttgttcttgttcttcttattcttgtctttttttttctttcatcttttttccaggttctctctctctctctctaatctctgttccttcgccgtctttctcttgggttggcttttgcttcatgtcgccaatcaacccgggtttctctctctcttgctgacccggcggggggggggaacaaacgacacttacccaacctgtgtttcgttacatcttcccactctaaaagaaaaaaaaacacacaacctgaaaagaaagagagagggcggggatagaaatacactgcattacatcagaacacacagccgaggaccgggcacgctggacgggcaacccagatagggcgcgtcagctcggttatcgatagaccttccctgcgttcgtcttctgattagagaaaggaaaaggaaaaggaaaagggaaaagggaaaaggagacgagacgagacgagatgggcgataaagattgaggaggaaatagatcaagatgagaaaagaattaaattaatt

SEQ ID NO: 1400 - DNA, 8474 bp, Xanthophyllomyces dendrorhous
atatatatgtataatgggtggataggtgcactgtactaagagaaccgagtctccaggggccagtcgctttgagaaagaagaagcaggaagaaacattaaggaaaggaaagaagaaaaaaaaagggggagaaagaagcgtcctgggataaagaaaagagagagagagagaagtgatagggtaacgaactatatgaacaaacacgaaaagaaagagaaataatttaaaagaacatgatacacacacacacatatatatgtacataaggccagatcttcaagtgaaggaaagaacgagaaggtcatcaaacgactccccctatatcctctttccctctcatcgaggccgtactaaacagtccatcgccagagttgaatccataagtaggtagggccgctgagggtgctgttgctgtcgccgccgctaccgccgatggccggagactatcccaaaagccatcccagacctcgtgttccggtatccgaccgacgcttccgcttctcatccgcctcatcttcttcctcgggtccacccagtcgtccagcccgtcgaatccaaaacccgagccagaagatgatccggaccctatcccactaaaggcagcgagactgcctgaccgcatcaattcctgggacggctcacgtttcatcccgccgaacgggttcatccgggaataggtgttgttcagcgccatcgtcgaacccgtagtttgcttcccggtcgatccgtcgaccagagaagagatctctgttgatgagccttcacgttcgccttcgtcgcctcctggcgaggcgctcagaccgatgaatgaagcgagcttccctcggttcgaattctttcgggcgtttgtaaagttcaaccgaagcggaggcaacgatttgatagcggtggaaaacgagtccgaggaagcctgttggccctgtagggatgatggtgatcgttgctgttgttgctgttgttgaggagcactttgaaaagagttcgtcaatggaggcgtctccgttgaggttatcgtggggagcatcaacgaggaagagatcgaaggtggttcaatcaccgtggctcctcccgagatgacaggtaaactagacagtcgtaacgggtgggacgtctgattgatagcgataggaacgtggtgctgagccgaagtcaagcccaacccagtcgatgatccgcccccggcgccccctgccccctgggcgttgttgaaagatccgccggtgccatagctcggggtgagaccaccacaaccgtcctgcataaacatcttccaaatatccttgacgtcgtcgagcgaaggaatcttgatcccttgagagtttccatgggaactattgtagtgaccaggtccggatccaaagaacccaccattgtacgccgttggaggagagaccacctcggtgggcgttctccgccgaggcgcggctggttgttgtaatggattcaactggggaggacgaagcacagggtcgggagaggatgtaaagtctcttttgggaacgcgcacattggtctccacgtgaggatcctcaccttcgagagagagcgcagggaatgcagacacaaacccgtcctgaagatctttctgctttgccgtaaggacagggaaagggcaaagattgaaaagggatgtcaattcaacataaaacggagaaacagaggaaactcaaagccgactgacagtcatgttctcagccttccacccaagaagaggaacgctcgtctccttcttaccagcccaatgacctgtcagtgactgaatctctttctcgctcgaaccatattgctgaagatgaggcaaataacaggcactgggcgaactttggctaagactgccatcgttgtcattatgcgcacggtagtcgctcgacaatgctccaaacaggctataatcctgataaatcgcggaggatttatccgctcccgtaggaggaagcacgttggacttgcgggaggacgaagtatcgaaagatgagccagaggaagtcgatgacattggtgacccatctgtcagagcggatggctgagaaggtaaggtagactggctaggattgtgtatttgagctgctcgccgttgctgttgctgttgctgtgatatctgctgctgcagttggtgcggtagctgaggttgcaagaaattctgacttgatagagacggatgctgctgctgtggttgttgaatggaaaccgtctgggcttctctcgcaggcgagcttgagagaggctcggcaaacggaaccagagggtaagtcgagccaagaaaggatggctcgtaggatgacgagagttgctggctgggatcaaagttgttagagtaggtatcagagagttgatagctatcgtagccaccggagccggtttcaggcaaactcaatcttcgttcgaaaaacaaagactcagtggtttgcggacgagactgggagggatatggttgttgttgatactgctgttgatactgtcgttgctgctgtaacatctgctgttgttgccgctgttgttgcggttgctgctggtgatactgctgttgatacagatgttgctgctgctgttgatacaacatcgagttgccggcgtcgctattcgaagagtcactgctagaggaaagacttgatctagataggacgttactttcggtaagatcgtcgtatggttgatggtgaagcgtttgaacaggataacagtatatggacgaggaagacaaggctgtcgaggaggtggatgagacatcgtacggctgggtcggacgaccatcaagatcagttcgagtgttgatgggctgagagtaagagtatgaggtagatgggaaaggtggagaatctgacgagttatgactcggacatggagctgattggaaaacgagacggtttgagagtgagtgctcgaagggatgaccagataagcgagagaaagaattactttcggtttccgaacgatccgcctggtcacaatcttggcatcgttcctttacggccaatgctaccttttccttctttgttagcgacttgagtttctttccctctttttcgtcctcgcctttgagttgacctaatttaggaactcgaggtttgacgggctttgtcctagtatacttcggaggcggaggttcgctgttggcgccatgtggatgaaacttgttacggtgacgggaaagaagatctctgtggaaggaagcaaatcaataagagatcagccagtggactatcaagatccatagggatatgcggtgcttggagacgatggtcaagtatgcaacatccggtcagagcctctaatcagcctttgtgattgtagagagatttaaaccttcgctcatcactacaagaagattcaggcaagactgaggtttaccaaggtcggtatccttccccgtgtctcagtcagaatgatggccgaagcttagatggtctataatgttccagagatctgatggaaaccgagggagagatgcaaaaatgaagagagaatgctggacaactcacgaccgagcgaatctttctgggcaaaagaggcacggatacggcctatcgcccgtatctggtgagagttagatatacgtcatttacaaagcacagaaaaccatcgatttataacgtcagttgatctgtgctgtctgttgtaacctcctctacggtcgtctttctcctcatcacaagtcgatatcgaaccgataaggcatacgaaaacaaagcagatgagagaaacagatacgaacgggcgcgcatatgcctagctacatgttgaggccgagtaaacgtagcgtcacaaagagggcctgttttaatttcataatttttcgggatgtcagaatttcccatccattcaccggttagcgttttagatttcaaagacaagaatgttcgtcaaccatgagaggaacgaaagcaagataagagagactagatgaaaagagtgatttgacgaaagaagaagcgagcgggaaagggatggttctgaagaacgataacatacatttgtttgtaccgcccatggttgtttagttggaaagtacgatcgagcgacagatgatgggatgtaggattgagaattaatagaagtcgtgttctggcaatgggttgagagacggagaatggtgaaagagcaatcggactggaaggatacgtggtcagcgtttgaaggaaacgggaaagaaagaaaccgtacgaaaggagaggaaaagggaagagaagactgtacgttgtgggctgagacaagaagcgagaaaaaaaaggaagacattgtctcttgagtgattgtgtatttactcttaccgttcaacttcctttttctctgcttgctctcgcttgtctttaattcttctcttttgcctttctgttctttcctgtgacaatgtttaagggtgtttctcttggatgtaattgtgtgcaatgcattttgttgcaaacagaagtcagtgcgaaacaacctgttctcttctgagatatcgctttcttcctcttcagactggatgttggaaggacgctttacgcttcagaagaacactcgtaccgtttatagagaaaggccctatagctgagatgcacgtcatgaatatattcttatgacgtcgataatcagactggcccggtccgttcggctctcgacagttcgatctgaaccggtcagggccggtttcgaatcgagttcaatcctaaccggtcacgtgttgtttccgcaacatgtgcggagggtaagttttctttctaccggcgtgttctaggccaatgtagatctgtcggtcgatctcttcttctgggccctcgtgcatccgtgcctgacgatctgttttcttatatccgttcactcagccccaggcgtacgagagcgatcgcttgaaggcccagaccggtctaggctgcgctctctatctttatgtccctccgaggacattcggtcggaaagtgagtgtgcttgttgagtaaaaacaaataacaaacaaacggcaagaacgaccgctggggactaaaagaacgaaaataacaaggtcctacttattccactctatctcggcaaagcgatagtgtaccagcaagcaagagaggagaaaggtggaaaaaaggaaaagagaacaaggggttcatctagtttcctccatcaccatcgttgcaaacctgaatgagacagggacctcgctacagtttattcgctctgttgtgagtattcttacccacgttcatccagtcaaaaggtttcttcttaaccgtccgggtgttttttttttggttgtttcctctcctcattctcctctcctcgcttcttctccgtctctatctgtttggtcaggcatctgtcgttcgtgcgttcgtttcagcacaaaggtagctggctcgtagagcccttaatttgaactcaaaacaaggggtggagaaggatctctcacgaggacataaacacaagaagcagactcacaccgcttcgacacactccttcaacacactcttttggcactcactcttttttcgacatcttctcataatgccagtcaatacttttcaatcagcgcctgccgtccttctcgtcctctttctcgcttctctcacctccaacgcattacacagctcggaccatactttagaacgacttgccctcaaggtagtcgatcccccatggaccggaacctcatatgacgatctctcctgggtttcctgtcaaaagcaaagctgtattgatgatcacgacgcactcaaacgggatactctttcttcaatatcttcatcttcgccatcagcatccctggtgtccggttcaagcgcgagcgcaacggagaattatatctcaacggctgcgagcacatcgagtacacctgctcaaacgacgtctacggcaaaagcagcacccgctgtgacattagtttcgagtttggttcctgatcctttgtatgttctccgttagagttccaaaaagatccctcttcccttttgattcattttgggcgtggctgagcctgatataccttccattgcttacacaatgccttcttcttcccgtctttctgacctctgggcttatgtatcactcaacatagccctcaaccattcgatctgtcactttctccaaatctgtcaatgtcctgccttgacagtttcgcctcattcctaacctcctctacctttcaagcctgtcggccgttctccttactctcgacctcatcagccttcaaccagctcatcagatcagatctcgattcgaccacagcggtggtcagatcgacgcttgacgaaagcatcgatggaaacgaatgcgagagttatctgaatgacgtaggaaagaatcttcggaagggctgtcagtcggatctggataaaggaaacgcgatagtgaatcaagcgttaataggttaggatactttggctctcgtttttttcttcatcttattgcactgagaattataatctgatttggatattcgctatcttacttgcaggcctaggagcctaccaaatgatgagaaatgcttcagccttgttgacctcctcgggcgcatactgctttgtagaagcactcgctagtgcagagccggatgatctgtactactggagtttatataccggttctccgtaggtttcctcctctctgtctctcttttatctcgttccataagatcgcttcaagaggtcttatctccgaaactttcgatacgaaacgcaaaacaggatcccggacgagactaagacatgctctgaatgcacaatcaagctgatgagcatatatgccggctttgcgacaaacactgatctcgccctttccatagtctacatgagcgctctcaacatgtgagttttttcgttggcttctctctctcgggagatggcggaaggtgaaatagctggtgtatattcgagtcagcgatgacttatttttttcttcttcctcccggcctaccagaacaaatgaagcgtgcggatcgagttggccgtccaacgctttggtgtctaagacggtcgagctcttctccacatctacagctaaagcaaaactcgaaagctcgatctcgctctctcttgtcatcgtctcttctttcttgggattccttgcttttctctaaatctacccatctgcctatctagcaggttgttatcttgatctccaaatttccggggatacagaactttcttcattccttttcattcaccctccccatctgtccatatatgatctcttcatcttcatatgtcgattccagcttatataccataatttgcataccctctcgtcttccttcgaatcagttccaatccctcaatcgattatgtttcttaaacccgactttcaatctggacatggttgtccttatttatatatcccttcgttgtttattatctgtatatcaatttatcatctccctccttcttctttctccttttgatttttttcctctgcttcggtacgattatctgatacccatcgaggatttctatctgaacaagtcttcttgccttcttgaaagcctttgatcggcattaaactcggaaagtcctgaacaagaaaagactcatcagatcatcgaggcggaaaatgatattaagaccagaataaaaccagacaagaaggtccgagtggaaaggagtaggaagtaacgacttagtctactaaagatacagtagattcattagggtgtacaaaagatgaggatacatagaacacaaaacctgatacataacacgcgacaccttcaaatgagggaggtgaacgagcgaatcgaaacgggccatacgcataagaaaaagtcgggagttcaaatcctgatggaaaataccaaatcaagtctcctcaatgtttaaaatactcagggcctcgtccactcccaaaccgaatggtcctgagactaggtcgcgcgtttctcaaggagtcgaccagactagccgttttcggtagttcttcggctgtcggtaggagcgtagtgttgtctacaacagaagcgggagtgggagtagcagtagcagtagcagaagaaggcagattgggattcaagagggaatggtgccgctgaacgaacgatattttcgaaggctgaagggggaggaccaggtgagtcaacgttgagggaaacgtagatatggctcgcaaggcgatgtcctatagaacatgaaactcgatacatgcatcagctctaaaagctatgaaccgcggttggttagaagcagcacaagcgtgcggagaagaacacgaacgagatcgtcttgctgccaatcaacgcaatccttcatcacaccaccttccaaaaacttgctcgtgatctctagctctgaaagtcccctcccggtgatcttatttacccaactagagagctctgttaggaaatccggagaaaacccttgaacaaagttgaattggagagatctgaggtctggtaagaggggtaagatgggtaagatctgggccgatgtcggtttaactagcaatttgcagcgcagacagagagataccaagttgggcgtccgggaaatcacataagatatgtgaggtgtcagtgtagacg

SEQ ID NO: 1401 - DNA, 7506 bp, Xanthophyllomyces dendrorhous
gacgtagtgattgtcagatgtcttgttatattccagacgaatccagaaagaaaaggcgtaatcatcaggaagacaaagaagacttagccatagattgacgagatagagacgcatggaaaggtcaaagacggaacctaccgaatgaacgcgccaactttgtccatccgcccgatcaaccaacggccttcatccatactaccgagaatgatgtttgagaacaaaatggatcgcacaacatcctggattctttttccgcccgcaagtcctaaacttctaagatcgacgtttcgttgatgagcagtcgcgaaggatgttggaggtagatactgtaggtcttggatgaattaagacgtgagaaagcgggtagagataagaagaaggaggaatttcagacagacgtaccaagagatcaacaatctgaaggattaattctgtgggtagagacagcagtccaacgaagttctgtttcgaagatggagctgactctgacgggaacctactatcccaagcgaggttaaaggtcagaattcggttggcggatgaggcggtcgaagtagaagcgggaaaggagtttgagaatcctgtggacagccggggtgtcgggaagggagacgcgtatttcgaaggggaaggaatcagcggtgatatcgctgtggatatcatgtggagactactgagtagaagagcgcaaagcaaggtagcggcaaccgagtgagtgaatgggtgggtgaatgaggtgctgatggttcgaaggagaacagaaggaaagaagaactcggtcaagcccggagaagtggttacgtcagtcggtcagctcattacgtttccttcctagtcttcccctatcggttcgtacaagtgctctgtatcttctccagtagctttcgcctgcgctatcgcgctattttgtcctttctgttagtggttctgttgtatttctgttcttttgttctggttggccttgttcaaagacggagtcaagactggctgctctgtatggttgatggttgttgtcgtaggtgacgaaatgagtggttgaacctgaagctgataaataacctcctgctcgtcttcagagaatcttttactttaactcttcagtcgtttctgtttctttccatcagatccttgaacatcttctctcttcttctttatatgtatctctcttgccttcataaagcttctttaagagggtacaaatgagcatcaagtatcgctgtaaacctggcgatgtaaccagcgtaacctcgaacggcttaattttcggtttcttatttttctcctctccttctttgtctctctttctctccttcttatcctcccttctctctcctctccatctctctttcttctgaatcaaatacagcgactagaagaagtctgttctgtgattctagatattttgtagaatctcaccaccctttcccctctttctttacctccttggccggtcttatcacccgaccaggtaagctttaatttccatcccgtcctgggcctatatctgctttttcgtttcctcttcttccctctcttctctggcccctacctctctatagcctcctctcagacaaagagagcacccatacatacaaacagcaggaaatctcgctcctcagatcacaaagggacagcgcgggtgggttaaatcagtgtcaacatttcgcataacgcaatgtttacgacgagatccactaaggtttatttctcctatcgcctcgctcaactcttcgcatacgacatcccggcattcgactcgttctcgtaggaagtttggattcaacagactgctgaaagatcactgatactgttcatttccatattttcttctatttccactcggatgtgtgttcaacagatatcagatcataaacaccgacaaggataacaacgccgcttacgctgaaaaattctccacgcaacactctaaatacaatatacatccaatatggccgacagaatgaatgaggtagatctggatttgatcattgaaaagctggtggaaggtttgtctcgtcggttttcaggattaaagggattcttcctcatatctgactttggcatcacgtaacttggacctatgtctgcttctccgcatgtcctttcgtccttcgaccgttgaatctttctcacctcatagtcagaggtcaccgacctggcaaaccggtccagctggcagagcatgaaattaggtttctctgcacaagaagtcaacaaatcttcatggagcagcccatcctccttgagctgtatgtgcttccctgaaccgtcttctctgctgatcaatgtatcaccgtcactgatcgcagcaccgtcattgtccctgacttatcagagaggcgcctataaaaatttgcggagatatccatggacagtattacgatcttcttcgtctgttcgaatatggaggtttcgtgagtgatcgtcctagtctttcttccttcttgtccgataagaatgtcatgttcactcatctttcctgtcaccgactgccaattgcttctctgcatacattccaaatttgaacagcccccagaatcaaactacctcttccttggtgattacgtggatcgaggaaagcagtctctcgagacgatctgtctccttctggcgtataagataaagtatcccgaaaacttttttatactcagagggaaccacgagtgcgccagtatcaaccgaatctacggtttctacgacgaatgtaagtcccagttcattctctcgtacatctcgtacaacgtcaaagtttagctagtccttggctggtaaattcagctagaaatgatggcaataggctcagtgtgtggagagcagaagcaatgggcgtgttcggggtgttctcatcgcgttgagttgaggtttcggtcaggggaacgtaccatgtcgtcatgtgggaatgaacgtattgagggatgaacgcacagccccgatatagacaccaacagagcttaataaacaagagtactaaccttttgtgtttgactattctttcacaaattaggtaaacgacggtataacatcaagctttggaagacatttactgattgcttcaactgtgtatgccatccgaattatttttttgaattttttaatcgacttttgccaattctagtaatgttgactcgggcttctatgtatgccccctcggacagctcccagttgcggccatcattgatgagaagattttctgcatgcacggtggactgtcgcctgatttacagagcatggatcagatcagacgagtcatgcgacccacagacgtgccggaaacaggtcagaactatcatcatttttccatcgcctcttgtgtgcgatataatgtcggacgaagtgatagatcgagggactaaaatggtcgagaataattttttaatgattgttaccacaggtttgctttgcgatttgctatggtcggaccctgacaaggaggtccagggatggagcgagaatgaccgaggtgtttcattcacgttcggaccagacgtcgtcaagcggtttttggagagacacgatatggttcgtctctcagttttggcttaatttgcctttatgaagtggcggcgtgctcattagtatgctcttttgcgctttgtttgatggaacggggctccatatatatacagcatctaatttgcagaggccatcaggtcgtcgaggatggattcgagttcttcgcaaaaagacaacttgttaccttgttctcagcacctaactagttcgtcccttctcgttttttcggctcctctatctgcctttgctctacatattgaatttgtcttgtaaaatcatcttcttcagttgtggagagtttgataatgccggagctatgatgtcggttgacgaaacgctcctgtgttcgttccaggtgttgaagccagctgaaaagaagaagtgtgcgtcagattcgatcccttactgtgcttctagtcattctgtcttttctagtaattcattcttactatttgttctttcgttcgttgccactcgacatgattcaattcatcttttcagtcggcgtgggaagcagttagtatctaaatatatctttcaacccgtcaaatgagacacgtgatgatctaatccttgactcatgttgcttcttctagttggcaggagtaacccttcaccaccgcggtctaagaaagcgcccggaaagaagtgaaaacagaagaacgatataaatcgctttgggcaggtttttaatgcatgttcctactctcactttcctttttctgcaaccttttacaaaacatcaaccttgctattcatcctctataaccctctctctccccaccctgatataaaaaaagaatgtctcgtccttgtgtacgaaatatgtctgcgtgcgtgtgtgtgtttcgcaatcgtccaagaggttggttggattgtttactgggggctttttcttccttcaatttctctttcatcgcggaccgatgagacttacattctaggctttatcccagtgcttctgttgagttctcttttttcgatagtcaattattcctcttacctgtcctcaccttcgtacacacctctgaggtaaacctctcttctttactttatactatgtacttcatatttctcgatcttcgattctaacaaaccggaataagttgttctcggttatttttttcctctctcactcttctctttttcgctctaatatctctcttctcccttatatccactcgttttcgtgtgccgcatgttttgtcgatgaacgcttacgtattgaaacctgagaggtaccgtgctgtctatggatagagatgagggcatacgttgagtcatgaagacataagaaagtgttttgtaaaaatgacagcaaaggatctgtaccctaatcaccgtttcctatctttcgttcaagcaaaagaccaacgacccgttttcaaagcccatctgtctagctcatcaatctccgttcccaccagcccatctttaagtctgttctccccatcttccggatcggccttagttgatgaaaggaatccgacgcctgaaccacccactcgggcaatataaggggcgaacgatgattgaacgagcgtctccataagagcttgaagggtttcagtcgagaagtctggttgaccaaaagtacaggatgcgcatcggtcagatgtgtcgcttggacggaagagaaaaggagagactttaccatcgggcaccagggttacagcgcaaccacctccaccggcgcctgtcaactttgttcgaagctcgaaaggcttatcagcaccgatccggataatctcttcgagggatgggtgggacacgccaagtgctgctaggtgtgcgtggttctcggagaccaagttctgcagaagaaggaagaaaaaagaagatgaaatggataagacacaatgtcacaaagagtcttgaaaggaacaagaactaacttgaagtcgatcgatcatgacagcacgttccatctctgaatctttcaagcatcgaatagcctcatcggcaatctgctgaatcgcttccaacaaagggacgatcacctctggctcctgaatcagtcgagcattcactcctgcaacgagagatcttgtatcccttccgatacgagaatctgtgatgaggaatcgaatggatgtgaagctatattcgaaatgtagaaagacgttcatcatgggtcaatcagactggagtatggcatatgaagcaccgtgtctgcgtacctcttgatcgcttccattccaccttcctgttttccctcaatctttcttttgaaagcaacagcgcctcctctcgtactgaccgcgttatcaatcccactcggatttccatggatgactttttcagctaagaacgcccatttgtcaattacttctgtgtcggccgtcgggattgttgattctctgccagtcgtcgttggactgaggtgagaaaagtggagaagaaagactagggcaagagaggtcgatagagcggcggatgaacccagaccagctcccatcggaagcgcagatcgagccgtcaactcgaacggctcactttaattgattgaacccccgaaggaagaaacccaacactttctccgtcagttaagagtctttataggcaaaaagaagagacagaaaaaacctaccttggcttccctttgctcaatagcaccaacaaatacaagaatgccatggttgccaccttctccctttctcctccgtttccaccttgaccagcgatcctttcgatttcggcgagcaatgtcgggcagagagattctggaatagacgcctcagtccagtcaggcgcaagtgaccaaggaagagaatcaacaggccaagactgcgtaaagttcaggtccgttagggagatggtaatgtttgtagacgataacgacgatgatgttgttgtcgtagcagtgggtgagagaagagcgtagcatcgaagatcaacggaagcagcgatcccggtctgtttttaagcgtagaacgtcgagtcacaattcgcacgtacacccacacacatagagacacgtatcagggtcagtgactgattctgaacgctgagttttgacgtgagcagaaaattagtgtcgggattggccccccaccccttgatgatttccccaaaataaacatgtccgaaagtgaattcgatttatataggaggaagaggaagagaaaaggcttagcaagatagttcttgctattacaatctaatcagacgtaaagatggccgaaagcctctgaccgaaggatgagagaaatgaataatcaaaggatgctaaaaccaaaggttgttataaggtacaactagacgctcttaagagcgaaatgtataaggaaatatagacagatgcaagaaggggaaaggggcaaaggggggcatccctacaatcaagacgggatgaagagaacaaaaaaggcgaggaaaagttaagatgcaatgagagcataaagctttcatttctcactcacaacaccatggactacagcatgttcgccgaacagaatgacctttcccggtgcactgacaagaatttcttctttttggctctcatcgcccgcaagtctggctgcatcgtctacattgagttcggcaagctgtccttcgacgccggctgtcgagttagaaggcctaacacgctcgaactgtctggctcggtcgacggcccagttggagtgaatgtccgaggcagaatcagaggcaggaggagtgagcggtcgggatgaatctgaggtagagactgatcggattgcgccagcgttcacaagagaggcctccaaatcatcaagcaaatcgtgagggtcctcaataccgacacacagtcgaatcagatgttcggggagacctcgctcggctcgaaggtgagcaggaatagatgcgtgactgaaatgcaagaacggaaagaccgacccaattagtcagccagaaattttagaaggcgcgaaaagaaggcataagaactaacctcattagacaaggcatgctgatcaaactgttcacggctccgaaactgacactgattccccaaactcgggttccgcc

SEQ ID NO: 1402 - DNA, 14617 bp, Xanthophyllomyces dendrorhous
ggcctcactcaacgcgatatctccggtctcaaagctcatgacggcacctgcaccactcgcctgagagttatgaagttcgtacccagggtcagaaggcagaccggggtagtgaacaagaaagccgagggtgtgtaagtacgaggcgatcaggtgagatgaggcctgctgcttgtccagtcggagaggaagtgttttgagtcctcggagaagaaggaacgagtcgaacggagacaatgcatttcccatagcatttgggaaccaggccattctctgttgtaggcaaacgacatagatcagactctgtcttatggcaatggctttaggcacgacattcaaagcaagcaagcacgaaccttcccaatctcctcagtacgagtagtaatcacaccagccatgagatcgtggtgtccactcaaatactttgttccagagtcgtatacaatgtctactcctagctccaacggccgctgaagatatggtgacatcatggtgttgtccaaaacgatcaaggcgtcctgaaaagatattttccggtagccgagtcagtcggaaaatttcaaagacgtgtcatacaaagaaggtatataaacgagacttacgggtgctcctgagcggacgacctcgacgatggctcggatatctgcaatcttcaacatgggatttgttggcgactcgagaaggaccatagtcaccttgttgcctttttctaagtggggctttaatgcttgcgggttggttgtatcacaatgttggacgtcgaccccgccgtcagttccaatgtagcctagcagtcggttggttccaccgtacaaatcatctccagctaggacggtatctccgggcttaaccacacgaagaatcacatcgagagcagccattccagaggagacggcatgtgccgtagcagatccggagatcttacgaaggtgatgttctattcaaaatggaaggaaaaagttttgagtggaaggagaaaagtatcgagaagtcagtatcgagtcatcattttcttgcccgcgcaagaagggctgataacgatgtggggaagaagggaacggaccaaggaaactacgggtagggtttccggaacgggtgtaatcgaactgtccgttcattcccttgaaggtggccgtctggtagatgggcacagaggacgagccatgttgatccttgaggtccaaggatgggttctctacggtcgcactggtgtaaatgagagagcaatattttgttcgggttatcgaaccgatagggcaaagacgaatagaaattgagaggtcatcgaccgagcaagccaacaaaaggaatgaacaagtgtatcacgacgtcagtacaaacggtacagacacccatcagaagacaaaggcaggtgtagaatctaatataggaatgatcaagacgaaagggaagtatagaaagggcaaggcaggaaccaagaggaacgggacgactgaccattcagtagcgaatctccaatttcggttaggcggcagagatgacacgctgtctgcaatggatgctggtggagttgcgaatgaaaagtctggtttatctgtcattgtatatatgtgtatgtgtatgtgcgtgtgtatgtggatgggtggatggagggaagatgagggaggagaaagataaaagtagatggaattcttcgagggagaaaagaagttggattttttttttccaaatttccaatggcgtctttttcgcgccaggccggctcttgctatttacgccttcgtttctagctcgtccccggtcggcttattggatatcatagatgatgagagatatagattcaggaagagcagacaacagagaactcattttatttgctgataactactgtatggcatctgagatactcggtgggaaagccgagaagtcattgaagagattttcaaaggaggttgaacgagcacatatagaaactcctagtcacgtctgtttcttcaactcgccatctcatctcgtccatcgttgataccatcagtgaaagcatactaagcccgacatccatgccaccagctcacgttctcgcatggctagaccaggcagctaagccgtacgctcagccggctccaaccacgcttgcaatcacctcctctctggacacatatgcttcgctcaagataaagactgatcagttcagtacgtgcatcatagggtttcatcttgaaagagttttgaccgatcaaacgagataatcttcatctaatatcgatccttgtctttttttgttgcccgaatagcatatgatgatggccggacactccttcttctctgtcttcatgggacgcttccaattacatattcgaaagcaaaatacaacgttcctctcaacatctggttcccgatcgagtatccctccttaccgcctatcgtgtacgtcgtgccgacgagcttcatgcttgtacgtaaaggaagaggcgtcgatcttgacggaagagtcaacgaaaatgagtgggattatctgaacggatggagaaggaagccagaggtacgatatcatccggtccagtagtaggatacaatatgatagtatgaggctgaactcttccctttgtctcgctcttacggtcttggctggcttgatgttcattgctgttcacactgaaggcacactcgatccttccgttgttgcagtctctagtggacgcattctcaatctacccacctgtatatgccaaacctaaagacccccctgcgatatctggctcaagacccaatggtatccaatctcagcctcagtctcagtacttacattcatccgcgtctacccctgaacccggcccaacgacgaccttctcttcatccacacgaaattttcctattcaggggagtgaaagaccatctgcttcacctccgccaccacctcctcttccgcctgcagcttttcctccgggaccaccgttgccacctataccctctctgaccggtcaatcatcgcccgggtctccttcccgttcgttctctactggcgcgactgaaggggtttcctatacccaccagcagcaactacagcagcaacctgcttcatatcatccccaacataactctcactcccattctcaccctcaccctcaccctcacctccaaccatactcatatgaccaacaacatcaacgacaacacagttcaggcccaaacacaaatacaagcactcatccaaacttactaccgaacgctcactatcaaccgacaccctcggctcaacagtcattctctccaccccaacatcaaccgcctcaccaagcctttcgacagtatcagtacacagactcacatccagacgcatatgctcaaaaccatacatatcatcattccttttcgccctcgttgagcgatcctagagcctcggttcagcctccctctcgcgccaatactgcgcccggaccatcccaaacgtatcatactccgcctggacccggacctgcttcgcttgctacaacctcagtctcgataccgcagtctcaagctcgaccgcagcctcagactcaatcagtccctatcaaagcccccattcccgatcttttgggaacactcgatgaccctcttccagcatcccgaactcctaccactcagcctacagatcagccggctcctcctcctccaccgcctaatccagagatcctccatctgcagactcatcttcaatcttcgctcacttccactctggacgccactctatccgcgctcgacactcaacggactcatcttcagacaatcaacgatgatctgcgagcggcaaagcctgcgattgaagatgaaatggccagattgaaggcagtgagggatgtatgcatgtctgtaggcgatcggatgagaagtttggtggctttgggcgaggacagagtcagatgggtcgccggaagagaaggaggcgtggacgaggtcatctgtggagtcgatctcgttggaaatcagtgggtcctgtacttcctttgttgcttctctatcttttatacacttaccgaattcttcttcgcttttgactatagattgatcgacctggtggccgaagacgcagcaatttcggatacgatctatcagctcaatcgagcgctcactgcggaaaagatcgatctcgaacggttcttgaagatggttcggatactcgctagggaacagttcatgaaaaggtttgctttgatttccttctcttgttctctctcttgttcttttctctcttctaactgctcgtgagagatatagatgctgatgtgctggtctctttgtgttggctgggagtagagcattgattgaaaaaattcttaaaggctgatcgatgcatggtgatacaccttgagctcctctgaccttaattaaatgtggttgtatcaatgtgctttttctctccatggacttgtttatctttgataggaaggtggagaaagtagttaagcaagcaaggtttacattagaaaatacaagctcacacatttgccctcgaagatggttacgcatcggtaaagtggatggttacatcgtttcggctcttccctcgtttagtttcttcgtcttgctccgttctccatccggctaggactctctttcttttgtactccttcctcccttctctttctttctctattcttttttcgtttccgttcgattctccttccaaaatggtctctccaacgatcaacgtacgttctgggcacctcctgcatgattcaccatcaaacatactcggtcgtctttttctggcactgacttttttcttctcctcttttttttttctccgcgggtttttcctttcccacctctccctctttggcatccatcttcacctgatttccttctctttgcttattgtctaccacttgtctcgctcttcgatctcgcaaaataggttctccgacataccgccctcttcaccggtcttttctacggaattgtccaccgacagacccttcagaagcagcacgacatcgcgcacgagcttcagaaggagcacgaccaaaagtcgcttctcgagaaggcccaggaggcttggaaggttcagcagtccggcaagggcaagaagcaggatggtgcgttctctttctaggtcttttcctcttaagaaacttctttttttcctattagatctcgtatgtgtgtgttgtgcgtgttgctgggacaacttaggaaagatgctcagtttggtgatctcgccatcacgtctcgagaggtagaaggaaagaacagggttggacgagcttagaaatcgttggcgtcgttccaatgacaaaatctggaattgggttgatctttggttaaaaatcgttacttgggtcaagatgccttcgccgtctatgcctcaagattgtccttgttgtcttctttctcatacaatatttcctacgttccggaaacccataaactgatctctgtatcttctatatcttctgatattcctcatacggggcgaatcaacattctcatatttctccttacccattctcttcgtctctcgcatgatgacgttttcactctagatggacccatccgagacccggaagatcccaagtatgttctctctcttctcaactccttatgcttatccactggctaaaaagactgaacatacttatttttcttctaacctcctacgtgtgcatatcgtatctttctcttcacaggttcgacttagaagccctcatcaactgggctgccggggagaccgccaaggcctaaacgttctattcgcactgtttcttcatctctgtcttcctctttttatctctgtttcttgtctgttgagaacctttgggaaacatggaggaagaggggctgtgaaactgggaacaaggggggcggtgaatggtgagagtacgaggtcgaagaggcagaggaggagggtcgtgtgtcttgtttttattctcaatggatcgcagatcgatgtgttccttttttttctcgtttccttttcctctttcctgagttaaggttcaaccaacctttgtctactgtgactctgccaaatcctggttccttgtctttgtccgaatccagcatcagaaacagagaaaacaccccgaagaatcgactgagagtttacgcaaagaaactgacaagctgtgggaggaaacattcttcatagacgcacaacgcggtcgaagagaaatgtagacaagcatatgatcaggaagatccaatcgtgtgttctgtgttgtctgaaagtcattggatagactaaaaatacatcaacggaggtatgcggcaaaaggaaacgtgggatgtgacagattaccaggattcaaggaatggaactatctgtaatcttggacgggtctgtaggtctgtgtagaagttgctcatttatagttggtgctctttcgatcaaatagatcgatgatgttccatacagaaatacatcatctaatcaaactttgtctggttttggtgtaagccaaaaattcagaagaaatctttcgtatgtgattgagtcaatcccagcatacgtttggtccgcgatattctcaggtagagagttgaagtcctggacgtaggtttctcgagctgacgaacgggttagaaagatgattatgtagggacaatctgcaggaagctgtacgcaaatcttttttggtagatctagtgatggtagcggtgtcgaatcagatgacgaggaggaagaggaagatggtggtgacgggttgtcggttgaatctacaatcggaggctctgatccaagactccattgaaaacccggtgaaccagactgagtaaggataagaaccggttgaagctctttcacatcagatattgaggcaatccgtgtagcgatagctggatcgattcctgttgaaactttccccccgtagatgatgatgctcctttgtctcaacagctctaacagtttgagattcttcttctggtctggtgcagagtctaaatatattgcattcaagcaatctcgaaacatcttgttcagatccttgtagtttggatgctgagctggactgttgcatttgttggcaagttcagtgagatccctcttgaagtctttgaatatccgaagggcgcgtgtattggaaagcttgtcgttgagtatagatacactctcgagagcgtctgttggagactttttgggaggtaccttctttttcttaggaagacctgtagactttgaaagatcgatatcatatttctatcaagcgatgtaccaggagttttccttgatttctgaaataaccggatatgaacgagagactaacagatatacttctcccatcaatactgatagatgctagggagtcgaggtctttcaaattcaagacaggtatattcaatttaatgctcgaggttctctttttcagccgatcttgtcctccttgaatctgcagttccgagatgataactccttccgcagacgaaggcttagtcgtagacgtcgaggtcgaaccttggttggatgaacacagagacgggtgatacgatcgttttgagatcgaagagagagtaagaatccgtgttgagcatacttgagaagagttttgaatcgtcaaacgaggtacaagccggaaagtgtattgcatgcgccgagtgaatgtctaggttgaggtcgaggtcgaggttgaggtcggaggtcagacaaacagttcttattggtctggacgtgcccgacgcgtcatatcgccatttatcttcgatgatgattcctcaatcacgcggcgtgataggcgtgtcagatccgcgtgatttggaaggatcttagcagaatgcaaagtgagaacaaacctcctgatggctatgaagaattatgaagaagagacgttttgagaaagatagggagccaagcgaactacctgaacatatgatgcatacatttatcgagagacaaatcatatatcacagcgcgacacaaacagaagtatatagagctcatgagataaaaaggattagtttgttgagatgaaaaaaagaaaagactttctacaattcaaaggctcctccccagccaaacttttgctgtggcttcccagactcgagatcttctagttctttcttgaggatatcgatctgaaaccctcggtaggcggctttgactcgttcaacgttggcttcctggataacgactttcttggcggagctagtcccggttagaagggcaacatttgtgccgaccaaaagctgcatagccaagtcaaacagtcttggtcaggacacccatacataaatagcttgttcagaggtcaaagaaagatagtccgataacaaaaggatgactcacgccaaaggttgagacgatgaacgtagaaaggaaggtggtcaagggtcccggttccgaaaattgtcgtttgtaaacttccttagacacttgaactatatattatccaagacaaaggttcatgagcttctgtctgtcttataatgtgcaggtatatcatagaaaaagacggaccatgctcgccagattccatgatgatctccacgggcttgggagcttgtctaagggttacgagcgctcggtgaatcccgactcgacctctccaggcaagggccagaccaacggcggatccaacaagacctccgacgaatacatggctgtaggtaagggaatggagggattaatttcggagataaaattgataacatgtcagagcctgtaagaaagcctagggaaagaagacacatactttctgactttgccagccgccttcttcaaggcttcccgatctgatggctcgagatctttagagtaatgtgattctgcgaggtccaaataggcctgttagatgaaggagtgagactaagggtggtaagcatagcgaagattgagcagatcagaaacatgcagagctaacttgttgcttagcattcagtcgagatcggacgtccatggctgattgatcgataactagtcagacaggcagatgaatggatgaagagatgtatgtaagaagagtctttgaattcttttagatgggttgcttatgattttcctaaagaaagaaagaaaagaaggaaggagaaaggcaaagagacacaagatggccttgtgcttttaacgcataccattgagaatctcgagcgggtgatgtcgtcagccttttcctcaccgggttgcgtcggcaagagttgagggtaaggaggatgatgacatgagcggataaccctaactgatacgtgtgatggtgattcaatgactaagcagcagttgttgcatggtctgtgttcaggaccaatgacgttgcgtggtttgttgaattcagatgctgactaagccttaaaatgcacgtgtaacctgaacccaggtctagcgaccgagtaaatccgagcaggaccgtgagtcaaccgctcctgttcctagatccgccggtccctttttcctctcattttttggtccgtttcctttacgtctctgttgaacagttctctttcctcaacaccatcgctgtgtatcctttcttccaccgttccctccattcttaacgctctgttcttcgttcttccacctcctttcctcttccacctccaaaacttcggaagccatgcttcgacgattccaaccttcgtcactcagggctctcaggcccacagtctcgtcggtctcatcaagacctgctctcgctctcaaggccaggtatgcgaccgcaccatccccatcccctcatgacaactttgcgaccagcaacaactcatattacacctcagagtgagtccataatgtttctgttgttctgcctggtcgttttatcgccctttcttcggtcattttcgatctatggtcggaagtggagtttttttttcctattcctctatattgttgagatcgcattccttgaaagtatgatggactgcgactctggttccattccatcatcgctgcctcgccagagtgctcctttcgttttgattttgtgatccgtataacgatcaacaccctccacttggagggggtttttaacgaaccagaaggaccggaaaaacccgggtctcagtgagagatccataggcattcctttcgtcactcggagcatcaccattggaccaaatcatgattcgaataccatcaaatgattctcgtctcctttgtcatacagacattctaactcatcctcgttttgctttccgtgtctgatgatagaatgtaccgagcctggaaagaggttagtctcactgttctcgcttttccatcttgaaaaaaataataacaacatttctctctctttttatcttgtactgacaaactctttaatcttcactgcccttctttaggatccctcctccgtacacaaatcatgggctgtctactttgctggcctcgacggaggccttccttccgcccaggctttcaaccctcctcctggatctggaggacctgcctcacttgataactctcaccccgctaccctcgccccaagtcttcagaacggagatgcctcgcagctttcggaccatcttaaggtccagcttcttgttcgagcttaccaggtccgaggtcaccacactgccaccctagaccccctcggcatcatggatgctgatttgagcactgtccgaccggccgagctcgaccttagctattacggctggtccgaagccgatctaaacaaagaggttcgattgtatttgatctctcgggtcgaatggatatctaatgttgacaaacctctttggcaatctgactgccactacaacagttcactcttggtcccggtattcttcctagttttgctgccgccggaaagaccaagatgactctcggagaaatcatcaaggttatgaaccgaatctactgtacgtatccatattctattttcaatacaattcttatcaactacagtgttctgataaccttttacattcttggtcacaggcaaggacattggtatccaatacgtccatattcccgacaagaagcagtgtgactggatccgatctcgagtcgagcttccccagccgtggaactacactgttgaagagaagcgaatgattcttgaccgtctgatgtggtctgactcgttcgagtccttcattgcttccaaattccccaatgagaagcgattcggtcttgagggttgtgagagtttgattcctggtatgaaagccatgatcgacaccagtgtcgaccagggcgtcaaatctgtcgtcatgggcatgcctcaccgagggcgattgaatgtgctcgccaatgtcatcaggaaacctatcgaggctattttgaacgaattgtaagccagaattctcagttctgtttactaaaacaccgaccaatgcacgccctgaaccgagctgattcggtgctcttctcttactttgccttcttgataatttccttcatctcttcagcaagggagctgctagtgacgacgactctggaggaggagatgtcaaatatcacttgggagccaactacgtccgacctacgccatccggaaagaaggtctcactgtcactcgttgccaacccttcgcatctcgaggccgaagaccccgtcgtgcttggtaagacccgagctatccagcacttcgagggtgacgacaagcacgataccgccataggtattcttcttcacggagatgccgctttcgccggtcagggtgttgtctacgagtcgatgggtatgcactcgcttcctaactacggtaccggaggaactatccacatcgtcgtgaacaaccagattggtttcaccaccgacccccgattctctaggtctactccttactgttccgatatcgccaaatcgatcgatgctcctatcttccacgtcaacggagacaacgccgaggctgttaccttcgtctgtcagctcgctgctgactggcgagcggagttcaagaaggatgtcgtggttgatatcgtctgctaccgaaagtacggtcataatgagaccgaccagccttctttcacccaaccaagaatgtacaagaagattggagagcagaagccgatccttcaaaagtacatcgaccagctcgttgaggagggtaccttcaccgccaaggaggtcgccgatcacaaggagtgggtgtggtccatgcttgagaaggctcacgagggttccaaggattacaagccttctcccaaggagtggctctcgtcctcctgggacggattcccgaccccgaaagccctcgctgaggttgtccttcccgttcgacctaccggaaaggacgaggagaccttgaagaacatcggaaaggtaatctccacgtttcccaaggacttcgttcctcacaagaacctcgcccgaatcttagctggtcgaggaaagaccgttgatgagggtaagaacatcgattggtcgaccgccgaagctctcgcttttggatcgctcgctctcgagaagatccatgtccgagtttccggtcaggatgttgagcgaggaaccttctcccagcgacacgcggttgttcatgatcaggagaacgagacccagtacatcccgttgaaccacttgggaagtgatcaggctaaattcaccgtttgcaactcgcatctttccgagttcggagttcttggtttcgagttgggttactctctcgtctcacctgattcattgaccatgtgggaggctcagttcggagatttcgctaacggttgccaggtcatcattgatcagttcatcgcttccggtgagcgaaagtgggttcagcgaaccggcatggttatgtcccttccccacggatacgacggtcagggtccggaacactcctccggtcgaatcgagcgattccttcagttgtgtgatgatcacccgaacgtcttcccggatgccaacatggtggagagacagcaccaggactgcaaccttcaggttgtctacccaactaccccctccaattatttccacgtccttcgacgacaggttcaccgagatttccgaaagcccctaatcttgttcttctcgaaaaaccttctccgacatcccaacgcgcgatcgaacctggaagacttcactggtgactcgctcttccagcgattcattcccgaggtctcgaccgagattgcccccaaggaggaagttaagcgagttatcctctgttccggacaggtttaccagaccttgctcaaggagcgagacgagcgaaagatcaacaatgtcgtactttgccgagtcgagcagatctcgcccttcccttacgatttggtgacgccttaccttgacgagttccctaacgctgatattctttggtgtcaggaggagcctctgaacgccggagcttggtcgtacgtccagcctcgattgttcaccgctttcaagaacaccgagcaccacaagcaccgaacgccgttgtacgccggtcgaaacccaagcagttcgcctgcaaccggaaagaagtcgatccatttggccgagatcaaggccttcttggatcaggcgtacgacttgtctttgactgattaagcgagactcataccagttgttacccatgtcttcacttcctcctccgtttcgtctgtctgggcccgttatgggttctttctaatcgtgtaataatattcgagcaatgtgagggaggtggagggatgaatgatgggaaagatgagctgtgtttatcctcatttcttcctttttctctcttctcggcatcattactctactttatttcttctttctcccttcctctcaatccatattgcctcaaatatcagcatggtcattgttcttcttctttatatctacgcttctcgaacgaataagtttccaaatatgtcagccgtactttccatgcaaacgtgggaagaacgattaatcgactcggttttcgttcgatgacgttatatggtcaaatgagctttgtcattgcgcaactaaccatcttataaaacctccacccgataccttttgacctttcgaccttttcttctttcatcttcatctcgtccatcttacacatcccatcaacttaccatatctttcccacaacctaataatgacatccaccgactctgccaagcctgcgttttacttgtacgtccgtcggctttctgttctccttctttgttgcaccatctttataggcttcaatttcgttctctttcgtccgctaccacatggtacctaatctcctatatctacatcatcatttacgaacagctttgagggatccgcatggtcgactgcgcctcgattggcgattgaggaactcggatacgatctcaagaaagacctcgacctccacagtcttcctctcggagaaggagcgaattttgatccatcttacttgaagctcgcaaaggagggaaccgttcctgcgctggttgacctccagggagaagtcctcgattcgacatttgtgagtctctgtcttcgatctctgttgcttatcttgctgctatgatctcttagcaagaagaagctacaagttcgaaaattctgatatcgttattgagggtttattctgcgctggggacggatacatttcttgttcgtgtttttggagggatagaaagttgttaaatacctagtggccaattcaccaaagcgaattacccttgaaccatcctcacctaatgtgatcgaagccgtgcattccgatcaaatagacccgaatgatgctctacttgggtatgcggtagacgatgagtctcgaaaggcgaaggggagtgatctgcctggtcaattctggaatggtcgacaacgttagtagttcttgcatttatttccctatcattc

SEQ ID NO: 1403 - DNA, 22659 bp, Xanthophyllomyces dendrorhous
cattctcttcgattgtcctctaacaaagtttcctgatgctaactatatatactaacttggcatgaaacagaggctttggagaaatacgccaagtcctctcctcccgagttcaaaaacttttacgaggagaagatcaagtacaactcgtactttgtcaagttagtttgtcctttctcaaaaatgcatatcaacgtgtgttttctaaccgattcggagaatcatttcctctgatcaatccctaaagaatttactctggtgaagcctcggacgaggaactcaaagagtactatgctaaagggaagaagctctggagcaacattggatccttcttgagtggtgatcttgtcaaattcctccagaacgataggaaaggaacatttttcgctgggaacactcctggcgaagttgactgttcgtcttcctcgttctctctataccttctcttaaataccatatagagcgtgtatcaggtttgataatcgaaatgtcgaattgacatgtatgtttcttcacttttcaatacagtccatgtgatcgcttggttggctcgaatcataacctctggcggaggagttgaaggtgttgagaagcttactggcaagcctctggacaagtctgtcaagggctactacgagtcctggactagccgggagagcttcaagaagctcgaaatcgtctgagcatcttcttctctcttttcgtttcctttcaacttctctactccatctgtatgtaagaacatgccatctatgctgtcttctcatttttgaaggatggttcttaggtattggatgatcatatgtaattcatctgaacgttgtcttgttacccgaggatcagaaagagcatctcccaaagattgatgcagaagaacacccccaaaagaatcagggcaagaccattaggaagggaatcaatcataacgataaaatacaggagagagagaaaagagaagcttatcaggtagagtatgaagaaacgaagagaagggtatctgcaaaaaccagacaaaaacgtgtctacgaataaatgaatcagaagaaacaaccgcaaggaaggaaaagaagaatgatgaacaacaaaggatagatcagagatatcggcagagaggaaaaagagatgtgcagatcagtcggcgttgatcttcttgatgaaccgacgttctcgctcgcctgttactttcaaaatgccttcgtgctgtttgtatccccccaaagtacaaatacacatacacacagaaaataacaagaggccggtcaacttctacaatggatggaagaaatcgagacggaggacagacaaacctccaatgtcttgacgacctccgagaactctgcgctatcaacggcgacactactttgttcctctagctttttgaccacatccgaccatctcatccctttacttccggaagattcgacgagctgggcaatagctcgtttcaagtcagtcacgactcggcgctgttgttgaccggctccggtgttgatcaaatcgactattcattaggtttacagagaggaagaatagtcaggattgaggtcgaaaagaggaaaagaaagaagacgagacatacgatcgatctgaccagtgacagggtcggtcttttgagtggattcaagtatcagttttcagatctcgagagcaaagcaccaacgggaattaggtacaaaaagagaaaaaagtactcacagcactctctctgatagcttctctgatcagccgtcctccctccttcacatcttccaactcaaccgtctctgaaaacctcattcttgcatgagcttctcccaatcggatcaaactttccaactgtctcgtcgtagcagtgattcttctctctgcacttcttggatcaattccgactttacgcatgtcgacataggcttggacgagcgcctgggaggcttcttcggtaaggaccggatggattttggatcgggcgtaagtgatatacgccgtaaggacatcgatcggctggatccgtgggggaagaggaggggattaatttagaaaagaagttatagacacacaagaaggtaagctcaagagcagaatgtctcccgtagggggaaaagaaggtgggaataacaagacatacaatgatatcggtcgagccagagtctggacaatcttcaaggtagagtccaacaaggtgcttagcaagccgtcgatccatgctctcatcaattttgtcgagcacgaggtagagcaaatcaaatctagaaatcaatgtgggtgggagatctgaagaggaatagaagaaaggaagagtaagctctaccgaggttacaaagtcgggatagataaaaagaacaagacatcacggaccaatgttcttcgtgatgggccaattgggatctgatgatcatggatcatagtggatagagtcgaaagttgaatcagccaaaacatcgttaggaacagtagacagatacgcatttggaacaagatagaagaagaaactgactatatttagatcctaccggattagcagccgctagaatggatgttctcgcattcaaagtagtgataattcctgccttagcgatcgataccgtttgttgttcctgtacgaggtccgtttatactattagttggtctatgatcccatgatgccagaaaagcgcaaggagggaagaaaggacaaaccatgacttcgtgaagaacactccgagtagcatccgacatcttatcaaactcatcgatacagcaaacacctccatcactcaacacaagcgcaccactacgttcaatagttaaacggtaaaaacacgagttgtcaaaccacgtcagctgaaattcgtgtagttaagatgatacaatgcagtttaaaacagacatacgattcgagaacaagctgtttcgaatcaggatctcgggtcacataagccgtaagaccgacagcggatgatcctttacccgaagtgtagactcctcggggagcaattttgttgacgtactgtgttgagcataagggcaagttttgtttcttagcaagttgatctaaaattgaagaacaaagtatacaaatttccgggcggaatgaaaccgaaaacgacgaacctgcaggatctgagatttggcagtaccaggatctccgaccagcaacacattgatgtctcccctatatctcggtccaccggctcctcctccgcgagcgatactcttgttcgttccaccaaacatctgaagaaggatgcccttctttacgtcatccatctcccaaatactaggggctagactcctcgccagcagatcgtaaacatcctccctctgactcaattccaacaacctgcgctccatctcctgatttgcgctcaatgcgtcgctcccatgttgcattgatctttcgtgagagcccaaaacctcttcatcgtcctcttcacctccaataccaactcctgggggtttcccctcaccttgccttgtagtaggatcgtaacccatgcgtgtggcgttcgttcgcttgacatgaacaacatcaagatatgttttgaagagtgctttgatggttcgctgccgagggtttgctcggacaggaatagatcggaagataccagtgatcatgacccgatctccaggcttggtcaagtctacaagctcatcataaacgcaaagggagaccgtgtgaggtgtttgtccgtccggcacggcatctatcgttgggtcgaagaagatgatgatgatagcgatagaacatgtcaacatggggtggagcaaggaaagcgccgaataaaggtagatacaaacctggcgtctcttgcaatcgaacaacttgcttatccgagaatgtgcacctgttgtgaatcaagctcatggttcccatggaccgacaggcatccctaggacattgactaggctcggcgatctttcctcggtcgatttctgcttgagttgtatgagaacagacaagacatctgaagaaggctgcgaagaagaaacatggtataacaggcttagcattcagaggaagtgaagtagaaagcatgtcaatatactaaccagtttgcatatcgggaatgataggcgtagctcggatgacaaggcccttgacgcagaccaatttatcggtgtctgaaggaacattccgggaatcaacgagacgcctcccttggttccaattcattgtagaagaagaacgggacaaaaacacaagaactgaccatttgggtttaaatctctcatgttgacggtcttttctgcaccaaatggtcgaaccttgtacaatgatgcgccaatggctcgaagttcctcatctcctaacgcgccctgcatgccctgcatgccttcatcctggtcctgctcagccactttcaacatacagtccttgagcacttggtccatcaacgggaccatctcctgaggatagttgcacaattgatagtagagtttcttagtcggtgggtatgccagcaagttgagggtgtctaagttcaagttgttttgtccggtctgtctcatcaatcggaggtaagcaacatatgtcaagacttctccctgtcgagagttcgagagaggaacgtaatgagcgcctggtgttcgcctatcgtattcctttcgatacttgagtttgaattctcgaaggaaagtatcgaacaaatccatcgattcctggatgacgatgttggttccccagatatacttgaccatacctcctacctggctagcctgagcatctgatgagtgagttgactgggcagagaagactggattgggatctgatgatggaggctcggaaccttggaataaagagggtcggtcgtttgaaggaagagggacctgacgacgagctaaggcagcgggagtaccggaggtcgagggaagggaagagtgaatatcacctctgtgggatcgatgaggtgtggaaccattagatctattgatataaacagcgaatagctgatcagctggctttcaaaacatgtggaaagacgataattagatgaaagcgttctgtacccagggaagaagagaggttcagatccgtcgcttcgagttgatgacatcggaacattcagccgatcgaagtttcttctgggtgtcccagctgatagagaaacaaaagcgaaatggattagtacttgacctgtacctagcaggtttcaatcatgagagcgaagtaatgcagtaaaaccacccgctggacattgcaccaatctagttgatcttctagcgctataaatcaataatcaccattgttgacgccgagcccccttaagggagaactcatcccagtgagcactctgcgggaggccggggtagctctaggtgtagtgtcttggtcaggcgcatccgaggacgggaagtgaagtggggacgaggccatgatgtaacgtgggttgtgggttgtaatgagtggtgtttggaaagaatgatcaaacaactcaagcctggacgcgtcgcatagatggttggttactatccttaaacgcgtcgaaatgtgacttatgtgaatgattcgacgcgttagtatttgaatgttgcacgcgatagatgaattattttgacaatgacgtgtctgtttgctgtcttttgctttgctgcattaaccttcatccttgcctgttgtgtgaccccgcttgccatccttttggaggaacagctactcatacactgatgaattacaaacgatcttcgatggcaccaggccatacaaatgcccctatggcctccatacctcctggaggaggaggccataatggaatcacgtaccctatcctccgaccacatgagatatctgcctgcctccaagaccttcacgttcagttgtctgaggaagaaatcacgaagcccacggcctcatccatccagaatgcttgggcgcttctacttcagacatttacaggtgtaggatttcattcatttgaaaatccgagaacggttctactcggcatggtcgcgtacggcgtacgtcggtgtcccgttttgttgcgcaatcacctcttaggatggagttcactcattttggctttgctctctcttcaactgacatcaaccgcttcgcatgttgattgttatgacaggatcttttgaccgaagccaccacgtttcatatgtttttcttgcatgtcaaacggctggccaaaattgctggggtcgagacattcaccatccaagacttgacaagaccggagccagcgagagtgagagactccctatcgggcgtgattaatttcgccaaattcaagtgggtcttctcttgtgtgttcacacatcttgttgaattcatatgctgatgatattgaactcgccggcatcgtctagacacacctcaatggatctgtttgaggagagaatgatagaaggagagcgaatagaagaacggtgcgttcattctcttccaacaacgaattgtacaacattccggatcgttaatttatatcgattatcggcgcatctcttgcgtctgtgtatatcaaactgtgggattttgttgccagccttcaaatgctgcaaaatgagcatcaaaatgtggagcatgagattcaatccgtcaagtctgttgatttattcctcttcctctttcgaaggcgccatcattcctgactttgtgttcccgtttgatctttctattgtttcttcctccttctagacaacgaaaccaggcggatgagtctcttgttgctcaagctgaacaacgtgttgaaaccatcaacgcggagcttactctactcgctagggaagagaaagcgttgaagcagagcgtatttgctgtgacagaagaacgaaagaaactcaaagaacaacatgttcgtccctttttttttctttgttaactgttccaaaaatcagtgacttgtgtctgaaaagaattttgtctacattccgtgttctcatgttttaggaaacacatcaagcagagatcacagcgctctcgaacgatatagaagctgccaacagccgactagttcgatcacctgaacgtgtccgacgaaacattcttgacctggctgagaggacgaataacgagaaacagcttctgggaaattatcttcggaagggcagagagcttgggatgaaacttgaggtgatcggttcccttgagcaagtatgttctcaaccaggtctttttcttttgtttttctatactgttttcctcaacgccagctcttactttttgatgctttctttatcctttatcttgtataggaaatccgagagctaatcgatattcagaaagaagccgaatcgacacaacgaacattccatcagactcaacacagactcaacactttgacgaatgatttgtcccgagcgatcgtgaccagcaattctcagacaactcgactagaggtaagtttttgtttctatcgttgcttattgaagatatcatggatattaatacatcgcctttttcttccttgttcatttatagcaactgcaaattcaattaacaaacgcgacagataaactcaatcgggctcgagagtcttgggccgagaagaaggacaggttcagacagagcatcggttcgcttagagaacagctcaaaattgttctccaagaaaaagatgaagatgagaaagcactggaggcaaaagagaaggagtacatgattcttaaggccgaggtccgttctcttttttgacttttagatcaaaatcttaagtacaatcttgcaaaaactaacgatcagatggattggcgaactcaacagagcgacgagtatctcgctcggaaccaagcagaggcaaacgcgttgatcaatgaatactggaaactccgggaccacgtccgtcagtctaaatccatcttctcatcctctcacactctcatactctcaattatatccactttgtctaacgtcatgtatatgtctgaactggtctgtctgaatggggtgaaatacgacaggagcgtacatggacgagatgaatactaaacttggactcggattagaccattcataaggcactctttctttactcttacttaacttgattcttcaccttctatgctgcttgtccatctgagagacacatgttcttcttctgagtttctgtctttattcgatttccttctgttctgtcatctttatttttgaacctagttttccgggccttattctttcttcctgttaattgtatctgtacactagatatcaacaaacaaatcttaccaaactaaatctcagatcttcgggtcgatttgcctgtttatcgcctgttgatgcaagcctttacctattcttgacagcaccttccttcattcataataagtttgtacgatctaattgacccagagctctgttgctttttttaaaaggaagtgttggcatcttgttctctttcctttgatctcatctcgcccacctggctaatagtcaagagcttccaagaaaggaaaaaaataattggttaaaagaacattgtaaaagaggaagaacaacaacagctaagagtgcatacaaaaaagaaacaaaaatggtgcagtagaaaagaagatatagatcgtgaaaggatagtcttgagacagattggaaatcggtgaaagatttgaggtacacagaaggaggaaatcctcttctttggaccaacacactctcctccattttcgatctatgttgatgatcttgtggacgagatcaatagaagatcagagatccttgtactgcttgataacctgcaaagaccggagctcgtccaagtcttccagccttcggtcaactcttcgaagcggaacctcgtacgtcgcaccagcgaggtcgaatccttggttctatgttagggtagaagttagtaaggcagttagaggatgcagaattcctttttccaaaaagatgaaaagcaaacacgaacagtctcccaaacagcgacgtagtagacgccaagtgggaaggcgacggcgaaaccaaggatgggcaagatgtttcgtctactgattcggaaacccttgtaaagatcctctctcatagcagaccatcgctcgaccgctgggtctttctgttgtttcaatcgatcaaaaggtatgcagatgaatagatcgaatggttggcatctcgaacaaatggcggggctccttttgaggagaagaggaaagactaaccaagacaggctctttatgaaccaaagtagaagggaaaagtatgagcaaggatgtcaatctgggaatggaactatgacacgggaggagacctacggtagccatggtcacttgctctgaacacacgagtgggaatcatgatggatgggtcaagttgaggtgagtgatgggtatgaaacgcgaactctgggcacagtcttcgagatgggggtgagatctagaggagatcaacatatttcatagtcgacgtcctaatgcggctcgaagtatttctctattgaaccccaaacccttcataatacaaatttatctctcgcaagactacgaaacgttcgccaaaagactacacagagcgatctactactcgacagtactcatctccttccttcctttccctcatctccattctacactgtcccatccttttttaatcatggtacgcatcccgctcacccgtctgtttgtctcaactattactaatcacttgtccgatataaatttttcagcttctcttctcgtgagtttattttatgcttctgaacgtgtgtctcgtcgcttgtcaacatcgttgatttattcgtcttcctcgattctatcattccctagtgtcttcaaaacattgaccgaccaaggtttgtcgtctcgttctcttccttgcgtatccccgccctgactgatccaccagatattctccaaacttgattccacagaggtcaccgtagaactcaagaacgatctctgcatctcgggtacgctcaagtcggtcgaccagttcttgaacatccggctggacaacatcaaagttctcgacaccgaaagacacccgcatatggtccgtctatctatccctttcatgcttatgtaaatgactgctctcatattgaatcaactggttgtacaaattaggctaccgtcaagaactgcttcatcagaggatctgtcgtgagatacgttcagctgcctggtcaggcaatagatacccagcttctagaagacgctactagaagaggtcagcgtttttactttgcagcttcttctaccatcacctcttctctgctattcgacgcgcagagggctgaccgagaatgttctctttcgtattttgtgcttgttttgatcatgttgcctcgatgactcgtctctctttccctccatacgatcttgaacgtgtaacatattgcagaggcccaatcatcgagcaaaccgaaataaaggtccctacttcccgacaaaaataatcaaaaacactctcttgcgacttttttcatccggtctactctagatcacgatctcgattcaaaaccagagcaggatgtacatcttcttgtcttttcctagctgtccattgtgcatatatctatcaatcattcttaacagagataacattcttgctgaacgttaaataagaacactgttcatgactctcctgtacacgtcataagtttcgccgactcccttgtttctacagtcaagatccatggattcgagtcttacgagagcggacagggtcaactcgagaaggataaaatgagtgaagagcagtgtgtgtcacgaaacgagaagtaaatggaaatgagaatgcaacgatgaagaaagatagaggacgtaaaagatgaagagggtgagggaatatatgtgtagcacaacaatataggccgagagaggcgagacaacggttctcgaagaaggttgagccaaactgggtggaaggtgacgatccaaggtatgatgacttttgtatgaagggaagggacaaagaatagagcctgataaagatgtgaatagagaaaggaagaggatgcgaagagaatgcgttacacgaggatacactttgtggtccttactgattttattgactcgattctattttcccgacaacttactcaacaaacttcccttttcccacaaactctttccctgcccaactgttcctgctccagaaggaccgacggaagtttgtgcagatgatgccaaagcggaagaactaactagtgcaagtgccggcgaacttggtctatggtgtgagccttgcccttgcctgtgagtgtgagcgtgggggttaggatatgtagaggtgggcacagttgcagagggggatggcgcgccgggtgaacctgaggtcgaccgggtagaaaagagtgctgggtttgatactgttaatgcttgggactgcaacatagaaccagatggacgatcaagcaaacaacgtaggtcagataactttgtttgatgaagattgaagagcagtcgacgtactctggcagaaaatgttcgtcgatggattgagtcgaacgctcgttcgtcgcatacgaataagtgcatatagtccgcagggtcttcaaagaatgccgccttgtcctctgaacggtgagtaaacacagatcgaggatacatcagcgtatcgctcttcaacaaattgatgtcagtgccatgaaacatttggacgaacgactcttgagacaccaaattcgaccggacggagctttcgggatcggcttggtcaaagtatagatatcaaacgcagagagtgcgcagaggtactgttcgtctttgccctgatatttatcgttggaatgcacaaactcgattgatcagtttcgctatacaaatatctacacaacgaatccatgtcgccgaaaatgtcagaggaggctgaaagtatactaactcggtcattcttgcacacccagacgacaccatctctgatctccacaaatcgttttgaccatttgttcttcttacactgccacaacttgcacgatccaatgatgttaggacgttgaccaggaatattctgtcgtacgaatattaaaaacaatatcagagctatgaacagttatatgactggttgtaaatgaatgacagaacgagcgtacattgatattcaattgaccagacataaggcatcttttgatgacgaacgcgttcagcttagtgatctcattccacgaagaggctatcgaaagaagctgttcatattctcgaataggccgctctgttggtcataagagacaggagaaaattcatcgtgtcaacaatccatgttgtgaactgatgactgagaagcatcagctaatatttaccgataccccaatcctttccgctctcccagactgcccaaccacctttgagcaactcttctccttttcgcccaacatccaggtctccactttttctcaaagagttcaacactacacctgccgtggtggtctctgtcaaatccacatcgaccgactttcctccgatttgctcaaagtggaatcgcatccgtttgatcacgatcggactgggcaaagtcctagcatgatcaggaactgtagatgggctgatgtttgtcgagattgtcggtcgacgcgatcttactctaggagacaccttatctgagaaggatccgttgacaggtgaggacatcgtaacagcatgtgggggcggggtatggacattgtacgtcgagaaattgacgctggcgccgggaagatagggcaaaggcgggacactcggtggtttcatctcgccattcatcgctcgctgaccttcgcttgagtgtagttgaggctcggagggtcttcgacggatgacgggggcaacaggttgagaaggtgatgccaagccggtatgccgattttgacggattgtccccgatcgttcagccctagacggttctttagtagattttgctcgaccaagaggatgcgtgccagccggaggatttgattgatgagccgtcgtgatactagttgcagcggcagtcgtggttgaggtggtcgagaacggatctcgagatgaagaagagtctcctctggagtagcctgtggctacaggcaacgaacgggtggcttccattggaaccggtccaaggtttaagacccccatttcgctcaatggaagcatggaagacccagagcccgcgggttgcacagctgattctgatgctaatccagaagacgagggtccgctcgcgctggactttcttgatctgaccgctgagtgagaacctcctgttaacagagactctcctgcccaagcttgcgtctgagtcgccgagagattcaatgccaacagacgcttctccaactcttctgcaatcagcacgccgtccatgccgataactccgtgagcagaggataaatccttttctacttgttctcgaattttatgccgagcatccgctacgcgacgctctcgtcgcttgcgagttggaggagaaatcactcctctacgttccttcccgttaaagttccctttgtcaagttcggcttcgtggacttctcctctacctacgttcacatcattgccaccagcagcggaagcggcagcttttttctcccgaatcctcctgtccaacttctccttcttccttctcaacctgagactcttctgagccttgagagcggtggaaggatgtgcgagcgcaagcggcacgtcgtcatcctcgtcaccttctcgatctttcgatctttcgtttgggcaagccgagggattttctaaaccctctgtagcgctttcacatccgtcatcagatgatgagtctgagtcaccctcatcttcttcgttgtcttctccatcctcctcctcttcttctggagttgcttcattctcgtcacccctcatcggtctccttcctctcctatctccatcatcctcatcgccatcatcaccaccaccaccaccacctttttgtaggccttgtccagcatccgtcgtccgatttggacctaccggtatgttatttcctatgtactcctcgtgcttgccctcagtcccaacgggctcaactcgagcacggcctcttccacgttcactctctcctccatcttgagcgaattcaaagctttcccttccggtatcatccccggtgcacgacttgaaagagttgtaggaaccaaagagagtggaatatcttgcttcttcctgtaaaggagcacccagtgtgatcgttgtatgtactgccgcagtggcgggcggtgatgcatatggcggtaagacccggtctttcgagctaggagaacctgaggatggtcggtcttcagaaggatcgatgacaggtgagggagcaggtcgaagcgtccttgaagaaggcaaagaagataatgtctgttgggtttcgatctgtgtattgtaccatgaactaaaaaattggggttctccctctttttcgagccacaggccttccatgccttccatcaatgattcctgtgaagcagcggatatatttcctgatgaaggagatgccggacgtccatagacctgtttctccccttctttctggatcgattcgttacctggagcagaagaggaagaggaacaagtagatgatgctgatgatgaagggatcacttttggaaattcgtcaattaaccaaggtgctcttggcttccggaaacctccttcgtctttctgtttgtccagattcttctttgcttcttcttcgttatttttatcacgccccataggcgaactcgttcttcttgaagcgccactatggcttctacttcgaggtgggtgatggggaaacactgcgcccttcttgttctgatttgttccctcggctggagcatgaccggcaggtatgattggcctgggaggagatggtatgaaaggcgcatccgcagcgaatgggtcaagaggtggtgggagaggagatgaacatgtaggtggggttgatcgatccttgcttaatttcggaagcttagatgacgaggaagtcgaaatatgaattgtggatgtagtgaaagatgacggggacggagagatggaaggtcgatgcgaaggattgttttgaaaaggaacagagggaagatttggtccatccgttgagaatgagaaccctcttttcagctttccaatccgcttccctgttgttgatgttgttgtcgttggaggagaaagagcatgtgacgtagctcgtacgctgggaacttttggcataggttccccgtcccaggccgatttactccgcaaatctggcgttgactttcttccccgaagtttaccagaaatcttcctcgcccaaggcgtagacgtcaacgaggtcaattgggaagtcgcgcttgggctattggtgatatttgagagaggagagggggaagtagagcgcttgatagggcctacgacgtttgaagaaatactcctggatcggggtcggtttctctctcctggagagaccgaaagcattgatcggggatcttcctccttaacgaacgacacatgcaacaggccgagtccaagaccggaggtcgaagaaggtgtgagttgctcatatgattggtttggaacgttcggagggataggagacaaacgacccggtttatttcgacggttactctgagtttcgctacccaaaaaggaggaggatgaatccccggacgaagattcgtgagacggagaatattcggattcaggctgagagagagaaggttgggaggatgacgggtgaagggtcaagctcgtgagagaatatgaattgagatcaggtgtgggaggtgaagaatgaatgtcaggagaaggtgaagaggagtttgtctacgattcgagcggagagtgcgaaggattcaaagacgaaaagagatacgtgaagagagaagtctgattcttatgagcgtacgttatcgtcaaagacaaccatagagacaaatgattactgacagataacgagaggtccaatggagggggaggatcttttctgattctgatcttcatcgggctatgttctttctgagctgctctaaaatcaccttccaatatccttggcgagagctgtcatgtgttgattaccagcttatcgtcagttcgtctctgtgcttcctcactttcaagttgcaatgtccaatcttcgaaacatcctcaagatagagggtatatttgagccaggtaggcagaaatctgttgatactgacctggtattcatgcatggaaacggtctctttgagcagccggggcttcgtcggagtagtctcagtgtcgcctcctgatatagaagaggctcggatggggcttagcattccgccatccatagggagggagaccatgaaggctcaaattgtcaccaaggtggactagatatatggcggtagctgtatgcacaatgagctatctattacggtttcttgatcaattctcagaaagagacagcgatgaaggcaagagtcaaggacaagcaggagtgcgggagagtatgaaggtgagtgagagaagatgaatgagtgtttatttacgcggtggtcacaacaacgtaattgtgataatatgattatgtaagccatatagtcctctttggtctagtaaacgtatgcttgcaagcatgtttgaggaacaagcgtgtgatgcggtgtccttgacaaacacctggggaatgcactagagaagaacaacatctctaataaggacgacgcagagaaagatatcgatacacagagatcaaccacagcacaccaaacgtcgcccatctttgtttgaattataccgccgagcgcacgcccactattcgatccactatctgctctttccatttcatccacagtgcatcatcacgatcgatattgtccaaccacggcaggaaatatgacgttagtgaggtattacagattatagatttttcgggatcaccatactcgagaccacaaatttgaaacaaagaactactcacccctcggatgtatggtaatgagaggaatgttccgatcactggtagttggcgaaggaagttgagaattacagggaagaagtctctgatcgagtacaaagtcgacacggtcagcgaaaagaaccatcaggccaaagtcagctggacccggcaagagattgttaatttcgaagaaagcccaactcacccaaacaagttaagaaatccgaatccttccacacaaaccccgatgaaaggccactagagtaaacgttgttccagtacagagaggaaaggagtttttgaagaaatgacgtcaacgcaatgtactccttgtacaagacgagacgaggaagaaagaggatgcgaaccttgagaaagactaaaataaacccgagaaagaacgcgatggttcctcttattttctgtttccttgcgaagaactggaacgtcttggttggaccaatgattaacgttagtccagagaggaagaggatctaattcaatgtcgaacgagcgaatcaagcgatcaaatgtgattgacgaatctcatcagatcaataaatcaaatcagacagtgggatgaggaataagaatgtatacgaacattgccaagcgcaagtagagcgccatcaaagaacatgatgattcccaaaagcatgaacaacatgccaaacgaggtaagaccgaccccgatttctataaaatcagcaaccatgtttcagaatgagtatgagagacattctagtcaaccaacttcttttcgacaacttagccatataaaaaaaaagaatcaacaggatgaacgaatgccatactttgcatatccgtgagccacatgatgaaagacctgatgttgtgtagatgatgggtagtgctcaagacagagtgagggagaaactcggcttgtatagtttgagttcgcgccggaaagggtgatggggaacgacgtggacatgcacgtgtatgtagcgctggcagatgctgtgccgcgcgtaaacttgttacgcgtgtcactccaggttgtaagtggttatcctttctgctgttgaaggaaagacatcaaacagatcccatctacaacccatcctatcccatcgactttaacatggtgagctggtctgtatgtttgaaccatttgatgagcactcatgttgaaggaaactctcctttgctcttttgctacttttctttacacaccctaggttatcgcaactaccaaagacaagggcgtctctcgatccaacacggtcgagacccagcacgaagagatgatccacgatgctcagatcgactattatggcaaacgacttgcgacgtgttcatccgacaagaccattagagtcttcgatctcgttgatggagaggcaaagggagagccggacattctcagagggttcgttaacctggcatcttctctctttctttctttttttccatccgctcttcttctttattcctccttccgctatcggcttctattctctgttcttcctgtggtcatcaacatcacgagagtctggtcgtaaccttattcttaggataagagggctcgagtaaggaacgtgattggctcaagaacataagggtcaagatgaagacaagctcaagagggagtcggccgagaggattattcttgcctgattccttatagttaagggcatcattttgagtgattagcttttagatcctagctcaactgctttctttcaactacatatcaattcacatcctagaagttctagtgacgtgatgtcgagaatcactggataaagtttgatccttcgacgtttcaccctatcgcatccacttgtccctcattcctctccagatatcaacatgttatcttgttctacctttcgacttttatcgcttctttcctaaatttcatccatgaacactgtcctaatcttacgtttgtcttcatcttatttatcaattcgttcaggcacaccgccccaatttggcagctctcctgggcccatccttcgtttggtcctatcctcgcctcggcctcgtacgatggcaaagtctttatttggaaagagaagggtcgagccgctctcggcgcaccgtctacgtctgcttcaaaggcctctggaaaagctgctgtcgctgctgccggaggtaagggagatcgatgggaagtcatcaaagagcacgggttgcacggcgcaagcggttcgtttactatcacttcttgttatttcttgccttcctattgctgatcaaaaataccaatcatccgacgtcagtcaactcggtggcttgggctcccttcgagcttggtcccatgttggcatgcgctagttcggatagcaaagtctctgttatcactttcaacagtaggcttctttctattctcctcttgactaaacctgcgtttacttgtcatcacttctaactcttcttgttcaacaatcagacgatgggtcatcggatgctttcatctgctctgctcaccctatgggtgcgacctctgtctcttgggcaccttctatcgttcctggaagtctaaacaagccgaatgcgacctcggttcaagctcagcaatttggacaggatcgacaaaggcgattcgtgacggggggatgtgattcgaaggtcaaaatttggggatggaggtttgttcctatcccatcttatccttgaagcgaccaatatgctccagggataaagacgcgcattgatttatgctgactgtctttcgcaaatctcaaatgtcaatacagggatgaatcaaaagaatggaccgtagaggatgtaatcgacaagcacaccgattgggttcgtgatgttgcttgggcacccaacattggactcccgactgcgtacatagcttcctgctctcaggtgattgtttgactttttaatttctttcatctggatacatcaatttgctatagattctatattagcccgaactaacgcttttttcttcgccctcgttcctggacgtgatccatccatcttttataggatcgaactgttcttattcactctcggtcgtcccccacttcgccttggcaaacgacttcgcttctgccgccgggcgaaactttccccgatgcgctctggcgggtcagctggtctctcgccggaaacgttttggctgtcagcggtggagatggaaaggtttcgctatggaaagaaaagggaggaggagaggcttgggagtgtgtgagcgagatgagcgcttgaacgcgacaggactggaatatttctgtttctataatgtgtttttttttggttctttctcttcctctttcatcttttctgacgatcttttttgaattatctcgaggctatcctccgacattctgtcgctcttcttcctcaacgctttcattgcgaaccctgtagtcatctttttgaactaatgagacagacactgcttccttccgtacagacgcaaaaacatagatttcatgtacctgtagtccatatcagatctacaaggagagaaaaccatgaataacaacctcaattcggatcgtggctgaatgaaagacattgtaccacggctgaacacgggggaagagaatcacgtgacaggtagtgttctcgcaactcactatctcggtcgaccaatcgactttcttgacctctcacaccctcctttcgtctctatatatatcatcagagagctccagatccctgattcatcaagcttatttagaaaaacctaagatgcgtccgacaattccttgtaggctcaacatcctcgttcctgtgaagcgagcgattgattacactgtgtacgcctttttctctctttgattcatttctctacttgatctcggacaatgattttttttgtctcaaatgttcatcatcatctgtcttgaatctcctttctttatttttgctttcttttattgcggtgtttagtaaagtacgaattgcggctggaggacagggggttgatcagtcggctaagcactccatggttcgtttttcaaagacctacttccctccctgtcaacatatataccacgggcgagatttctcctttctactggagagcacgttctctgagatgatgcgagacgaaaatcttatgtgatagggatcgatccaacgaggagctctcttggtactaacctattctgctctgttctttgttctctgctgaatcgtcatagaaccctttcgacgagatcggtgagattttttcttgctcgagcacaatacattgttgtactgttggtgccaatacccaatattcagtatgttgatacatgttttgcgttttctcagccgtcgaggagtcgttgcgccttcgagcaaagcatgcaaagtctactacgggttccaaggttgacaagatcactgtggtgaccatcggaccgacgaaaagtgtggaaacccttcgaacggctttggctatgggtgctgtaagttgacatcccttccatcagggtcttcatcatttctgttgtctgcttcctcagtaagcccagcctaagtcacaatactcatcgaggctcaaacatgggatcgaacaggatgatgctatccacatcaagactgagcagaccgactcaccagagccattggctgttgtaagctccatttctttattttgcaaggcttacttcttcccctccgcattcatagatggctcaatcttgtgcatttctttacccttgacctcaggccaagctactagcgagcctagtaaagtcacctcctgcggctgtagcttcccctgcgtcttacgaccttcttctcctcggaaagcaggcaatcgattccgatgcgtctcagactggatccattctcgctggtctcctcggatggggtcaggcgactttcgctagtactgtagaggtcggagaggacggaaagactgcaactgtcaccagggagattgatggtggtttggagaccgtccaaggagatttgcctatggtcgtcaccactgatttgcggtaagttggcatgttgggcccgggtgctaccaaattgaaacaacggccttcgactgatcattttgaacggcccctcatggtgattctacctattgctgctctcgtgaacgcacagattgaatggttggtgtgcatcttcttggctgtctaactagtatatatccgtcgagcgcctacttaattcaattttcttgtttctccgcattcggattttgtcagagcctcgatatgctaccctgcccaacagtacatatcatccttctttttattttcccttcaatcttatttttggcttaaatcgctaatcgcttgcttctcttgtcttgacttccatccaatttgaacagttatgaaagctaaaaagaagcctctcgttacgctctccccttctgatttcccagatgtcgatatcaagcctcgagttcaggtcgtcaacttgtcggagccggcagagaggaagggcggaggaaaggtagagagcgtggaggagcttgttaaaaagctgcaagaggctggtctggtttaaaaccaccttctccctctatcgttcccttatcagggttcttcttcttcttgctagtcgctttcctgtgtccttgattgaatgaatctatttttgaacaaaatgtcacctgcacaatgggtttaacatcaacagagagggaacaacatgatcaagcatattttatgttacttcttcaggatatgtctgacagcaactgtttctctttgctaccaagaacaaaacgacaactttgagtgtctaactctttcagaaaacgaatcgattttaatcgaccttctcaatgtccttctcgtcgtcaacgagcgtggggatgttaccctctccctcctcctcctcagcttcgtcatcagagtcaccaccggctccgaagtcgggcataccgcctggtccgccggctcctcctcccatttgagccatcaacttggcaaagtcctgcgatcggagaaacgtcagacaagggaagatatacgtcagctcgttcaagtgatttgatataaatggaggcgacaagagtcaagatcaaagagatagag

SEQ ID NO: 1404 - DNA, 2675 bp, Xanthophyllomyces dendrorhous
tgagccatcagagcctccatgtccaatccaccggcacctcccataccaggcattcctccgggcattccgccggggggaccttgctgtccacccataccggagaactctgactcatcaggcggggggacctcgttctgttcgtcctcgtcaacccacttggagaagtcagtcttgagccactgaaccttaagtcggtctttcgtcagtcgaggccagaactcggccttagattcagctttgcggagaataagttggaggtatcgagacgagagagacttcttagtaagtgccgggtcgatgggagcgaacaagggaagggaaaacgcgtaggtgttttcagggattcccttgtcggcgctgttgagacaagaagtgggtgagcatggaacgtgatgaaaatgagatgataaaaagatgacatacgctccagctcgagccttgaaagagatgttgtcggcagtgatgtcaagctcaggctcgccgatgatgttaggaaggttaacagtcaagctgggatcggagaagatgtttctgatatcagctatctgcttctcttttatccttactaccttgagtgtccgtcacgttgcctatgcattgacagaaaaaaaaggcggggaacatacaaaatgatgttctgttcgacacgaagataaaagatgaataatagatgagtacgtggaccagttcctcatgacgctgatggaagacacagaacgatgaacttcggactggagaaagacggcgatctcaaacgaaccttgtcctcctcagtctcactggagcgttgggcccagagaatttcagcgttatgagtggccatgatgtagatgtttgggatgataaatatgtcgaggcaaaaggaaggtgaacgtcgaaaggcaaaagaaaagaattggaagagaacgaaaaagaagagcgagatgatctctcttctagaaccatctgttacgctcgttacacccatggttacgcaactacaagtcgatttcaggcccgaaaagctctctataagattcgagaaaagaggtgtagaacaaagaagatcccagtggatcagagaaggcgatcacagatatgtgtgtgtgtgtgattggtataaatttgagccgagatccgccaactgcctcgttaaacacgcaacagcgactgaaaagggaaaaagattcaaataaaatgggaaaggagaagaagtatgtacatggtgcctcatatcagaaccacagatgataactcttgtgcaatagtaccatccatagtttggtcttttgagttgctcagatctagggaagagcgcgaaacgggaaagatgaagctcttgtaccgtctcttgtgagaagtagcttgtctaagattacccgatgatttcatgggcgaaccaagggtgactaaccaacaacatctcattgtgatccgcctggacttgtgtctttctcaaccggtcgcccgtccctatgtactcaccatcttcacagcctcagcctcagccccaattgcagatggatccttgtcgatactctcctcctcattcgctcacaaagtatcaagtggaagcatccaacttacaacatcttccgtctcaaggcgcaagcagcagtctgagctccgagaatgggcctcgcatatcgttcactcatcatcaagctttaagtaggcaagcagaagagcatgatttgattaaagacgctgagagcagacatgacctagagtatgatgaagacactccacttgttgactgggacaaggtactctcgtggaagtcgtggatgaagatgaagtatattcgtgagtctttgaagcacagtccacatcaagagtctgtgcctagggtgaacagtttggttgagaaagagaatttaactgtgccctcgaccgacaacacggctctaacaacatgtcttttttatcgatcgtaaattccttacctcatcttctttcctcttcgggtaacagcgtggtatatcgctttcatcataatatcggtagcaggtaagcctccctctcggcagatcgtgagcctttgtttctgtttgtatgctgacccagaggtttatactgtccccttagtcgtcttgatgacgctgtaccatgaagaaattctggaatggttgaaacctgcggccacatggatgaaagagtatgtatctttcttacgaaatatcatgtgcatctcgtaggtgcgcaaacctattctgatgaacgacctgtttggtcgagcctctttcatcagtttacctggtggttggacaattccgatgttagcacacttgcgtcaattctttctttgcttctaaaaattgaacaccttattgacttattcccgtttgatgacacagaggaattttgttcgtaatctcgtttccacccctagggggacacgagatcatcattcttctctgtggtttcgtttggggcctctgggtaggttttggaattgtctctgcggggacattcttgggggaagtaggaaacttttacgctttcaggtctgtcttattcatcaagctttgcttactttattggaagaaacattgacctcataggtttcctatgcattgacagatactgctttcaatcacgcgctcgaaagattgagaagaaggacttgacgtacgcctgcctatctcatgtcattcgagagggtggttttttggtgagtctatacagatgttata

SEQ ID NO: 1405 - DNA, 2189 bp, Xanthophyllomyces dendrorhous
agtctatacagatgttatagaatgagacttgaatagaactgattgcgcttcagaatttttcttcattagatcgcgctcgttgttcgattctcggcgatcccaggccattttaccactattgtcttttccacttgtggaatgaacatctggatttttgtgagaccctttcaattgtttccttttcatcaatgatccgatttggacaagattgagtattcactctcctggtttctttcctttgaattagtcattggcggccgctttgtcactaccgaaacagctcattatcgtatacctaggagtgatcctggcacaatccggcgaaaagacatcaaagagcaaatggatatctcgaatcgtcctagtgatctcgttgtaagttctgtcgagtgtgttctcaattaagaagtctgcaccaatgtaatttctcattcttttctgttctcttgaatttgaatgggggtacaatcagtttggtgacaatactagctgcttggtggatctggcgaaagatgaaacttgcccgaccggccgtgattcgtgaatggaaagagtcagtctcttctaccatgtgccctcttttgtcttcttattcggcacgactattgatcacctttctactttcttgttcaccttccacttatattgaacttttgtttccatgccgttctgcagaaaagaaagaatgaaccttgtttccatacaaccggaggcccaccctgctttcgggtcaagcgtagactctgtagacgtcatgttgagtgttgccgaggagcaggagcaggaccgatatgctagatacgcgcaagccaacagagctcaagaagcagaatctcgtatccagccgggttacaatatagttcgtgtttcggaaggagaagggcaaacagagaggcttggtaaatctgatcttggttttaattttgattacttcacattgtatttgatcaggaatatatatacccaggcgaactgggcaaggctactcaaaagccagtgccaaacaagaacctatactcaaccggtccacatgacctacctgtgaatgcttctcgcgtggaatcaaacgttccatatagcgttggatattccgatccgtttcaaacaggtgtggggcgagataataggatataagggtttaatctggctaagccagagatgcttcttccaagagtataacgagcgcatactccctcctttcgattcttgatatcatcctcttctttctatctatcttggggtcgtctgttgtataatcatattctgtttctatcaaaaccatggacatccgtttcattttttcttctcctcttctctttatttatttttatttttgttctgtgttcgacttgagcaagggaaaagagatgactcgtcgacattgtatagagaggaagcctacctccttcatgttcctactctcgcactcttccttttttactctatcttccacatcctagttcacgcgtgaagcaggctttggcaaatctggcagatccgatccgggaatgaactttggatcaagcatgtgtaaccgttgctcaagtgcttccaatctttgaactttgatttggtggaattcttcaagtttgctcacgtggtccgctcgaagtttctggaaagcctgttttggacacattttgtcacatgtagttttaggttcgttcataagatttgtcagttgtgagcaggaaagagaaagttcatagaaagaagacttgcctcatcaagttcttcatgctggattcatttccgacatagattcagatgaaggatcgaggaggaagtgaaagaatggatggatcaagaaaagccgcagattatataaggtcccgaagaaggataagaaaagataagttacgataaacgctcaaagtaggaagagagcagagaggctaaatataagaaaacgaacccagggataaagcacagtggtctgaaagacgagggcagaggtggcgatcgtgaagtttaggtacggcaaggcctagattcaatgtgtacagatgggatacaaatcagcagattcatcagttggtaccagtttgagtttgatatgagttaatgtacaacttggaggacgagttgcacttaccgttcggataaatggattgaccatcggactctacagggtattacaggagctatgtatttatatgtatgtaagcgtatgtgtttatgtatagaac

SEQ ID NO: 1406 - DNA, 4952 bp, Xanthophyllomyces dendrorhous
gtatagaactcaagatgagaggtgtagcagagtggaaaagagggataaacaaaagcgtggataagaataaaacataggctgtgaattaacaaccggataaaggaaggagaagaagaacgaagatcatccgagctggtcgatcccgacaagtatcggaactttcttgtgaactcggttagcctccaatgatacctcttctctcatcctcatcattgtaactggaaacagtccggaccacagtgagcagtttcgagagtatgagtgtgcattgacgtgtatctgagcatgtacggatataaggacatggtcacccggtcgtgcaacgtggctcaaagatctacgtgggagactgcgtctgcagatcagcttcagatgcccgtctatgacgatgtgcacttcgaaaagacattcctctctttttcgttacacctccggtcgcctgcatggatacgccaaccccgttcatctgactaaccgccctttcgaaagagtgttatgtatgcatgtatgcatgtatgcatgtttctgtgaaccctcactctttgagctatctgtttgatgacaagactgtatacttacgtctagccatgcatagagaagtagaaagcaattatagagggcgactaaccattgtatgtcctgacgcaatccttgctcgtctgataacgccttctttcagctcgcttcacccttctccttctatggcgttgagtgacggttccgaagcatcggtcgcccgtctgggtgagcttctttcaggatgttacccgcttttcgattctctacgaaaatgcatacatctgcccgttcgcctgtctttctcgcccggaacctctcaatactgccgagcacttttccgttgatctatctcttgatacttactgatgacagaccaaatctgatcttctttgcacggaagggaagaaaaagacctgaaaaggatgatgctaagctaatcgtttgccctactaatccattccttttacccctcttcacccttatccctattgcgatccttcttcacactgatttcaaactcttccaaaacgcatctcactctggttcttacccatctacacagacgtcttcaggcagcgactatctacactcacaatcctgcaacgatcccctctttttacacctcgatatctctggaagatctttctgcagaataccatgctactttccaatataaaacctaggaatgattacgggacttggacgccaaaaacgacatccagagcaaagatagctggcatgtacaaacgaattatcagcacattctacccaagtgagttcgccgttctatttctaagcttgatcataagattacttaggttgatcgcgttattttctctcacatcttctcttctagctgtcatcattttcctcgtctactactttatttcaaccttatttccgactgtcgttccccagttgcgattcgatccatccaatgagatcagtcccaaggagttccagagggacaccgttgctcctgatcatactcattcttcgcccaccataccgttgcctatatcgagaaagaccagcgccattgcggccaagcctctcaaaaaagacgttcgtttatatgttgacattcgcctttctagttctttgtctgctcttgcttcttggctaaaatagaatcgaatgtctctccctcgcgcgtgctcggttacagcaccaaaacggcctgtggcaagatatggaatatgcagatgacaccagctccccgggcggcgtcgtaggctacacggtcttcaacaacctctgtcggtccttcctgtccctcgttccacttctacctctcaaatagcttcttttctattgattctcagttagtttactgatcgtgaacccctcttggtgacagatactgcgaatggtaccctctgtgagttttgcattcttttcttctgtgcaaggtgatggttgttgataataggttactgacacccccactcgtctcttgtctgcagtcgccgtcacgtctgacgccagctctcttccgcccgtctctacattccttagtcaagatctcaacggaccggctgacgaaaaactgtctgtcttttttcttttctgaaaaaaatgcatacgtgccttctatagtgagctgacgtcgacgttactgtcccagttttcgaatcataactcctggaatggctcgcgaacttttcgggaagcgagtcatcagactagacggagacagtgttggtgctatttttcaagctattccaaaatgcgtcgttcagccacctgacttgcctaatttcttgaaggtattctttgcggatgccgctcctgatagtttcttgggtcagtaaatgattacgcggactatatttttgagatcaaatgagttctactgatcttagttgttctccatgatacgcatatccccactattcacaatctactcaacagcacactactagtcagtgtgatttctttttaatacctacacgacgtctctcatttgcttcttctgtcccttccaaagctcatatactttaatcgtttcattttcttgcagccactttgtcgttgaatgtttttctggggcatggaaagcgctcatctctgtatccgacaagccgttggaagaaatgaacactccccgtcggatgataatagcacgagatcccaaatggagagacggcccgaacttgaatgcttggttcatgaacgttatcctgcctgatgccagtatgtattgtctttgacatcgaggatcgttccagctcgttttcctcatgatattcaaatttcatgtgggtgtttctcttctttcgatagttatcgaggatgaaccaatgtggttagatagggccaagagcggtcaagcctatgtgtttgaacgaggtcggtttaaagtctaatgttttctgccctctgatatcgcgttccacgatcactcaatttatctttcctttatgtctgcctcttgtacgttctgcgttatgacagtggtcattgtggacgtgagtatcttctcgccattttggtctaaatcgagcatcgtatttatccttccttcttctcgggtcgaatcagagatgggcggcgcataggcattcgtccgctgttaacaaatggaacaaaatgaatgccgagtaggttgttcctctcttcttctcttcggtttactctggattctgaaaggtttttatcaaatctgtttcaacttttgcttgataaatggttcgtccagagtttacgacttaaaagggcctttggttagtgatacttcaagtcgtcttcagtccttgtcaattggtctgtttctcctccatgctcactcgatcaaccttctatatagaattggttcgagcccctaaggcaatctttgaaacactctctgcagatctcagaagatcaggtttctgagaaacgtgaatcctctttccctctttgtttaatcttgacaggcctggtctgactgtttatgtgcaactgtaatcttttgttctgctagccgtcattacttatattaatcgacagaaaagcaaacgtcgagcgctcaagccggcatcacacgatgaattgttgatctcactaatggagatccagtctgaaggtctggctgatgtgtatgacgcccaaatggagaccatgagcaaacaagaacagtttgctcttgcaactcgaacaaacgtgagctccttttctatggttgcgatacacagtaaacccagtattttgatctcgtttcgaggatgtctcttctggtcgggtagatcatgattggaggtgagcaaatattcacgatttatagacagagcaagtacaagctgatgattaatatcatcgcccaatcaatcgatttcttcacgaagtacatggaaacggtctgaggttcgtcccttcattctttcatctcagataggaatcgagtcctaattgagcactcttcttttcctttgtgggcatctctttcctggctacaacagtcaccttatgtggatgcctcgaggctcggatgtcatcgagatattcactccacagtgagctttatctctatatgtttcctttgactcggaagaatgggcgtactgatctcgtcgcatttgtcattggtctactcagagggttcactcgagactagtgagtgtcaaccattacccgtccgtatatctaaccaactctcatgcacatactgatgctctatcttttccttcatggcgcccttcttccttttgcatgcttagtgaaattatcacccgtaagttcgctcgttgccctctttcttcccaccatgcgtctttcgtctcatcatactatgatctctcaacacaaaaacagccgctcttggacacaatcaccatgtcatcgtacgtcatcttacaaattacatacgtctgtatcgcctgagtgtactgactcgagtatttgatcttctgcagtggaacgacaccattgaggccgaagaatcctggcgggctaaaggacacactagctttcccgacgactttcagggaaccatgataccgttcgtatccctcggctctctatcaattttgatggttgttcctgcttcatcaggctcagtctttgttcaatcttccttttctccacagagtgagcggaccattgatcaagaatctcatcaaacgcatcatcgcggataagtactcccggaaatcgtcactagccgagcatgacaaactttcgatggagatccattgatgtctgcgctatatacctctctcgctccattcttttttaatcccttttcaatggttttcgacagtctgggttgtttggaaagggttcatgtgatatcttttcgtccttttcttcttgtatttctatttctttccttcatcctttccttactttggactacttctctcactgcatataaaccggtttctaaccagtaatcgataacatgatgggcacatccaatcctgatttgccctcttcataccaatcttcatttc

SEQ ID NO: 1407 - DNA, 22116 bp, Xanthophyllomyces dendrorhous
tatccatagatatattcaaatatgtttagttgatatccccttttcagtatattttctgacggactgactaacgggccatcatgccaagactattgctgtaatgactgacatctatgtatctctaggatagaaacataatatgcaagctctccggtgattgtttcagatttccatcttctagttcatcctcaaagtatcttttgcccaggaagatgcttttcttctcttctcaattaatcctattaaacgctccaacaggccagtaggaaatcaaaggaactggcgaatatatatgtggatgagtagaagctaaatagtaaatttcacgtaatttattcagttagggttgttgagaatctgttcagattagatcgcgaaaggagagcaacattagatgagacaaacatccaataaactcggcattccatcaaatccgtcatattcatctcttccaaatttgctgctcaataagaaaaatggtttcggagaagttcacaactgatgacaagctcgacttgttgtttgacccagagttgatctcgtcagatgtcaaggaagcgttagctgatggatttcatgtttgtccgtttcttctgcttgtcgcttcctcttctcaagaatgagagttacttaatgtcttgatattctgcttcttgtatcaatatggaacgggaattcaaacgacagatccgaccgttgtcgacaactgactataaacgatcacatctggaactgctttccgttctgactgtcgctcctgtgatctcagaggaggtctatgcagatgtcgtaggagatatgaaactcagaggtcggagagggggatatttccctgttggttcgttctggtctttcttcgtatcttttgcttttcttgatcttgatgatgtacacatagaggctaaggaatctgacaagtcggcatcctttgctccgtgcagtgatcgtccagcacgagactgatcagcttgtcgcaacaggaacgcttctgatcgagaggaagtttcttagaagtcagttgtcaaactgtcctcacttttctcgattcggttcggtttctttgtccttgccggtgcttatagcttgtactttgcttgctcacagatgctggactagtgggtcatattgaggatatagccgtttcgaaagacctccagggaaagaaactcggactaaggatcattcaggcactcacaggtctggcagagagtcagggttgttataagacaatcttggattgcaataaggacaacattcgtacgtgtatccatactccggttcatttgatcgattgatatctaagggttgtgtcatctacgtacaaaagccttctatgagaaatgcggatttgagcataaagagtatgagatggtcagtctgatctttctttcgtctccatccgtcctgaactgtcaatgtacgtcaagaatttaccaagaagaatatgttatattcctgtttaccgtctctgttttcaaggtcaagtatgctcttaagccggccgctctatgatttccatgtcacttgatacccacacactgtcgatagagcctcgcgcagtttcatttcttcccttgatttgtaactaacaggctatcgtcgccgagacagtacatcgataggaatgtttgactgtgaacagatttcgtgaaagaattgaaagggtcggaaagactgataacgcttgttcattacctgtcaaccaatcaatcatctcatctaaatcctgtcacttcttaggtcatcgtgtctatttgcgcttctccactttttcctttctgcatcgatcatctcgacatctttcgtgtctatagctagggatgcaacgctctacctcattttctgtaacggtaagaagtataccttctctcctcttaagaaagcgtgtgacgactcttgtatgctcacatgcattcaaacaatgtcgcctaatcgtgttgtagaggcctattcgtcgacgacgatcctctattaaacggtcaaagtcactgcagaaatcctgtcactctgttttggaagaagatttcctcctccaacctcaagaacccttccccatggaggttcctatgcacccgggatcgtctttcttgagcggatcgaagttgactgaggctgactgtgaggttgatcttgcaacaaaagaatctgttgtgccaacagacatgtccactatggtcgccacttcaagtcaaacgcatctgaataggcctgcaactacggcatccttggatatgaaggaggagcatctgccgatcgaatgcaacagcggttcaatcgagttgacggttggcagtatcaccgaggctctgagggagaagcctcctgtcgaagtctccgtatcgacatcggcgaccggaactttgtcacctcggaaagtgcagcctgacgagcaaacgctacagccgatcattcaatcacctacttcatcttctcccaatgcaatcgattttgaagaattgacagccttggataaaggggttgcaaagacagactcggcgcatatatctgtccttccaaatgattcggagcttttcgaacacgatagaccaattcgattggccgacgatgtcctgtcaactactttcagcgatcagacttacgaattcaaacatatttcggactcaaaggtaccagctttgacagaaaacccagttgttggtagcaacaacgaggtgtctgtcaagaactctcagcatcataccgttcatgcgacaccacttgacaatcatcatgagttctcatttgttgataaaccaaaagaagatccgtctgttgagactggccaagttagtccgtcggttatcaactctcagttgtctgagcgaccagtctccatgtctggctttccttctcccatcgaaacagcccagaatgattctgatattagagaggggaaaatagacctgtcggctactcatctcgagatagatgagcaacatgaacttgtcgatcaaccgggaaacatccccggagaaacccatgttacaagtgaggaggtctttgaagaatttcttgaaggaacagaattgacaccggaggttctcatccgtgaaggacaggacttgatatgtttctctccaggggtgagtctggaggctttgtcgttcatcatgattctagtttaattgcattagttgattttatcttcaaaaatcactacaaggccaccgttctcaattcgcctcaatgcaacacgctggtcgacataggcttcgaaggtgctcaaagagatgatatcattaccctgaaggatctagatgtgagtttggtgttgaaaacacatgcatctgaagacagtttgatacacaattgtttgacgttacttctcaatctttttaatgactgacctggacttgcgatcttcaatcaatcgtctatatcaaattgttttgacccgaaggcagatcaacgtgtgataggcgagttatgctccgacgaagaagtacgtctagtctgtatttacatcgacttaatgatgacagctgtctgactagataagttcagtccgattcagatcactcggttcaagacgagatcccgactcgatcaattggaagattttccgctttgatccccacaaacatacctcttctgactgagaccgatggaagcatctctctgacttggccaaataatcaagacaaggataggccgtctgttcatgtgagtggatcgcactccgtgattacaagactgcatgactcgtcgtaagctcaccaagatattcgtttttgaccgaccgcagagtcaagaggttgagccgcatgatcagcttataacgagttcgccagtattaaagaagcgaaagatttctactcctctggttggtgaatgtcaaattgtctgcctcttatggtcagatcaaatcgctcaccgtgtgcgattatatacaaacaggatagaaatccgatggccatcaagaaactaaaacaacctttcaaatgtccattaattactgagaagacatcagataaacttacagcacccattagctcccagcctacagcgagtagcccaatctcttcttcgcctactcctctacctgagctacggccgatgctggctcagcgttcaagacccttaagcttcaaaccactcactattcggcctactgtccagtataaggcgcttcgggacaaattgggattatgttcaacatcgaacaaccaggatgtcagatcgattccggaccactcaccagcgtccaaggactctgatccggaattagaggtcagatcaagatcgatgtccaaacgaaatcctttcgtgactctgaaggcatcggcgcctttcgtgtcccctgtgacgacttcttcgtcaatacttgcggaggggacatcctcgtccattggatgcgcagggaaagtcactcaaagggaggtggctaaattggagagtaaagtccaaataatcaaacaggctatcaggttagtacaaggagagggaagaagacaggaggaaaagcaggaggagttgattttaaagtggaaggatgctggaagggaaatgtaagtactttgcctctccttgtgaacttatagaaggaccacctgttcaggcgaacggttatttactagcgttcgcaaatacatagctctcaacttttatgggacgagggaggttctgacaacccagccgataatttccaatccttggaaccgaaccccttctcatcttcgcctcctgcttcctctctcttcccttcagatgccttctcacctttccctcgccagtcattcttctccaattcgatcttctcggaccgccctctcctttctactgtcgatgactcggccaatgaccatggcgagtttttagaacgagagagatctttgagcttagactcttcgatcggatcaccttcagcctatcgaccttctcgctctggtggaagcgggcttggaatgagcgcccgacggcaggtacggggctatctagagtcattcgatagagccgtgtccgagaaagaagaattgttcgaccaatctttcatcggaagaaccgaaatgacagacggaagagacgagcagaaagaagaaaaagaaggggaggaggaagaggaagaggagaaagggtgggatattggaaagatgcttcggacagtcttccgtacggatccgacgctttgtgagttacatctatttattcatcttctgttctcttttctcttcttccaggcatagaaatagcactaattgagaggttgaaaacgtaacatacttgatggaaaatcgtgatacgattatttcagttgggtgagtttcttccagctgtttctcagaactggaccaatttgttgggtacttggctgacaaggcttatcttatcacaatgcgttgatgttgggactaatcttcctcatcccatgcatttcttagttgggatgattccattttcgattgggaagaatagatatttcttcttctctacattgtttcttttatatcatcatactcgagcacttggtttattcatgcatgtttcatcgtctctccactttgataagttcacaaaatagagaacttggaagaaagcacgatcagagaggaaaagtggtacaacgggggcatatataaagcgtctgtttacaacacaacatcgttgtcaccgccgctgacgacgacgacagccaaaaactaggatttgctattaatacctttctttagaacgtcttagcctgctcctccgaagtgaatcgaaggtaaggcttgacagtcttgaagccagggaagagctctgcggagcgcggcagagcgaggtgaaagagaatccaacagtgagcaagcttacgaagcacggtacgaatctttgagagaaggacgacggaagaactcactctgagcctcgtcattgctgacggaagggtggatgatggccgggtcacctctcttccagttaacaggggctatattcattttgagaagaaaaacatgcgcatcgttgaataatctcgtttcgctagaattaactgggaagagaccgactgactggtgattcggtgcttatcacccaattgaagagaatcgattgttcgaagaatctctccgaagtgtctaccggtagaggcagggtaagagatcaacagtctgatgattcccttgggatcgataacgaagactgttcggacggtgaacggaagtcctttggcgtcaacgttggtagcatcgagggcatcgagcatatcatactcggtggcgatctttcggtccttgtcaccgatgatagggaaggtgacgctggtgttgccaacctcgttgatatccttgatccaggcatcgtgggaggcgatgtcattggcagagagaccgatgactgcgtgagatttttgcgcgagaatcaagtcagttggggcgaggctatcttgagttttcatggaaagataacgaacccttcacgcctcgcttttcaaattcggggtaaagcttagctacctctcctagctcggtggtacacaccggggtgaagtcatccgggtgagagaaaagaactgaaaagaagaaggaagtgacagtgtatgttagggttttttttgctcgagacagaaggaaaacgcagaaaagtcaaagctgaagggtaatgttgtccgactgaccgacccaggagcccttggaccactcggagaatttgatgtttccttgagtactgtgtgcgcgcggattgttatctcaggtcagaaggcagataatctgtgcaagtggggtgaatgtaaatttctgcttacgtctcggcctcgactgtaaacgaaacgagagaaagaaattcagacaatcgagccaaccaggacgtgtaagtcgttaagttcagaggtgagaataacagccaactcttcggcgatcaagagaggagagactcacagtcgggagcggaagatccaagtcgaagggtaggcatgatatcagtagatagacgggtgattgagtgagggaaagatgggaatgacaggaaagatgaaagaaatgggaagatgatggtcgaaaagagaaagaaataggagaaatataaacgtgagaaacgacctcgaagagtttgagaaatgatcgcaagatggtgcgatcgggttcggatacaggatgggaaccacgtgagatggcgtcttacatcacgtgactttagccactgccttgctcttcaccctcacctccacctctacagtgtctgccgctcaggactggccgacacaggtcttcatgacgttggcgcggcagactctaaatgaagtccggccatctttatcgtggcccacattgatacctaccaaccaccttgaatcaacacgtcttcttctcttcaaagcaattttagattgctccttttctccctctactttctatcaacggacaggtccagctcggaaaacatgtcggaccgtccaaccaacaggttgagaaatccattcagatcctctgacggacaggcaattcttgtctctgggtttctattgagtggtaagcatcccacttttctcctctttcatagatatcaaatttcttgctaagactgacttggatctcttatgtctgtctctctcttgttttccctctgtttcttctcttcttcagctcgaacaactccacattctacacgggcgtttgacccatcgtcacttccggtgacgaatagtccgcccccgacctcgtcccccggatcccctcaacacagctcagcaaatcgagtacgaccaagatctggatcagaggatactccttcgaatctgttcacgttgaaggaagaggatgagcctacgaagacccactgtcgaaaggctcttcggtagaatggcgtcgtcgccttcaccgactcggacttgtccggcctcctaagcaatcgatcggttctgattggcagtgttcatactcttctcgatctgaagtacccgcttcaccttactatatttagctatgatagcattcacgaattcatacttaacgaacaaccctactgtctctctcattaacgaatttttttttccacttcttggacgtcgggtctgatttataattatctttgactagactcaatttagaaaataaattcatctgcacccttaaattttatgtggatcgctcagtagattacgtactttcctccttcacgtttagtcattatccttattgtgtttttcctattatcttcttccggcccagtttttatgaatacatgatatttgcgaggaactaatcttttcaagcccaggtctaatgtaggatggtgagacgcacgaaaccaaaagaaagcagaagaagaaaaaaaaataaaggaaaaaaaatatagtgccgagataggtgcaggagcaaaaggcatgaagtcaaaatggccgatagagaaaaagaaaagcaaagaagaacatgctcgacaggaggaaaaaaacacatccacgcataccaacgcccattagctgactttgggccactgcaacaactgacctctatcttctcgcaaactgaacaaccaaactcccatcggtcgacttgccatggtggtcgaaccgtcgactccacctatcattccgtccagccaagcatccctcaactcaattttgattgtattcgcatatcccggaattggaatagactccttaatctccttccagagatcactggacgcgatcgaagaatcttctccagccagaagccaagttggatccaataccatctgcgtgatcgtcaaaaaggtaacatccaacgcgtaaagaggaagactagactttgtgtaatccaaaaagttgcgagctatggtgcaaagccgatataagaggccgagtcagttatatattcatgaacagacaatctagagcccagtgaccgtacctttctcgtaatacacagtctgtataacaagaacatgcgcaaacatcagtttccattggatctcagatagtttaacaaagaatagaacactgactttggatccgtaacgatggagtttcttaccacccatctttccttccttgcccttctccccaggtagtattagtcttatgagctcgacgtaaccggaactaccatttgccttgttcgcaagttgctcggaacccatgtgagacatgctatttgatgcgacgatcataggcacggaaagcatatcgactcgacgctggtcggcaatttgctgtcggagatacggcaaaaggtcttcgcgatatactttgatagcaacagatattccaacatcaacgtcagtatagaattcaaagtgtttcataaaccggttcgaactcatatggaaaacacctaccatcttcttcatatcgccgcaggatactccgtactttcagcagtggccggcctttgcagatgaccaagaatctgttcaaagatatgaatgataaagaatggtgctcgaggagtctgttactctgcaagggagaaaagaagaaagaaagagaacttacaagaccccctgtgctaaacattcagcagagacttcttccaagcccgatcctaccgcatcctcatacataagatctgctgaaagggcagccgcccacaactccccagcgatttctactcgatctcctatcaaaccttgactgaacgagccgatgtacacgtcgcaacgcctgggcgtccaaccaaatgaccttgcctcctcattatctaggtttacgagtcgtttcaactggtcagactcgtactttcctaccaaaaagatgattcgctcgaacgcaatctgcattcccactatgttcgatgtaggggaggtagaattattcgactgaggaaggcggaagtgatcaaccaggttgtcatatcttaaaccagtataaacaatcaagacattatcagcgaacattcgctctgcaacctgagatgattatgaaccgaaacatacctccctccaacggccaaaacctctcgtttctgactcttcctaacacattcgaagaagactccagatttgaatacagttggccgacttgaagttgtaggcttgaaaataatttttcgtcgaaccccaaacttctccgcgaaagagatcacttgcttgatttcagagattgcattgtgcaatgcagataacgcttggggaaatcgttgttgtagcttttctgttccggcctccaaaaaaggttctaagcaaacgatcaaaggagaaaagataaatgattaatatgaaagtgagctcaaatctaaaaactagtgacctcaccatcaatgtaccacttttccagctcgtctactattggtcgagaaagatttagtcgagaacgcagttgcgcgaagctgactttcggtcctatgtctttgagcatatcgcagacctcaagtcgacgtttcgaaggtacatgcgacaaaaccgaactcaaaacttgagatgcagcatcatgagtatggtatgtttatacagatcagcattaacaacagtatcgaaacaagactagactatgcaacatacccgagctgtgattgatttgaaactcccactcatatcgagtagacagagcaggaaacatatccaatattctatcgagaactgctataagttcggcttcggaagccatcgaccgaactggagacaagatatcgtaagccacctctccgaacgacgtgggctgcccaccagtcaccgattctcgatatgattgtccaatatggtatctcttcaaacgagcaagcttagttctggccacatcgcgagcgaaggctgggatagaaaaacgaaggtcgaatcagctcataatggcagacatcagttttggtctatcaagactcacaaacgagacctgaattacagacatttggaagttagctcaatgttgacgctaaataaacacagagatgaaaggaacatgagagaaaatctagaaataagcgacataccatcataaggtagctcgacttgttggccttgtctatttaaaaaccgcgctccaggttccttccggaaacccaaaagctcagtgacaggcaggaggggcggtggttcccagctaaagaattatatagagatgctgtcaaaagctgaccatgagtttgatcatctttaatttacagaaacatacttactcaatagcaccatgacgtcggaacagatctatcaaccgttcttttaccatgctctcgtatactctgtggtctcgagggccaccatcagggtcatcaaatgtaaaatccgccacggcgtcaggtatttctgaatttatgcaagtttttcattgtgagtgagaaaagcgcaaagaaagattgacgttttgttcgaaagactaacgcgagaagatgtggttgaacagtaccggataacgtgtggatgttggattgcctgaatgagaacgaccagtcaacatcacatcaaaaaagcaattcttgaattgataaacttaccaaacgttcgtactgatcaaaaatgtacgagattgcaaagaatatcgtcaatgatagtaatcgagaagacttgatggagttcaataggtgtaaatactgaaacccacaggcttccaagaagtactcatcctctttgatagagggaagcatgccgttggtaagaagtgtgatagcccgaggtcgtctagtcggatcgtgttgaagcaataatgagatgacctttgtttgttgagacttttgtacgctcggccaagaagaaggaaagacgatagaaggtgttcggagacttcgaatgacgagagctctttccatgcctgtcgacagagggaagttcatctcgaagaatatgatctacaacagcaaccacaaaaaactatttgtcagtgtatgatcatagagccgacggatgtgaaaagaaaaacgcacacccaaggagtacagatcagctttgtcatcatagcggcttccatccttacgcgccgtaccactctcaacctcaggagcaatgtataacgacgttccaatgcctgtgtagtaatggaaaatgagtgtcagaaaaaacaacacgtctgaatggaaaattgtttcggctttcttaccagaggttaagtcaacggagtctgcgagagatctgttaggagtattgttcatcgaggcatcggttgatgcaagatcagtagcagcaagcccaaagtctccgatcttgatacagttctcgtgatctgtaaactcgaaggtaaggttagcattgctcgctaatctgaacttacagagtagtgtagacaatatgtacacaccgatcaacaagttcgacggttttaaatctcggtggacgatacccagattggccatgtgcgtcaaagcttccaaaatctgtcggaataatctccatgcttgttcttctgtaagacctcgagcaatagactagaaaggattgatgttggtcaggtttaattttttgatgttagacactcaaagttgcgagttctacaaacctccttaagcgtttggttctcaacatattcctgaagaaatgacgaaggagcatgacattcagatcaagaatacaaaggaggtcatgatcataaaagaaaacaaaccatttggatataaagcactcttgtattggcatgatcggaagacaccatcgagccatctgtgaatgaaggctgaccaggaacagcatgtcccgtaggcgtagacaccaacagtctagatttcgagacctcttcctctgttgatgaatcttcggaggtatcgtcgctctcatcttcttcgtcgtcgtctcttcggtcgtcgtcgtcatcatcctgctcgtcatcaccaaaatgtatgcttgggaaactatggctccgactctgagtgcctctaacagagagaaaatcgttgtcggttggtttgaaatcgaagccaccgaaggagatcgacggagtcgtggctccggatgtgtcgccaagagaagctaaggaggaggtcatggtggcgggctcgctaactgttggcactgacactggaacgatagcagcagtctcttctagccaacatgtatagtctgatgacattcatgcgagaaattaataactccacatggttttcgtataaaatccagactactcacatcgcacgataaattgatgattcagtcgactgagagcattgacctctctaaaaactttttgctcattgtcttcaggccgaagtttgactttcttaattgcatctgatctcggtcgacagtgggttagtatatgtatacaaccagagatacaacaacgagacttacagaaacgcccgtctagtttattcttcgccttgacgaccttgccaaaccctccttctccctgcgcaacgacaaatccatacttgttaaataaggtagtaaaaatagtgttgatgccaggataagactctcaccaaaaattcgacctcctcaaaatcagctcggtatcgagaagtcagtgccaactgatgctctgctcctgctccatcgaagaatggattatgtggcccactgatccctggatattttttattgtatttagataaaccaaacgtgctgctcaaacattctgatatcgccgaatttgtgaccaaaaagaggtattgcggttatcatcaaggaaacaagggtttaaataagaaccagaacgacagatcttacttctaagatcttgtttggaaacatcctttccagaaacggctactgtgagattcaaattggaaagttttgtgactgcttggtcggctgtccatctttcgcgtgctattgggttcaagagattttggaggataaccacgagagcttcagggaaatagaagtcatctaaagatcacgaatgtcatgaagttgcgtcataagaacagatacattcagaaaatgaacgcatgcctcagagattagacatatcagttctttgaaggacaaaacagacgtactagaggctatcaaagcttgtaggttcggatactgagatgtgaatcaaggcaagcatgagtcgagtatctagatgataaaaacgaatacgtatccgggaatcaccttgtagactacatcagcaccacacatcatcctcagaaatgtcactgttgcatgccacacatcccgcttatgattgaacgcgtgcccagcttcgatctcatcaggagacaacctatgtaggttattggcgaaggagttttgtcagcatcttcgcagatcgacaaagtaagacaaaaagaaggaaggaccgaccagttccagggaagatctcttccgcttccttgatctccaatctcgtaaatttcttcgtcaatcaatgatggtgcatcagagaaagggtttgaccggtccatgtcgatgatccttcgtcgatagcaaggttctgagagacgagcatctccagacctgcaagaaagtataactgtttcgagacagatgtctacccgtgaataagaagcaagagatcaaattagtaactcaggcgaatgatgagaatcgatatgctgatgtaagattgaccatcatgagtcactccttgcttcctcatagcctctaaaccagcaagaagttgaatgaaatggtcctgcaggatacaatatgattagaatacataagttttatcatcctcgaaaaaagatgagaaggatactcactttcgccagctcgatatctaatctcccacaaactcttagtatacccttcagcctctcacctcttccaatcctacctgtcaacagacataatctcttccactttttcactcccgtctgaatttcggtcaacctcacagccagtactggaacgacttgatcactcttcagcgctaacactttagtcttcatcgtttcaaacagattgttgagcttatgacttccttgagcggaagagtaataagctgttggaaagtcgaccatagtgatggaagtatcatgtagttgaccaggtgcgtcgaatatcgatggtttctctgtattaggcagagatacgatggtttggtgctttgggatggcgatataggtcgtccatagtttgtctttcacgccacccacaattgtaaacgacccttcgatcccacatgacattgagttttcatcatttgcgccaaacgtaacttctgtccattctccagggtgggagagattattagatacattgacgactgctagttctgcctgacgggtaagttgaagtcgtttgtgctcgttgacctgttgtgtaagtaagtgagcgcgctcctgagctttcctggcaagctccgtctggtggatttgatttgattcataaagtgcctatttgaaacgataatgattcatttcatcaacacagtgttatttgttcttggccaatatagaggtcttaaattaatgacgagaaggaaacataccactttctgttcctcctctcgtttgctcatcagcacagctaaactatcagctgctgggtcgaagtccttggttggagggggtgccggtggcttcacgttgtctgtcaaccaatcttcgatgaacgatgcaagctacgacgtgttttatgtatcgacatgatatgttcgaactcttgtcaatgacagctgcagtatatggccaagtggttagatattaactaacgttgaatacgacgacgtctcctatctgctctcgagcggcgtggttgacgagtttggtgagaaccgacaattgagacgcgctgacattttttgaatgagcaaaagatagattgggagatagcttcggatacatcttggtatactgtatatccaaacatccgcaatatagatttatgcgaatggttccaaagttcaatccccaactcatgacccggatagtgggtaacgaggaaaggctctcgataggcgagaccaacatggaaacaaacgaaccttcacaaccaaaacgacgctgacgactcgagcactgacatcaccattgtctccgagatcatgttttccacttagtcggattccaaactctccaccttcaacacctccgactttgccccaagctttcggttgatttggcaaagggttcgcgagaaagtcatcgccatagatacttttctaaccgatgttcaataatttgggaaggagtcgtacgaagaacagacataagtcgcaatatgatcaaagcagaaagacggtcagacctgatacatgtcccatgagaatgctgttgtgataaactatgctttcatgaagtgtgaaagagaagacgaacaaggacttcaatctctgtctgctggagttctctgattagttcgggtgtggacatcgttcgaccggagtcgagtttgctgattgaggcgataggttggatgaaagagagcgccaattgaattcgaaaaggacaagaaaaagggttgttttgaatcagaaatcggacaactaagaggctgcgagagccctgaatcagagactcatcagggatagggtgacggtcaaaaaggaatgagaaagttgaatgagatggttggaagattgaacagaaagcgctaaagaagtgtcatcatttgatgtactggttacgcgttacaaacaaatttcagaaatctattttgtgataaccgatacttcagtttggaaaagaaagagaggacagaataggtatagacaattgaaacgaagaaagcatttgaaagagatagaggaaagatacagaaagcaaagggtttcgaatgacgggagctcagatggtcaaactccagctccttcttccttaaacttgagcttagagccctataactttcataatcacgtatcctaccgtgacgacaacctaagagaacagtcatggaagctacgagtcagccagtatcttcacaaaccctcagtcaaagacgaagagaggaagaaaaaacttaccccagtggcgagcacagtagcaggaattccgtttttcaagaaatctccggcattcagatatcttctgcctaaagaatcctcctgagagatagccgataaattggggaatcctatcatagaagtaatccatacatagtctcattcgtcaataatcacaacccgagggatttgaagagtacaagagaaaagtcgaaactggacaaacctgagacaggaagacccattccggctgaacagatcaaggcagtggccatgatgagcagtctcgggtgaggagtttcaagtgattcacccactcgggaagcaatagggacgagcaagatggaagcaatcgtgtgggagatgcttcaatgatcaaaaccaattcagtcaacgaactcactcgtggtgaacgctaatttagggaacacttacaaggtagaaactaccatcgccacggtcgcaaacacacagaggatttgccaaagacccatgccctcgaccaatcgctccaacaccgaatccaaaacgtcaagtactgaatacattgatcaagtcagtttgcttgctgatttttttcgtcttctagataccgagaatgatcagtatgagccaaatacttacaaccagagctcaatacagcttttcctagagcaatacctcccatagccaggaacactacaagaaacgactttgagttcacatcctgacgttaatcaacaggaagaagcgtatgagtctcactaaccgatcgaccagtgaaagctgtcaagatcagaggaacaagaagattagccttgccctttcttaatttaaaaataaatcatagttcgaagaagagacgcactgatggaaatcctcctgcgaattgataagaaaaacatcacatcagcaaggccacagtcttaccccgaagaaaacgaatgatgagcaaacctttgacaagatacctgttccgaagaacgccaagagaggcaggatactgatgcaacccatatctccaaacacattttccagactcttttctacacaccaaagtccaatagtgataagagtgacaaagaggacgaagtagtgagttcggttgaaagtatcgccgtgcggccggacaggttgaatcaagagatcagactcccagcgatagccgagatggaggaatgcccagatctgaatattgtccaatggtttggtagagattagctatgagagcttaagatcgccttgggcgcaaacaagacacttactatgatcaacgaaacagacgcgacaggcagagactgttttgaagttcaaatttgttcgtcagcctgatataagaataacaagtgaagaaaaggcacaagatcaacgaacaatcgcaaaccactggagccaatctaatgccggctccatagcctgaagagcgatcagattttgaggactcgagataggagacgcttgtcctccaatgttgcttgccagcgcgattgcaagctttatcgccagcatatctatcagtatacaatgaaaatactgctcagtggatcatgaccagagtttcgtgaagtgcttacgatcagacatcgagtgaaaggcgaattaggaggaagtttctcggtgatcggctgaatgagataagatgcttcagatcgtgaccaatagagacgtccgactcaaacacatagagaggacccaccttgatcaaagcaaagcataaagtaggcgccgcgacattactgatgagagaatcggtatactggagtcagccatattgaactcttcaattgaggcgcgtcattagcataatttaaaacgcacctgatccacatggacgcaaacgtagcaagaaacatttgactgagaagaaccatactaggtttctgaccagctagagtcatcaccttcttcgccatgatcacatccatgtgagttttcgacagggcagcagcgatagtgaatcctccgataagaagcatgatggctagatgtcaaaccaatgttaagagaaatacttcagatacttcgaactgtgaaaacaagattaggggagaggaagataagtaaggcgtactaggagaaaacatttgggaaaatatatatttcgtagcatcaggagcagacattcgagtatcctgcccatcagtagatcggagcactcgaagaactgggattcagggaagaatggattgtgaggttaagattcgattactgtagcccttcattaagaaagaaacaattatggcattttcaacataccgacaacaaagaaggggaccgagatcgaggtaacaaagagaggaatagcctgcatggtgtgttgcaaccacaagaaaagttggtcagaaagtggcagatgcaacgcaaggggtgcaacgctgatgaacatacttcggaggcccaaaggatagtgcaaaacaccaagattgccagacagttctgttcctcgactctctcaaacgtagaaattgttcctgttgctagaaggatgagaatcaagaaagcaccggcgaatatgacgcctccctgagacaaccaagtcacgccaccgagccccttctcagctagatgtccggaagcagcgcgtggatcggggacagctcgaatgtaacctcccgccagatcaccgcttctttgagaagacaccatctgtctccagactgatccatcgaagtattagatgatgtaagttgtgagattgactggatttcatccagatgaaagaaagatcttaccggtgtctctctcgataataactttctctcgaagctgagaaccaagttgacgaccagccaaggctttatctccgcctacgacgacacgtgcgctgtcaatattcaatccaaaatctgtgtcagaggttatttgctagatattgagctagaactttggttattggacaacacatactatgtagagataagcaggtggtcaaagtactctaatttggcctgaacatctccgtgccatggatagtgagtttgaagtatgctcgttagatagaaatccttggtctgttgtcaaagttgtgagaaaagacaagatctatttgagtactggcagaaaatgttatttaagcagatcatacagaacagagaacgcaccgaagacgaagtgattttgtcgaatctaacgcaagttttagaggaacgaccaggcgtgaacttctcaaaatgattacaagtcgcacacccctgaacacaaggtagaagctgttgtgactcacttcttcaatgccttcttagctccctcttggttcaattctctgaagtttcttagcgcaacccaatctagccagagcgtggtaattttcctcttgaatagaatctttaacattgacgcttgctgagagtttgatgtccatacgttcaccgttccctccatgtgagcacctgcagaggccctggagtctaagtttggcacaaatgcttcggatgtaaccgaattcaacatgagcccgtgattggatgacgaaccggaagcaaacgtgttagcgtctacagggactagaccgagttgacctggtctcgtatgtgagactgctcctcctgaggaagacacagtcgagttcttcctgcctcttcgtttgatattggcagtgggtgacagattgttggacggatgtttagccaatgttgcgttaggaagcgaagaggccgggatgaccggtgaattctcaggtgaagagtcgtcttcttggtcagtggaggtatgaccatgagcattgtacctgagacggttcgcgaatgaagaatgttgggcttcaaagaggtcagaagtatcatgagaaggggacctagagagctcggacgccccttgcgtataggtagcatataggtgagaacgacgactaacagagcgaattttatgaaccgagaaagtgccaagacatacctctgcttcttgatctggatctagctggctttcctgtgtgcactcctccatgtaggaacttgttcaaactaccgacagtctccccagcctcatcatcatacccgtcgttcccttcttcctcgctcaaatgatctctcctctcccaatcgtctcgaccatcgagatctcttttctcctcgtcgagaatactctctttgagttcttcgacctcttctgctagtcgcttctcagtctcttgatagaacttagcaaccttggtgagttccttgttgagaagtttgaagaacggcttgtgcaagggttcaatttgatcgtctcttgaggaaacaatggtctccgagtcaagcaacggagccgactcaagatcgtcgttgttggtgaatggggccggttgagtgactataggaggttcgggtatagcctttttgagtgcttcatagctgttgttcaagaagagacggaaagacgtaacgagatgtcagcccaccacggatcaggtatgttcggtttcggactcgtcccgagttctaacatcaagaatgaaattcaagaagaacgaagactacagggcaacatgtaaaaagacctactcgatgtagttcggcagccagtctgaccgactattaaaaaggagtgcagttctattcgagacgaaattaaacaagaatcctcagatgatgagcaacatgtatacgatgtatcggtttgaggtccatacctatagggcaaggccgaaaacccaatgcgacttacccaaacttcatagcccactgatattcggttcgtgctcctctatttgaaagtgtagtaaaggatgtatgtacaaaagtttctagagggatatcctcggtctgtggatgagctggtgtgggaagtatcgtggtaggcaatttagactttcgccctctttcttgaaacggaaggtcaacgcgtgtgacgggatgggaaggaaaaattggggcggaggtgatagaagcaggaggccgacacgttggtcatctccgagattgcgaatttgattttatcacagtcttcgattaggaatctttcacaaactttgtattgataacttctttctcctcatgtagataggagttcgattcttttgacttctctcttcttgtctttccgctcatttcctgaggaactcttttatcgagacaaatgttataatcatcatacgatacagcagatatttgcaagaaaagaactagctgcatctacttcagaaactgggaagccaagcctagcaaagatagaaaaggatatacaaataggtcagatcctgacccttggaagccggtcactgaaggtctaaaacttactgaagagagagctggcggacgatcctccgccactagcggcagtggcagagcttcccatgagaccagacatcttgctttggaggacgagctatacagaaaaaaggtaatagggatattagtttacacacaatgagataggttatgcattaaatggccggcaaatccccaaaaccaaccttcatcaccatcccagccgcgacattcatgacatctggatcgagggcagaaggaagaaggaagaatgcttggaatcagtaatcatagaagagataacatataggaagg

SEQ ID NO: 1408 - DNA, 1554 bp, Xanthophyllomyces dendrorhous
catataggaagggcagcgacctaccctgcttggatcctccatcagcagcaccacccgtctctaaaaatggcaagcaaatgaagatgaaccggatgagattaagtcgcggatgacaagaataatagacaacaggactaaaatacgaactggaaaacaacttgctagcctcgctgatagccattccaatctatccgaatgtttaaaatgccattcagtctgggaactccattaaggttgcatcccacccgatgacgcaaacactcaccatctgagaagacccttgagcattctgggaagaagaaccggactggctacctccggtgaacgctttcatggcctgcatagctgcagccataccaagggagttggtgtccatgttggcgccctggccctgtcggtaagcctgtgcgtgggcttcttgagctctggtctaagatgattgttttatttcgtcgtttcattcagttccgaaacaataaatcagtctaaagagcattagacctaaacaacaaaattgagatgttagaacgaacctcgtcgattggctcgctagccttttcagcggttccgaaccgacttttggcaaaagcgagagcgtttccaaaccttcagaagagaaaaaatatcttttcagtcttctatgttctgatgcatgtcttcaacgtgtcaaaacactcacattgaatcctcgccgtcatcgtcgtcatctcgatcggattgctttcgagcagacttgatcacctgatcctcatcaactgaacatctcaaaccaaattgtttaaaccttgtacttttatagaagagaacgtttgatgttcagactaaatcaacttggggcataccatcagcttcgacccccccatgagacgatccatagttctcggatccataggactggttagaagaagtctgtcggtagtcatcctgttggctctgggcatgggatcgctcttgagaagcagaattctggtactggttactacctgaattgttgttgttgttggcgtcttcatacgcctggtagcccttcttggcgagctgcagtaaagtatatgcgcatgtgtgaatacatgatactcagaccaatgcagaggcaggtaagtatgatatggaccggactaacattgatgaagttgtcctgagtgagagaggagtgcggagaacgagatactaggtaagctcaattttgaaaactttgatcggacgacgataaggttttatgacaaaccatgtttctgatagatgtagaaagattgaatggaaaagtcgaaaaggaagagatgaagatggagatcgaatggaagaagagatataaatgggaccatcttccttttccttttttgtgtaaagagggtggctgtgattacctcatgatcgaccggatcaactgcttatgtgacttaggtgttggaaattcaagatttcacatataattcgaaagttcttctgggctgatgaggattttagatgatagtctcctatcaataggtcagaaaataaaagactggatgaaatctagagaaacaagaggatggaagatgtagtactttatat

SEQ ID NO: 1409 - DNA, 2089 bp, Xanthophyllomyces dendrorhous
agaacataggcggtgacaatcatggcagtcatggcaacaagacctatgacggtgaagatcttgattggcttcttgagtccggcctgagcctcctgctcagtctgagtagcctccatctcggctcgctgtttctcgttcatccagagaacgcttgcaaagaacttccgatccaaaatgtggtagaacgctccgaagagaacgtcgaccgacttgagggcaattaagagccagatgacggtgttgtacgtattctctccagtaggggttaagtcctgaatggctccggtgctgacatccatgatggttgatccggcagagttgaaacacttccagattccaaaggcaactccaatggaagcctgcgagggcactaacagagggatactagcaatgaaaggaatagagttgaaagccaaggcaacggatcccaagattgtgggtgccatggggtgaacgctggtgaaaccaaggagaccaaagactaacacccaaagagcggcagtaaaactgatataggccgttcgtcgaccgtatagatcaaacaagaaaccgatgacgggggtcaagagaatggggatgatctgcccgatggccgaggtgtaaccagcggtcagggtggaagagaatcgggttactttgatgatgtcagccaagttggaagtgtaagcgttgacggttccagcttggaggagttgggtaagaggaagaatccagaaagcagcaggaatgagccggatggagagggtaataacgtcccaggctttgttgagagctcctttgaacccaggaccgtggggagacttgactccagctttctcgctctcagcagatagcattcggccggtgacgatctggtgtcgagcgggcaatcttcgctcaaagacgacgtaggcggcgttaatgaagacggtgaccccgcagaggatggcaggaacccagaaggaccaggtccagcttccagtggatatttgaataggaacggctgtagctttaccaacgacattgtacactcgaccaattccgatatccaatccgtaaaccaacgcaaggacacctacggatcccttagcagttcctcggaaccagtgagtgtacaacttggattgggccgtctcgatggtggttgaaccgaaacccatgataatctatggtgtgaaagaaatgctatcagtgagatgttcaaccaggctctgttgtacggggacgaggaacgtacctgaccaccgacgataagaccgtaagatttcgtggaagctcccacaccaccaagaatagctccaatgaagatgaaaatactggacaccatggatccccaagaagaaccgtaataatcgatagcctatgaaagagaggatgtcaatgcctatgagattgagagcagttggcctacataatttacttacaataccagagaaaataggcagaacagcgttgataagggaagaggcagaggagatctgagaagaaacatcaacagacaatggaataagacgatgatcagacttcatctgataagatgatacccggcatatatacatttctgggcaagaaaagacaatcttcctaagacgtaccacaccgtactgtgcgttgttaattttgagctctttgatgagcgtcgactttagaggactaagtgcggagccagcgaagttggaaccaactgtgtaagaagaaatgggttagggactattatcaaactagcatcaatgagagagatcggaacaacttgagaaactgtacatacgggtaagaagaaggatacaagccaaagcgggtcctaaagacggaagaggttttgtaagatagaggtgaatcagatggtgtaaaaagaaataaccgagctgagaacagagaaatgattgcctgcttacccttgtatctccaaggatgacagatgtccttgccgatggtttcctcgatagggaatccatcatcgtcataagcaactgcctgcataggaaagacctttctttcgagagactcgttcttctcttgaatcttctcgtcattgacgaaaggatcagaattggatgagcgagttgaagactgcatggtcagggttggcgaaggaaaggaaaggaaagga

SEQ ID NO: 1410 - DNA, 12740 bp, Xanthophyllomyces dendrorhous
aaggaaaggaaaggaaaggaggacgacggatgcaattccaagaagaggaagagttggtgagctaaggtagactgaagaaaaaggaagggaagaataggggctaataaacagggtaagctttatagaactcgagaaatcggacggccagaagaaatgaaggaaagaaaagaaaattctcttctgtccttcagtctataggtttcaggtagggaccggcacccagatcagctccgtctaggtaaaagaagggtaggacagcatgggaacgataaccggagaaagagttcgttagtcttattggactggagggagaaactgagcggaaggatgtcttgattctgaccggtctcctccttcggcccagtcgatttcgtagacctgggcgtttgcggactcgaaacccgcgtgccactacgtgcacaatagcattttcgattggctgaatctgcaattactggcacatcaaatcagattacctttcatcattcgtcttggcatatctgacaagcaaccaatcagattgctacttcgggcttttatcggctctctttgacaagcgaaaaggaaacacgtattggatgaacacaacacctttgccgggcaaacagcacttgaaattcctcactcctaatcaattctacgagtgtgtctctgtagagagaacagttagcaaccaagtgttgggcaagcccggttcggctctctttcttgttttctccccttgttctcttcctttactatttatctctctttctccttgttgcttcaaggtcaccctagtgttgcaacatccagtgtgtttgttgctctcatataccactgcaattcgagtgccttcgcacagtacatatggtttgtcgttgtttctctctcaattttgaaaaaatcaatgaaaaggggcttcagcaaaacttttgttcttttttgttttttgtaaaaccagtgaagaatgatcatccggtggttgaatagacacgctttgctcatccatcctgactgcggcacgcacatctatcttccgggtcaccatcatcgctctcacgtttaacgagacggaagcataaacttccgtctcaaagacgggcccgcacctcttcagactacgagtgatttcccgtttgactctatttcaggattaaagaatcgtatgaacttgacggacagtccagatggagcattttgtatgtgtcttgaccatcggaaaagctatctccggccgtccgaaatatccgttccgacaagagcgccgttgtttatcaaccaaagaggagctcaaagaaaacagatatagcgacagcttggcattgcactcattctctctgtcccgtggtgtcatcgcagaaacgtcacgcaagtagcaatgtagccgggttatttcagaacacactctactcaagagtaaacatgaaaactttcattcaattcttcttttagcatgaaaaagcccttttcatctatgtccagtccaacttctgctctctcgagattcatcgtaactcgatggacgtctcggatgatcagaccgatatgagctttcttgttccagatcagtggatgatattccgacaggtgtaggatactgatggctctgtagacctggttgatgaaaaggagaacgcgaaagaggggctggtatcggggataccgagtgagttagattgatgggtgcaggatatcgatcggagtaagacacttggctggaagaacgtccaagagaatacagcgaatgcccagaatcagacggaagcagatactcagatgatgaccgttccggcccccatctgtttcttttccttctgtcactctcgccctctctttttctttctctttccctctccctttctctttccgaagttgtctcagaattcgtcctttgagttcgtttctcagagatggacacgccgatcgaagacagacgcgtctgagtttctacaggcttctgatccaattttttggatccaatgaacatgggtggtggtttgtttgagccgaatgccttaggcgggaatgtttctagagaagaaacagatgtatcctgattagatatgtacaaatcagatgagatgggatcttcgtgacgcgttttaaatgtgtgcttgagttctgacgaggatgagatattgggcatatacggatacgtgttgactgatgatctgaagcttgacgattcaaagaactgagcagatggtggtggtggcggcggtggcaatgacggtggcggcaatggtggcggtgatgaggccggttgctgagctgagaaggaatgcgacagtgaaggaggtggaggtggaggtgaaggtggaggaggaggaaagtctgaggggggaggaggaggagctagtgcactcgaggaagacgcagaggatggtctgacatgataggctgacggaggaggtaatgacggtgggccaggttgtgaagttgactttttgccttttatacctccagctttgaatgcaccccaccctcctatcgaaccgccagcaccgttcccaccttctaccacaacctttggcttttttgccttaggcactttgacacccattgctctcatcaattctttctcctccctttttcgttctttctcccgtctttcatcagctgttccagaggtcgatgctcggtgagctgcctgaagacctttcagtctctattatggtggataggattgaaagcggattgataagataagtatgtttacaaggacagagagaaagagaagggcatgacacgaactacagtgtgatgatggtcgtaactgttgagatgttcactcaactgagggaatgttatgtactgttttgcacaatcctcgcagctataaatacagccaaggcggttagcggccattaacattaacacctcgaactgaagagacgtagtgatattatatgcgtactagaaagccctcagggtatcagcaatttctctcttaacctctgtctttttcgcctcgacctcctgatgtatagaacatagacatccgtaaagtcagaacagctcatatgtggtgaggcaagaacaaaacgagagaaacttacagcgccccgagctctctcctctacactcatcccggcccatcgttcgctttccatatccctccgacctttgagcatgacctcatccatcactctagtgtcttgtttgagttttccaataccgagaccaggagcagcagtcttgattggaatcggctccgtcctgcctgttttggtgccagcgggattaagaacaagtcccttttcggatcgttgagcttctgatgctataccagatatcagtagcaaagggacgaacctttcccatctatccccaagccgactccagaccctttccagcccatcttgatcaagagcccatagtctaaattatccattcctagctctgtattcaacgtgacgatctttcttggttcgtaccccaacctccgttcttcgtcatcttgaatcgaagtttcatttcgagacgatgatccgttcgcctcgttttcggactctaactcagactcggatgttaaaggtgtttcatcctctgattcatccgctggtcggctttcaacagatggatagaggaaacccattagtgatcttatcaaagggtttttgtcttcgttcaaaggattggtctctacgtgtggagacagaatcaggacagatcgctcgagatcgcttacgtcgtatcgtgcatttaagctaaggctatatatgaatttatttgattgattttacctcgctttcatttcttcgaccgccctcactttgaaacgctgtacttctcctagggactcagagtacatttgtaataagaaaaaatcggcgtacgggtcataaaatatcgggactggcgagttcaagtgataaaggagaaaataaatatgaaagaaagttgaattccatggtaagaaaaccgcaagtggtcaggataaaatgcgacagaatacagtctgataggataaagtatgaggatgattatatagaagacaagggggtttgactatacacagaatatctaagagactaataaagaagaaacatatgaggtgaaaagtgttgagcttctctgagatccgctccctacgatttctgcatctgtcctgcagattcgggatccagtgcgataatctcacccatggcggatgtatcccagccattagcctcgaggtatgccttaaactcgatattatccctctccatataatcagcatcgatgtttggaatgaaaaagtatgtgataccagccgaaaaaatcgctagagcagaagcaatgtagaacggccctgttgcaccggcgtaagttccacttcctccgagatcggcgatgatgggtttaaagcaataacttccagcaaaagctccaacctttccaaccgcagcggccacgccatacagggtaccacggactgcagttgggccaatagccttggaggcaagaagaccaaggttgtttccgggcccaagttctccaaatgagaggaaaagtccgtaaagaaccgcaaaggcggcaatgttctcgtgtttagttagggcgttgtacgctccggagagaacaaatccaaagatagcctgtgcgaggaggccaaagatcatagtgtttcgcgggcctagtcgatcagaaacaaagattgctccaaggaacgttccaggtagataaaacgcgttcacaagacacccccaacccaaagaggtatacagagtgctctccgaatctgcgacctgacaggtttgttgaaagtagtcttcaatcaataaaaggaacatctatgggaaaggcagaaaaagaaagagtagaggagcctacagagataatgacggatgaatagaggccaaatggatagacgactggaacgtaaatataaaaagtagtctttagaacaagtaggctcactcggacacatgaggtcaaaatgagtaaagaggaagcagatgagatagctcactccaatcatagatgaaccagttcaaagagaccgctgcgatcttaacccagtatctcctgatgataagcatccaaggaaccttgcactttcgcatgctacagtcatcatccgttcatcgttaggatgttgtgaatgtggatcagatttagcgtaagaagaaacgaacttgtgcatcctgtattgctccggttcacgcatcttgactcggaagtacctgtgaacgaacgttggatttataaataacagacctatttccggttgtcaaaggggttatttctttttacccacaacaaaagcagaggggggacaacacccaagccgacagaaatcctccaaacagcacgtagatggttcattccgcactaagatcaatgaaccgacaaagtcatctgaagtattttgagctaggaaactctagatgttgaagtagtgcgatataagatagagaagcaaacggacaatccagagaagcacaaggggcacaaatgcagcgatgacgaatccaagatcaatcatcgaggatgtagcgagctggaacatcatctgtcgtctcatcttgggcacgccttttgcttcagaattctcggatgctgccacagactgttgaggaatttaagtatattgactattgttaggcacaaacattttaactggggcttactccagagggatattctgctccaattcctataccggtcaggaatcggtatgcaatcaacgccttgagcatgcctggaacggaccctcctgctcctttagcgccggcagtaagtgcagtgaaaacaaagatgatgaccgtagcgacaagcatgcccgcttttcgtccgattcgatcgctaatgactccaaagacaagcatgcctagatagatatatagatgagcaagaggttcagaaagcgcaattataaatgaggaagaagcaacgaaccgatgacagtgccagcgaaagccattgatgatagtaactgagaatctgataaattcgatcagaaattcgttagtgagcaaggtaattcagcatacattcgcacggacggttttctaaaacaagacttacaattggtgttagccatttcctcggcatacaggaccccgaggatggtgttcacaggcccgataacctgtagagaaatgatgggacgttagcacctgagtactgagatgcgttctcagtagtttgtttctggtgggtatacttacagcattgacgtatccgtccgactgtggagcagatatcatgtatccacttctcgtgtatcagcttatctgacgacaaggctgaaaacggcaggatgatcatacttacgaacaaagcagacccacaggctaatgcaagaacgatgatgtggatcaaggccataggaacaagatttagtgatgacaaaaaacgacagagaacgagaagaaacccaagagaaagaaaagaccaaagcgagcactcaccgaagattaaaccatacttgcccaagcctagagttgtcgattcttgatcatccaatatagagccttctgagttgaccttccccgccggaggtgcctctacatgtttttttgagagtggccacatagagcgtgatttatcgggatgtaacttttatggccaaacactgtttcctcgttggacgggatggaagttggatagtaaagagaagggaagaaagttctcttggtatttcttttgacagtgaggctaaaacaagagattgaagaatgatctcaaaagcaacggagcagctccgaaaggctatatttagaacagatacacgacgtcgcgcgcttcgatgactattcacctcccgtcctctccagctccatctggatctgtttgcctctataaaagtaaacgtgtttgatcctagcaccataggccttcaaacagcaatatggaaagacgagtattcctacttgtcgacggcatgttgggtctgagacaagaagtaaatgatgaaagaaatttaagtaggacaaagaaaactaaggagggcgaaaaacagtgcggggagaagtcaaattgagcaaattgttggattcgggtccgtacagtttgaaaaacacaatgacagccagaccaattcaatcatgttctctgcttcgaaccatggacgacgctctgaaggatactgtcgcttcggccgacaatgagtcctgattgaacttttcaaaggataaaaaaattcactctcagaaatgctaggatgtgtacttgtcgcgtcgtatcctaatgatttcctaacatcatgtcacctatgagatgctacatgttcagcatcaaaagggtcgtgtacatcacacatattccagatcagatacaaaacagtcctgtagtgtaaacaatcttcctttcgactgggtaaacacgtcgtttgaagatttccatcctttttactccttctacttgatcacccgatacaggtattgtagggaagcggccaaaatgaagaccatcagatgaagactattgtctggctatccagtctgataagagataggctaatgttgagtgttatctaccttcaggttatgcgcgatgcttgacttgatggcaggtattgtgatttagtaaacgtggtgtaataaaatgatatcaaataagttatggccctgctgtggctctcagctcaggccgttaaccctaactacgtgttgaataaacatcatctctcgggccgtcagagctaacctttcaccatctttagaaacgatagcctcctctcagtaattgggaagactcgttttgtagaccatgataccgcttcaaaccctcccttgcttcattctcctcgtggcctcatctatttctcagactgctctttctgcaattgttcctgcgttgtcctcatcatctttccttgaagctggtgcctaccctcccatccgactcgtccaggcttggaaccctgaagtaggcgagaatggaagttggctcatcagggctttagaaatagataggtgtgtgctaacagactggaggtttatcgttcaggaatattacatagctgatgtttattccacctcaatcgaactacttgaaaatgggtgcttttgactctaatagcccggcttctgatacatgcaaacctgtcagctcaatctcatccgaaaagattatttcgctcatatcctccaactccgcattccagtcgggtgaacttgagaaagccgagggagaatgggttgaacgagaggctggcgaaggtatcgaagaaacttgggctcgagctgtacgtgtctcccaagatagctttcgagcttctcgcacagcttgaagtgcacaggcctgatatcttgtatcgaacatcacctgcttctgtccgtacatcctatagtgggcaaaaatgggcagctgcctgttaggatcggaatcgactaacccggatgatgtatgttcttcgtcttctttctgcgattattgtatgctaagagattgattcctataaattgttccggatataggttcccgttttctttgatctcgcccatcgaattcaccaaaagctccctacattctccattttagacgattccgatgtaagcagtcagttcgataggtgtatcacatcaaaagatttgacctatactgatttcataatcacttgggaaattgtatctctagatatcgcctgccgaggacacgtcctatgaactttccgagattttatcggtcatcaagacctccacaggttacaatgcgctcgtctgtctttctcttcataccattggatgttgttcatgttgcgtcaatctagcgtgctcatatgctgatagtttgactcgctcaactgaattcttacagcttacctgtgccgatgatctctcaatccaatcaatttcatatcccatatcgctttctggctctcgtgaatcaccagatttttcgcctcgagaaccggcctttcacgatgcatcttctggttgcccttcttctggtatcatgtgtgtcatatctcctcatatcagtcgcatcaaaaagaaaacttgttcaggtagacttatttcgaccttaaactttcaaaagataccacccgtcgttactttcgctcttgcccaagaaaaaccctcagccgacgcacacgtgggatccaatcttccgaccatctcctcgaccgatcaaaaatattccaacgcctcagatagaaccgactaagaagttggacttcgtgtttggtaagatggagcgcagggagaaggacaaggagacacaaaaggcagactcacctgtctggggcaagcgagaccgtgatgaattgtagtttcgaagcgaaccccattttaatgttgaagagccatcaattcttttggattcttgcccgtttgttgatgtcactatacattttctatacgcaatgaagatgctgtgttcagtctgtcttgccatctctatatccgactacaagatgcatgattgactcgccaaggattcacttggctgggcaaagtcttatgtgctcagttgttgatccatttccttgccgcgtcagacttgtcctataaaacttgcggtgccttctctcctctcttgtacgtttcacctctcaccgccctgaacgttgtttctagccttttccttgaggttcctcaggggagcgcaaccaagagagattgattaccaagcccttatttcctctatattctcaagccctttcttcatctctgacttcttggtcatctcctgttttgtttttgtttttctcacccttctcaatcgaaagctgatcactgatgtttacttactccggctttgctcggatgtctatgactgaccaaaaccgaaaacaggaacttcattccgttcttggaccttgaccacgtctctatcctgtccttcttcctactcttttcccttcttctaatcctttcttcttattttcatctcttgtctggctcactttatccgtttaatcttcgggtaggtcggtaagaaggaataacagaagaacagaagggtctactcagtttcgaaatctgaaaggagacatcaagatctctcgtattcgcatctaccacgttcaaagaaaagccactctcatactttctttagacacatacccactcaaccgtcactttctcttagaaattcttcccttcttctccaaaatcttctgtccttcctttgtgtattcgtagatggtatcaaacaacaacccatgttggctagagtgagtcatatagttgttttcctgatcgctttgatcacagagtagcataagtctgactgatggttcggcgtgcttttttcgaacatccaaatgacagcggagatagtccatgtttgttcgcaattctcttctcgtcattcatttttgacagatatcttgcccttcaatcggaggaggttctgctaacagttatgtttaatgtctggcgtgaattttgtgtagggtcgcggagtattgcatatcatggcgaactgtgcatcaattatggaacgacagacttgattgtaggtcgaccgctgcttattctgtcagttacctgtcttcaatttgacagattgtttcttcttcgaacggtatgacgtagactgcatgtgtcatgtttggattctgtgagtgttatatcacgaggtacataactgtctgaagctgagcttgaactgacctgggaaagccttcctggattatagtaggacttcttctaatcgtggtcgggctgatctggttaatccgacactctcggcaagtgtgggtgtcaattatccttgaccgtcttctccccatgtccatttagctggagtgcatatgttgacgctcagcattttttccccatatccttctctaaggaaccggtttcaagcgttctggaatcagagcgcaagtcttcccctgggtccagcagatgaaccgggcgcatacgagatgaaggttaatctatcggacgtgtcgctctacgatcagccatcggcttcttcctacacttctccaaccggagggaacagaactagccgaataggagttcgtcctaagtacagcgtgcctcaatctacatctaggccagcctcactttatacgccgtcccgaagaacctctatacatatctcgccgaacccgtcaatgaccgctctgcccctgaacacactaggaggagaaggagaaggcggaggagcaccaaatgcgggaagatcaacattcgctccagtctctccgagatacaaagtgccgaagagtcctttgagcctaccgagtgcgggatcaaggccaggtgagccctacaatgatcctgttccaccgatgcctctgatgtcgagggataataggatgatgctaccaccaccgttggccatgcctgctgctcacgagggttatagttctgggggactgggtagtccgacgggagatggaccacactttgtaaagtaccacggtcctcataatcaccaaggttggttccaatcatgctttcctttgtctgtaatgtgaaagatgaagaactgacgtattgaaggcgtataaattggctgaaggtccatataccgcaccctggatgccccagacgtttcctcggatgccaatcgtccaacctcgggttctatctgggcctaacggtaacgggcaagcgtacggtcctggaaacggaccagaccttggccaatctcgttcaccgctagatcaaattcagtatggggtagcgaacataggctcacctcgttctttaacgacccaagatagatcgtgagaaccatgaatagatcgcccgctagtttcgtctcatcgtatcaacgtggcatcatatggttcatcattctttcacacgcattaggtttcgtatctctctttctttcgtatcagatgcctctcttctatatccggacactttccttttttaattttgattgcttgtgtcctttctttttgtcgtttcgttgtcagttgtaacactctctggtcttatcatatataatgttgcgaaagaatgatttccagcattctatcgtcccagatcgctgtgatcataaacttggcggaaagtagaaacgtgggcggagacgagaaataagatcttgggaaaacttggaaaatacttcccataatggatctggttggttgacgtgtgtgtgtgtgtgtaagcaagcctcaagaaagcggaactggttccctttgctctggcccagggccgaattgactttgcatcgtcttgcagcgggttcagtcttatttttacacgtgccatggttactgggtgctgcgagaaagcaagaaaaggtttattataacttatctctcggcgagattctcgcttggccttggcggcgtattccgctcgctgtatttttcctatgctgacctcttttttctctctcttggaacgggtctgactcaagagtgagggcatctgaggttatagggtgattgactggaacgtttctcaactagaactggggcttgaactaggcgaacgacatcgagtggcccttctgctggatcctgagtagccctgatgataagcaaaaaatcccaattcagaaagagaataagagcgtcgtgctaggcaggcatcaaggccgcgtctatacagatcgggcttgacacagcctgaactgaatagatatatacagggccatccaaaattaatattttcttggcaaaatctcaccttctatttcctttttttctctctaaagcttggctatttgccttgccgtcgttcaaagctgggcagtcgaataggttataagatccatgggggaggaatgatcttcttgttcaatttaccccttttgcccttcttgctcatactcaaagaaacagagagatatcgacacatatacgttgacgcacatacaagataagcccgatcatgttctgc

SEQ ID NO: 1411 - DNA, 5470 bp, Xanthophyllomyces dendrorhous
ccacccccccaacgacatcactttccgaaccggcatccggtcccgcgtctgcttccgaacaccctctcgctcacactccaacgcagcatcagcaacaacatcatgctaatgttgctctccctcctacccttcgagagatcctcgatgccttctctaaagatggaaatggagatcgagagctcttgctagctatcctaggcgcaaaaaaagctgaggaagacgtgagtttttccctgtctccacaaactttctctcattgtgcttcccaagttattcttagccattttcaacactcgagcgctgaccctggttctttgttttccccttggcatcattgttggcctttaatccttcctgcgacctcctttgtcttgtctgctttgtttcgacagcgactggcatctcaactagcctgccagtctcaactatttattctctcccaacaatacgcgcaagctcaagcccaggctcaagcgcaagctttatattaccaccagtatcaacaactttgtgtggccgagtcttcggcacagcagatgcattcatatgcccgaccgaatggcgaagctcgacaagttacttcccccactgattcttctgcactttcattcccatctccatcatcgtcatctccatcatcgtcatcgattgagctggcagactcgacgagattcaatccataccgaaggccttcttcactttcggactcaggttgctcttctcaacccgctcctttcgccttcgcttcagcctcggccggaccgatctcattccgaacaaacaaattagccagaatacattctaccctccgaagtcgtcgccggtcctcgtcgtctgtttctgctatgtcattatcgactgagatccctgctgtctcgaccacggtcaccgctccttctccctctccatcgactcgtgtgaccccaccgcctacgaatccaaggacgccaccagcgatgtcttcatctgttagcaaacgagtctcgcttaccgatctcttatcgtcttcttcagagtcgaaaaagccggcgacgagggagagtttcgtcaggggcacacccaccgacggagagccgatggaggatgatgacgacgatgacgacgacgagtgatctttctcgtttttttttctccggagcttcttctatatttgtttgggttgcatttcttttgagttgttgctttttttttgccctgtgttgtacaagaaccttctttcgccaaatgtgttcttggttgtatgcctattcagcttatctagcctttctatcgaatctattactgctatgtttgtatcaatgctatacccctgctccaccgaatcttgtgtctcttttttctttttttttgtggaaaaaaagaaagatgagagatgcacacaaggatatcgaaagaacacactgagaacgatgatttccgatcgtgagggggactcgagggggtggtcccagagatatcagttcgattggcagactgtgcgtccattcgtagatatgaacgttcttgtctatacgaagtcttcaggtcaacctcacagccattcattcattcatatatcataccataatatttgtacacgtttctccccaaatttccaagtgagtccgggatggagatgtgatcgaagtctagtctaggtcgaatcgagatctatcctcgtctgtttggtatcgtcagccggggatagacaaaatgaatcgagggtcaagtatcaaaattaaaccaggtcagcgtccatcacaacaagatatcacatataggtgatgtaaataggtggattgtgagaagtgtcaacgaacctcgaaaaagagactgtccatctcaccctcgtccttatcagctaatgctacgctccctttgagttgaaagccgctcgtatctagtgcgagtcatggtggaaaagacatcgttgagagagggcttgatcagatctagacaacaggtgtatttggaacacactctaacgcaggaaagatagtgggagggaacgtacagacggcacgtaagagatgaagatggagtagcctactagagatctgatgagacccagagcccgaaaccccttgataagaatgacatgttcaacgcttaatagtcagttcgttcaccgttatatctatacagtaaagaacacgagcaagatagaacgaggcaataaaacaccaacagggtgatcctttaagcttgagctcatgacaacctggttctttcgccaatgtgtgtgaatgcttgattccttgcggccaagcatactgtcagtctcgccacgagtggcagagaaaaaaagttagaagatcggtccctattgagataaacaggaagtgaatgtgacacacgttcacgtgctcctcaacagaatttatgactgcctgaggagcgtcaatcagccagatctttgagtcttcctgaaaggccatcgaaaagaaccgtgtgggaatctggaaagagagaacgatagaaagaacacaggagtatgagtaatcattcgctcccagaaaaagtttgaccgagaagaccgaggaagacagagatgacaaacttcagatgctggacttttgctgtatttaagatacaaggtatccttgctatacgaatcgatcccggcgtcgatcgcggcacaaagtatatatccctctttggatagagcagaaagcagctctgacattagtcgtctcactctgaaagtatcgattatatgatcagaggaagagagcagaagtacacggaaggggtttgcttaatcagccctcgaggataaccgattacgcaacggtcaacgctcacttacgccacactgtcccgtactcctctagatccccaaaccatacccttcatttcgacctcccagacgtcggtctttgtttcacctccgtcagtcttgatggttcccgattcatgattcttggggtaaccgtaccgactgatgccatgaggccaactgtcctgaacagcgtgcagaactggcttgtgagtcgagtgtttgatgttgatgaactggaggacgttggtcttggttagcgcactggaagagaaggacacaagtgtataccaagttagatgagtgattgataatatgcgggcgattagtgtacatccctaggttggtttcgaaagaactagatacataacacagaacttgacccacaggatagcgtagcagcaggacccctgtaggtcccttcactccatcttcttgagttgatcggatgagctgttgctcagagagaacgacgatcgttgttcgctctgagaggcaccttgagagcttgtgatcagagcagagaacccattattgaggtctgcaagcgagctcgaggaagagaacgtcccgttggatggtcgaaggatggatttcggttcgccggacacagatgagccaggtgaagtgactggcagatttggaggcgggctcagcgacaaggtttccgaaggaggagactctcttccagatccagtcttccgagtgtgtctatgaagaaacgaaggcatcagataaacgatatctaccaggttattgctcttgggtgggatggacgaacgaataaccagaagatgagcgcgatgtcccaaagatgaggtcagcaatagacacgcgcagcagcttacataatcacaaagtccagaacccccgtcagtacacctaaccaccagcataaatccccaaccttttacatccaacagatctatcgatttttgttctcttgcctgcctctgtcttttcttgagcttctcttcttcaagcttcttcggctcaatggcttcttcaacatattctgcaaagttcttttggtgcgtcgttatttttttttcgtcatccgtgtgtgttgtggctctctggcttcagaggcctggcttctctatccccattctatctcttgtctctcgaccgcacttagttattcgccgcttttgccgcccctttcacatcatcgatctgtagcttacaaggtgtcgttttctttgcatcgttgaccatcgatcaggccggatgttcatcctcattctgtcattgtgacaggcagcttcgacaacgtaagtcttgacaagcgtacctgtcctcttcgcttatcacgatcaagagatggatgcgacggagcggactcagtaccgggtgctaaggtttcaaattcgcggctctctttcttttgtcggttcgaaattcgccctctttctttctttttctttcgggtcccttcctgcgacgcggccttgaaacaccgggtcacagtggtcaggtaacacacatcatctccagaaacacgaaaccgggttcgaggccgtcgtggaactcgaatacaacaaggcctacgagttcaaatatggtgagcgttccttttgatctcgcaggaatttgcccaatcgttgacagtttgcgccattctttctcgggctggggatgtcggccacagtcgtggatggaagtaagttatcatcttggtatgaccacctatctattgatttgttctaatctgatcttatctactccaaccccgttttccatcgctagattggcaggctcgggaggatcaagataaggagtggggtacgtttctctcatctcaactccaagaaggaaaaacagaaacagataaacaaacataaacaacatagatggcttgactaataccacatttcggaactgtccctgccatgtctgctggttgctcttcctcctcttgtagattcacagggtaatatgaacaacgtataccgaacgccggaagcgcctgcgacgacagaagagccagtgcattcacctatcgttgcgtcgaacgctgttgacagctctgctattgatcagtccagtatgtacatattcatagctcaatcaatggttctcttctcccaatacatgtgcttagatcttctgaaacatgtttgttgcatatgttgattccattgctgcctccctcagatcgagagctcggcaccaaccaccaaaccattcccagccaaaagcctgcttccatcacctcggccaagtcagtcaaggatgcagagttgacaaactcggctcccctacatgcgaatgagcaagtaattccggagactaccgtgacgtcgttgtctaccgagacagaggtcacgcctgctcaagatatcaagaagtccacattgtctgatgaaatctcggacattacaaaatcaacttcgactgtcggcacgacttcttccccggttgctcctcccgctccattcgatcgatctgacaaggatactgtcatcgttcctaccccggctcaggcgttcgcccattccgcttccaacacaccgtacgatccgaatgccgtcaccgggatcggagcgcactctgcaaccggatcttctgccgtgcaagagacgactcccaagcttgagcaaagagagttgtcgccttctgagcatacatcctatcctccaggcctcggagcaatcatgggtggagccaagggcactaactcgattgctgataagaatttcgagtcagaga

SEQ ID NO: 1412 - DNA, 9211 bp, Xanthophyllomyces dendrorhous
ctttttttaatgtgtcattgttgattatcgttttttgacaagaaactcacgacaacggaaacgctatacacccttgaatttcattcgcacagaggacggtggagtatattgacgatcataagcttgcgggagttagtggctttagcgaagccgatacggactattcgagtaagggtgaagactttgcttattctgtcgcgtttactttctttatattagcgttctttccttaaaatttgcttgtccaaccgtcatcggatacaatgagggctgacgcctttttattctcgccttccttttcctccccgaatgtttcagtgcttgatgataatctctcatctaccgcgagtgagcaaaattttgagcatatcgcgtctcctaggatcgaggaagagcctttggttgtcgtccctcatcctgtgaagaccgcaagttctgccaatattgttccttcgtccactggcgatcagactacaactcgagcctcttttgaagatcctgcgcatcagtcctcagcctctgcggctgaactcgacatcccccctcaagatgaagatgatcttccttctcatgctaaagctgctgccgaggcaatcaactctgccaatgctgctcacccttctgctgaagatcctaccaatgttcctaccaatatctccgagagaaacactgatgagattctcatccctgccggttcaggtgatcccaaggctatggagcccagcaccactgtgttggagaagcaaggaaaagatgcggaggatcaggatgacaagaggaagcagggtatcggggctaacagctctaatgctgattggagcaaggccccgactacttcaagtgctaccactactatcgataccaattcgtcctctcaccagcatgatcagaagaggtctaccaacgagttggattcgaacaaggcctcagcttccaccaagatccctgctaccgctgtcgctgctcccagtgctgtcccgatccctgttgtcgttgcctctggcccttctcctacattgaagtcaactggcctgcccacttctgcatccggcacactctccatccctgagactcagaacattcatgcaatctcacagcctgcagggacaactagtgagttgtccacctcgagttctcatctgaaatctcctaagccgatgaatagatcggtctcagctgcctcgtccatccgagatgtccctgggcaataccctaatgtaggaagtgggtttaccactcagtcttcagagagcactcccgccagctcgccggccaagccgcaaaggactgcgtcagagcgagatgaggctgtcaaaaagcgcaagagcggcttatttggaaggattggaaagttattcggatcaaagtaaaaccgtgtctccacagaatggaaagaggaagcttgaacagatctttctgatatgataatttgggatcatctctttcatctttgggtcctttgctttgccaagtttggtttctctttcatctatcgtagccgttatttacactttcttttctttttctgcgttctttgttatcgtacaatctttcatctcatcctaatccctatctatggtatgtcttgctctatcgttctttattagtactattctctctaaattcttaacgttctcctttctcttccttctatctacttttccctcttttgttccttctgatttctcctcgtcgggtccttgaccggaagcgtcacttgcagcctccttttaaaagggttcaagacgatgtctgtctttgtcaatgtattttgatctatcctagcctaattctgtgtgtataaacctctccctatgatgcatgatccttgccgaatactgcgtgctcgtgtgcggagagcaggattaatgtgtcttggcctggccgcgcgtgtaattcctcggttgacctagagatctactacttcgcgtccttgctcggcttcgcttgaacatctacttttcaaaagataaaaatgatgattcgtattgaccaccgtacttctctcatatctctctttatctttgacatcgtgacacctcttgcctctcatcgaaaatatcttttcgtatatcagccatcgcccttcccaatctctctgcgctcaacaatatccattcatcttcgatatccgatcggaagcaatcgcctttcgatcttctcggctcgcttcccgctttgatcacaattacatcctatccctctcctatcaactctcacaaatttccagccgcttttttcttataaacgtaaacgcattgaagctcgaaacgaatggttgaaggtcgtatagttccggaacgaacacgccggccatggacagcgactgaacggtcgattctacactccttagcttctacttttcctagaggtaagcctgattatgccacacatttatctctatttagatagacaacgttgacattgcttccctctttctttcatatgcggtgtctcttatgtttctgtgaccacctataactcaaggctcaagacgatggtatgacgaaaagttcgtcgatgtattcatgatgggtcggcttagaggaataggaagaagcgtctcagaagtcatggcttggggtatgaagactgggggagaagacagcgaggatgaaggcgagagtggccatgcagataggtgagttccggtttgaacactgtgtttcttatcctctcccatggctggtataaaaaatccctgccaaagaactttcgaacgatatgtcgggtatgcaaagctaaaatctccatgtccgcactgcgcttgtgacctgtttgaaatctcagatttcatccatccaattttcccctagtcccatcaagtatcgagccaggcgcttcccgcgtcattgcccgtcgggctccatcgatctcttcccagacgtctcgaacattcgagctagctatcaacgctattccctcctcttctgctcttgattctcatcctatctcttccggtccttctggctcttccaatcgtcgccgaagagttgatgcggctgaatcaaatgctgggtcacgtcggacaacatcgctcgctcctttaggaccttcggcgtctacgttgtatccagaaccaaggcgaccagctcgtcaaccttccggtcgattcgtcgcgccagatgtccgttttccaccttcggtttcgtcctcgtctcttgctgtttcacccacccaaataggatctccagctagccgcaatccatcttgggcttcatctagctctcgaccttccccacctcagacaccccgtcccgtgtcgccgagcaggccatcatctccaacacagtcagcactctcttatctgaatgcgccgtcgttggtgtcatttccgtcaagaccggagagcgttcatggggagccagtagaaagttttggagcgctgccaggagggaatcatcgagccattttgctgcaacgcttgggagacgcagaggaggcagcagaggaggatcctaggttagcacaagctttaggagtcttgctggaaatgggttatgtaggcagtataggaagtgcagggtgagtagctctgatcgcttctatgctttgtaaaaaagcgcgcgagatcttttcagttgattggtgtgatgctggcgttgttgtcatttcatttttttttaaatctagaaacacgagaccaaatggagaatccgatcgatttgttttcgttcagagtgccccagttcatcatcttccaagtctttcttcgcctgcccgatcggctaccccagacgatcggccaacctcaaatcgacggacttcttccaacctgacatccacgactgcatccggatctggatctagtcctgcttctcgtggacgtcctcgaagacgtgctgcaggcgcaacaagacgatccactcggtccaacagggaacctgttgctctcgcccaggctaatccctctcctgcgtcaagtactcgatctagaaatagcgcggttcgctcatcaatatcagagctagtcacaggacatggccgggatcattcttcaccaacaaccgaagaacgtcaaacagaaaataggcaggagaaagaaggcgaagaagcagttgaagagccaattgatgagtctgacggtagaaatcgagtcgtctcgaaccctcgtcctagaagacgtcgaagacccgatggtcctagtcccctcgaatcggctgagagcgtgagcgtttcttcgttagccgaaacgacatcgtcctactcaaccgcgcgatcaaatacctctcttccgacaccatcacctgaaatagactcaagagtatcatcgcgaagctctctcctagccttggatacggtacaaccttctcaacattcacttattcagactgttcaggacgatgaagatattccaatcgctctcagaaggactcctaggagttctacggcaccattcgcgcccacatcggcgcgcatcggaagaacacgaaactcatcgaacgcttccagttcaactagtctctcgcagcctccaaacaacaggctttcgtctggattacccacgcctatcacaactgcatcagaacgactctctcccatgcctctcacaacttcttttccacccgtagaaatcccgaatgttgatcccgaagctcatcccgtttctgactgcttgagaacgtctcaagtttcacaacttattcctccagatgtttttcaatcctcctcggtgatcacagacccaatctctagcctatcgacatcaggaatgagcggtactcatgagagcagggccggagaagatcctctcagaaatgttccagggttatttgagcttgggagaggattgtttgaagggttcatagcagccccttcgtctgcttccactttgcctgttgtcaatggagagtttgttggtgaaggaaggggaatgaccttgactcgaagtcggtccaatcggtctaggagaaggctgagtacttctggaggtacgacggatcaaacgaacaacccggtgatgagagggactcgatgttcaaccgttcctcctctttcaactccatcagaatctgaaaccttgcctacgacgacgacggctactaccatgtctgaatacgtcgcgcatggaattcaaccccgcctgagaacatttttgcgttcagatcgtcctttgtcgactctatccacttcggctcgtgctatcgattcaacccccttccttcgcaatatccgacctcctactactcgatctagatcttccctccctagtataagaacgtctcatcctccaggacccacgacagtttcgaattttacttggactccgacgcagcgttcaacagtttcctcttcagtgacaacgacaatgacggcatctgcctctcaaatacctgcatctccaacacacactctgctctcgttgacatcaactatgtcgtccgaaaacgatctacctttggatcgaaatcctccaccagcttacgagcgttcgctaggcgagcgtgcagagtacgtcgcgcctcctccaagaccgaggcgaggagtgagacaaagagaggaggcgacggaaggaaatagtatgagtggtctagctgggagactacttggtggaggcacacttcgagatcctgacatgagacctaggaacagcatctcaagaggagagggtgaaggggaaaacagattgatggccagaggaaggagtctgagaggccttcgttgagagacgccctatactataccataccataccaaatatcttgttttctccttgcttcgttcttcattcttttcttgaggaccttcctccctctcttctcaattgcatctggactttactgcttctggcttcttttccttgtttactgttgctttctttataattcacctctctcttggtagtccatagcctcttctttctgtttgttttcatatgtccttcccatcctgttccaactctgctgcatcattatctcaactcgactctttttcacatgttgcttgttacactcattccatcattcacactcctttcatttccccttcagtccaagtcggatcgtctgcatacacaagatttacatctaacttgtatctttgttctgtcttatccatcattgtcttgcctgttattttctctatatatgaatgtcctcactttgcgttattctatttttcgtacggcccacaaggggtcgtttgatgttcaaaacatcatactttgactatatctctttaatacggtctcttatttttcttaatactttttccacacaatttccgcctaaacgcttcctccaatcttttaccctttccaccactccccccatcgcatcgaaagcaacgctctctggatccatctactttcgaaccatccagacaagtagatagtcatctcaaacaatcgcctccgaactcaaacgtccgcttgaaccatcactaaaactgaacaaacaacccagttgaggtcttcaactttcatagacccatcatctgtttaaagaaaaaaaatccccatctcgtcgccttcgttcttcagccaaatcagcttcttgactaaatctgcaacgctcatcttctgaataaactctcacaaacaatcagccgttgatcaatctctaccgagacttgactatcttttctacacaaacttctgtttctatctacaactatcgacaatggcatcatcatcgtcaacaaggttcgtctcgtttccttctagattcgtctctttttcttatccttctctctcctctagccacttattcatccggagactcgaatgtttttaaatggctgatttgtttttcatctatctgttgtgtaccatcaacaagccaatcctccgagtggaagtcgaagcttaacttgcctcagcgagacgctcgtcctcagactgaggtaattttcctctttttttcaacgcccctttccatcattctctcatatgtcttccttttctaaatcttcgttatcctcatcttacatgcgctcttctgacacactaccgctcttgatttgatcgtacaggatgttcttaacactaaaggtggtgattttgaagactacaatctcaaacgcgagcttctcatgggtattttcgaagccggatttgagaagcctagtcctatccaggaagaggccatccctgttgctctcactggacgagacattcttgcaagggtaagttttgcattctagttcacattttgtgatgatagaggaaaccttctaaccccgaatcctcattctaggccaaaaacggaacaggaaaaactgctgcttttaccattccttcccttcaaagggtgaatccgaaacgacccaagattcaggccctgctgcttgtgcccacccgagagcttgccctgcagacgtctcaagtgtgcaaaactctaggcaagcaccttggaatcaacgtaatggtgactactggaggtacaaccctcaaggatgatatcatgcgactcgccgagcccgttcacgtcctcgttggtacgccaggcaggatattggatctagctggtaagggtatcgccgacctgagcgaatgcccaacgtttgttatggacgaggccgacaaattgctcagtccagagtttcagcccgtcatggagcagctactaagcttctgtcctccagagagacaggtcatgcttttctctgctaccttccctctcatcgtcaaggactttaaggttagtctttgacctcgtttgctgcgctaatgtgcgatagttacacgtcgaaatctgtctcgatggcggtttgctcaaaccccttcttttcgtgtcatatcaccaactatacataggacaagcatatggtgcagcctcatgagatcaatttgatggaagagcttactcttcgtggagtgacccaatactacgcctttgtcgaggaacgacaaaaggttcactgtcttaacacgctcttctcaaaggtttgttcttgatctcatcactatgtctatgtcctggataggtctaattaccgtggtttggtcactcttattgtatcccacacagcttcaaatcaaccagtctatcatcttctgtaattctacgaaccgagtggagctgcttgccaaaaagatcactgagcttggctattcgtgcttctactcacatgccaagatgcttcaggctcaccgaaacagagtgttccatgacttcagacagggtgtctgtcgaaatttggtctgctctgatcttttgaccagaggtatcgatatccaagctgtcaacgtggtgatcaactttgacttccccaaaacggctgagacatacctccatcgaattggtcgatctggccggtttggtcatctcggtctagctatcaacttgctcacatatgaggatagattcaatctatatcgaattgagcaggaacttggtacagagatccagcctgtgccaagcgtgatcgatgccaggctctatgttgcgccttcagccattcaaatggatgtgcctccccaacagcagcagcagcagcagccgccgccgcagcagcagcgccagatcaaagagcagagccaggagcaggatagacatcggcaacaaggtcaacaaaatcagcagcggggaaacagcaatggaccgaggggtccatcgaacggatcgcggcaacttcctcctcctccaagtcagtagaaaaccggtagagaagttcacttttaactattctgctacctttgcgtctactgcaatctttccatagtagacctatcatctattctctcttatccttttgaaattctcatatttccctcaacatctttggattatcctttctcagcttcaccgcttcgaccccttaactcctttccaccatgcgtgttcctattttttgtcttccttctttctactcttctgtctgctttgggtctcgtattctacctcaagtgtatctgtctcttgctccctccatcaacttcccttcacttccccggccatccttccacctcttttgccttatccaaactatgatcgacagacaattttgtcgttgcgttcgtcatctacaatctctccacggtcgcctgccatcaagcctagattttccttaatttcttttggctctactctatcccggttctgtacgtactcatcgttattgtaggcttactcttcgatttctttttgaggtccggctgtctaccttttccttcttccctttgcgtactttcttcaccctcgctctccccatacctctacacatcttcctctcgccctttcctttcccttcccttcccctcctcccttcc

SEQ ID NO: 1413 - DNA, 2988 bp, Xanthophyllomyces dendrorhous
cccctcctcccttttcctctcctgcttttccatcttagctaagcttccgattcccgagattagcctgcttggaaatagctatctgagatcgcgcatcctgtatctgatgtttatgatcttaatctctccgcttcatccggcacgtgatatgtctagatctttgttgactgattgacaattagaagtgattaggctcagaaagggaaaatcgtaaccagcaaatgctgtcctcaacgccacatcgtaaccaaaccccggcccctgccaccacaccggtcttcttcttccctcttccgtttctctgcgttcacttcctaactttgcgcctctctccctctttctccaccttcacgccttccctctatcacatacagataacgacatacacactctcgctttcagacagacttatcatttgaccgcttgcctcaaagtccttcaaagaagaaatcctcgttgaactctataggcccctactgtcagtgttctttattgtcttcctttcaatctttgtttccccaacccttctgcctttcatttcccttccacttccgaaggattatttcatcatacatcatcagccagagaggagagaaaggaaggcttttgatcgatgagaagatccgacggacaatggatgagaagagatggccaaggagagtaggacaggtgcactttccgggtcgtgtgttcagatgggggattccgtccggcctaggctgttgtcagcttggatcgcctgaacacgtaccagaggagggagaaagaagggatgagatatgccgttctcacagcttgaagtagcggaaacgtcctcctcaacaactgttcttcttccttctcggaaaggattatgtgcttcatagaaaaggataccaggagtctgtagatgttgtttggggaagaccaggggctgtgaggacggtgcacaagattggtatatgggtagagaaagaaagagaagcaaaacgctaacattcctgacctcgggggtttcgttctcgatcaacaggtccctctttttcgttcccctctcttctctagccagccaatcattcttgaacatcgaatttcttctccttcacatcaaaaatggcagagaaccagactcctgaaatcgatcttgattcagtcatcgaccgactaatcgaaggtccgtcgtctcatctcgtgcttgccttttttgtcatactctgttctcgactccttccttccaaactcctatccgatggcttgtgatgctgagattttcgttgttacactgttcctcctctccttatgtctcggctttgaattcgcaatccgggtgacgaacttcccattctcaactgattcgaaaataaacatagtccgaggacatcgaccaggaaaacccgttcagctacaggaatacgagatccgatatctctgcactcgggccagagagatttttttgagccaacctatcttgctggagttgttcgttcctcccgttcctttctctccatatgactttaagccactcgaacgaggaagatctgttgatcactagatgcacttgaggggtcttcgacttatatataaacctttgttctctttcgtgtggattggatatattccctatttctgcgtacagagaggcaccgataaagatctgcggagatatccacggacagtactacgatcttcttcggctgtttgagtatggtggcttcgtacgtctccggtcatctattttccttgtctttttggcgacgagcaagcggatgaggaagcttactggtgatgccgtttttttctcccaaattcacacctgggcgttctttctctctgggtttgcttcgtatctgcaccttcctctcatcaaacactctgcccatatgttgtttcacgtggtcaaacaccctcctgtctgtctgcctgtctgcttttgctcgtgcagcccccggagtcaaactacctcttcctgggcgactacgtcgaccgagggaagcagtcgctcgagacgatctgtctgctgttggcgtacaagatcaagtaccctgagaacttctttatcctgcggggcaaccatgagtgtgcgagcatcaaccggatctatggcttctatgacgagtgtacgtgctctcactcttctttttgttgtttttgcgagactggagcggaagatggcccgaagatgatgtttgaaacgatctaggaaagtgagatgtctgaggtgtcggtgaggggtgaattgtggcaatatacttcagaagaggaagggaactgcaatccttgctcatcaacatctagccaagctaaagaaacttatatactcacgttgcaaactcccatcatggcttttctctggactaataggcaaacgacgatacaacatcaagctttggaagacgttcaccgattgcttcaactgtgtacgtgcttgatttttcttgtttttgattatgcaccctacctctaaataagcaaacctaccattcgactactgtttctttgtcaacctgaatttttggctcactcgttcccgctacccattgtttcatccaatttttggtcgcttcaaattgcgttctctcaacataagctccctgttgcagctatcatcgatgagcacatcttctgtatgcatggtggactctcgccagatttgcagagcatggatcagatcagacgagttatgaggccgacggatgtgcctgagactggttcgtcacctctataactttttcaaatgaagcgtcagctgttgtgacaagtggactaactctttttcacctatgtactgtcaaatgcgcggtggactctctggcatatacaggtctgttgtgtgatttgctttggtctgatccggacaaggacatcactggctggagtgagaacgatcgaggagtgtcgttcacgtttggtccggatgtcgtttctcgattcttgcagagacatgatatggtttgtttccttactttgtagattcttgtgcatctagctcaacgcgttggattagtgtac

SEQ ID NO: 1414 - DNA, 3478 bp, Xanthophyllomyces dendrorhous
ataacccactttgaaacataggatttgatatgccgggcgcatcaagttgtggaagatggatttgagttctttgccaaacgacagctcgtcacgttgttttcagcccccaattagtctgtccttcttagtccccaaccgttcttgttgaaattaccctcactgacgcgtgtctcacatcccgtttatactatcagctgtggagaattcgataacgccggagcgatgatgtcagttgacgagactttgctttgctcgttccaggtgttaaagccggcggagaagaagaccaagtatgggtattcgtcgagtaagcgcaaggtaatgtaattttttttggtctgtgatatgtggcgtgagtatagagagatttcgtcactgatctgttcctttacatattgcttttcttccagtagtaatgtgattcacagaacagacgttcattcaggaaacttgagccgtcccttccttcttataacccgcctgcacacactgtctcttctcgcgttctttcatcacttttggttttgttttccttcgatctctaccctatttctgattgcctctagagtggttcgacgatatcttcctcttctttcctcctactttcaattgtctttctttgattgtttacatactgttttcttctgcgaagactgagtcatggaggagccctttcttctacatcttgcgttggtatccctctatgaggtttctcctacaacttctttctgcaatcacaaaacctagttccaaatctctcaggtcttgaatttcttctgttcttcatctcttctcccttccaatttttcttttcactctctttacttttgcttctctaccctcattctccgtgatctcgaaagcctggtgtacaagtatggaaagaggaagaaacccctgtttgctcaatttttgatacactgagaacaagattgtgcacgaggaaatctttgtcttcttggctttgtgtccctagccatttgcctttgaagacttgcacgtagacgtgagctatcaacctacactgttacgagtcttgatagaggctgtaccatgtgagacgataataaattacttttcatcagattttcgtcctttatcaacacgagatggatgtgtaagtagcggcacacacaatatccatcggtgtatttgtttcgtaggaaattgagattgttagaagccaacgtttgagcaagcgttgtatatgctcatcgtgatatatagccaatgtaacacaacgatgctcaagcctggcatcctctctgaccagcttttccaactgaacctcggagttgagctggttgggacttcttccgatattatcaacctagcttgatcgtctcgttgttcgactttcgtattgagtaacgatgacatgggggttcggagctgaatgataaaagatcgggagtaaatttcaatgtgattatctgtaatctaatctctccgtcatcgatcgatctatctccctgcatcgcccatcgaagaagcaccttccatcttttccttttcctttcttgatatccatctttctttgtgactaccacacactcatattcagacctatacaccatgaccaaaagcgatgcaagagcatgggtgactttgttgactaaggcatcatacctgcccggagtagttcgttcttcctttcgtgcttgtcttcaatctcgtcgtttccattcaagctcatcagtcttgccacctttcaaaaacagttgattctacacaaatcgctgctcaaatataactcaaagtatcctcttctcgtgattatcacaccaacggtctccagtgaggttcgggaagtcctctccaaagctgaaatcgctgtaaaggagatagagtacctggagccaaaaggcgaggtcaacgttcttaccgaacgattcaaggatacgtggtgcaagctgagggtatttgagttaacagagtatgaggtacgttacttgtcttctcattccagttttgtaagcatgtcttttttattgagcctgttgaaacaacgcaacccagaacagaaggttattctgcttgatagtgacatgatgcttcgaaagccaatggactctctattcgatctgccgttgcctcccacctggattgccgccaaccatgcctgtacatgtaatccaactaagatggatatctatcttcctgattggtgattctctatcatttaaactttcgcatatacattagaccgactcatctaatcctttcctcacaatcatcagtattccggaactctgtccgtacactccgctcactcacccatcctgtctggagaacccgacgccggtgaatgcagattcaccgagaacccacacgttactcaactcgggcttagtcattctatacccttccgacaaactcttcgacgagatcaaggaatttctgtatacaagcccgttaatcaaggtgagagacatctcttcttgtcttcatcgcgtttctgttttctcacatcaattattcgagggctgtttcacgtaggaaatggcctttcccgaccaagatcttctggccgaattctttaaagggaaatggaagccaatcggttggcaatggaatgcgatcaagacgctcggatggtacgcctaaggctcttgtcaaccttctcttggcatccacataaaacgtcatcagctctaaattccatcattctaaatctcatcttcttttcttcatttcaacaggcttcacccagagatttaccgagaggaggaggttgttaacgtaagggtcttggtggtctttgctgtcttccattttggagtgatactgatttgtttcttctctgtactgaatctatgaattctcggggattcagcttcactacatcgtagataaaccatgggaagggagacccggtccagactcgcctgatctcgtcactcatgggtggtggtgggtggagtgggacgatttgatggcagagtggacaaaggatgagaacaaacaaggcgttaagcacgtcgtagaagggttgattggagaatagaggggcgtattcgggcgtaaaagaaaagagaaatacttgtttcgagtgttacttgtacacgtatagaggatgtgttttgaagtttcatgctgaacaagcaactcatctattcttatgtacagagatgtttatcttaattgccaaaatcgcaagacgatcccagcagctttccaacctgctccaagccaactctatcttcatctccgaatgttcccaacctgacggaatccaaatctaacacgccaaccgtccttcctttgctatcgatcaaaggcaagacgatctctgatttcgtttcgccatcacaagcaatatgacctggataggcgtcaacatctttgacaatcataggggatgattgaacgaaagcatcagcgcagacacctttgcctgcttgaggattgatttgctggcaagctggtcggccggcaaaggggccaaggagaagtaaatcgggcgaacccgaaagca

SEQ ID NO: 1415 - DNA, 451 bp, Xanthophyllomyces dendrorhous
atataaaatcctgtaaagaaatattaggtggaaatttattttcccttgcgttagacagactcatatgaagaagcaagagagaatggagattaatgaataagcagaaaacgaaccacaccagttgacgattgggtcgccttcctccgtccgtccgaatgcacggtcaccaccgaaagccatgaaatggtgatacatcagcgcacttgcgttgcttaggttagagatccagtttgagtgggcctgatcttctaagagtggttgtaatgattcgagcaagttggcgtagaacgtcggcttgctgttttctcaagaccgaggaagtgatcgtgtgagcggagaaagctcgagatgactgccccgagaaaaaacatccaactcaaaataacaaaaaaaaaaaaagggactaactcgaccacttcttccggaatatagatgtcaccgtgaggcatgt

SEQ ID NO: 1416 - DNA, 3802 bp, Xanthophyllomyces dendrorhous
accgtgaggcatgttggatgaatatatacaatctcaaagatggttggatgatggtgatcaacggtgaggttgatgggataatgggctaacgggctgatgggaaaaatcaaggctcctgaccacgtgattttgaggctgtgctcaacctccggccaagctgtgacgagccgcctcccttgttatctcggccgcctttaaagatctccatcatcatcagcagcagcagcggcatcatcatccaaccacaaacaccatcttggccatctctatatcctgttgagtcgtcttccagagttctcctcctaatctgatgcactacttatagagatactcctcgcgcagacatatattgctgttccgtttgtatctacacaactaggaaaacaccatagattgaacccaagtccagttctcctccttcgctcagactcgaacggcctccaaatcgcccgcctcttcattcatctcgttcgtcgagattttgcgatatatataccaacttgatccatccgcacgtctaatctctagaacaacagctcccgaccagcgatagcttgcactatcttgatctatacttgtctcccttgcgttgattctcgcatctgccccttttagtcctcatctacctctcttcaatcaagacctttctctcgatgtctcatactgaggaaccagatcttgattcaattatcgaccgactcctcgaaggtatgctcttgatcattctttctctatttgtgcggctctcgtatgaataggccatcatacgaagtttgttcccaaacttctcgcgagcactggctcgcgaactaaccaatttagccaaatctgatctatgagtcccacaaaattttccatgcaaccgcgctgtgcccaagtccgaggggccaagccggacaagattgttcaacttcaagaattcgaaaccaagtacttgtgcacaaaatcgagggagattttccttgcgttcgtagagtttcctcgatttacttggctcttattatgtttgcgcactcacccttcgagtggctcttcttcattacaaaccgtgttgacactatttacacgtagtcaaccgatgttgatagaattgtaaatgacccctctctgtcaatctttggttttaattctcttgaaaaagcctcgacgtcaagtccgcacgcttaaacgggcgatatcattttgatctcttaatcttttgttagagaggcacctattaaagtttgcggagatattcatggacagtactacgatctccttcgactattcgagtacggaggatttgtaagtagatcttcttagtatttcactgacttttctgattgcaagtattcgacagaaatgcagactccgccttttgctcatcctgcatccatctgcctgtctgcttttgctcgtgcagcccccggagtcaaactacctcttcctgggcgactacgtcgaccgagggaagcagtcgctcgagacgatctgtctgctgttggcgtacaagatcaagtaccctgagaacttctttatcctgcggggcaaccatgagtgtgcgagcatcaaccggatctatggcttctatgacgagtgtacgtgctagtcttctctacgctttctttcatttggaccttcataaactgtatacgagagtgaatcgcacacgcatcgcatgtagtagtgtgtataacaccaattctctaggtttaacagcggttgactgattgggtattggcttgtcccttcctgtgtctgtcaatctttcgttttagacaagtaggtaaacgaagatacaatatcaagctctggaaaatgttcacagactgcttcaattgtgtacgtacctctgagttctctattatttcgatattcgtcaacgccatgacaccgatcctgaacatctggttgttttctatacatatctattgtttctgggtgcgcgctgagtcgttcagcttccagtggcagccctgatcgacgaaaagatattttgcatgcatggtggtctctctcctggcctgcaaaacatggaacagatcaggcggatgatgagaccaacagatgtaccggatacgggtttgttctgtccttgtatcatcaggcatccttacccgttctttctttccttataaaatctatgatgctctcttttatttctttcgatatgtcatatgtaaattcaggactattgtgtgatttactatggtccgaccccgataaggagatcaccgggtggggggaaaatgaccgaggagtgtcgttcacatttggcccagacgttgtggctcggtttttgcatagacatgatttggtaagcttatccctcttcccatacttctttcaggatctggtgacttaaacagcgattttgatgacggttgacgtgattttactttctttcttgcgggcggtgatgatgacttcttaggacctgatttgtagagctcatcaggtggtggaggcgagtcaacctgattatcgttatatatatattttcaatctggtcagcaacatactaattcaagctatttcttgtcatgacctataggatggatacgaattttttgcgaagcggtttcttgttactctgttctctgcgcccaactagtttgtcctctgcctcctgattttcatgattagttcacttacaaaagtttgctgatggtatcacacatttttcttcggaacaatattgccttcccaatcggtgtatcatctctgtatagctgtggcgagtttgataatgcaggcgcaatgatgtccgtggacgagactttactttgttcctttcaaatcctgaaaccagctgagaaaaaaacaaaaggtccgtatccttctgatcgatccttttcattttgaatgttactctctggagccttacgttctctcaatttcatggatgtatgatcaggtattgcgtccaaaccggtgacgcctccacgatcgaagaagaatctgtccgtcagataattcctcttgcatgaggcttgaactttgcttgctcaatttccaactcgtcggtcgactgcctccagtgtcgtgttctctcctcccctcctctcctccctcaccctcatactctcgagacggagtgttacatataatcaattctagtctctcattatcagccgaaatcgactataccagtttatcacctttattcaaacatggactcttctcgctatctactcctaaaattgctccataaaacatttcttcaaccgcatgtcttgtctgaccttgtggctttctcagatcgttcggttaagttctgctactgatgggtgattggattacgtttcttttcttttcatttctttccttttcttttcatttctttgctttctcctttcttttctcgtttatttcttccttcggtgattgctcgatgatcgcaatgaacgctttcagatcttgtctggtcgtccaagattcctctgtcaactaatttatgacgaaaaagtcaaagagcacggacactgaacaactaaaacatatatgtgtatatagggacccaattaaaattccttctggttaaccaatatatctctcacgtatcatttaaaagggatttcttcgtcctttttgagtctctacgtctatccttgataccaagagaatagagggactgaaatatgaattgtaaaggaaaagaaagagaatgtgatggatcaagtcgttgtgagagagggtgttggaatagaggaatccgtggagattggatgagacccgagtcgagattttcggtatgcccaatatctaaccgcatcacaaaacccgcctcaagaagaaatatgagatactgaacaaattatcc

SEQ ID NO: 1417 - DNA, 5841 bp, Xanthophyllomyces dendrorhous
tatttaaagggaactgcaagtcagtctttttcttcttacgcttatatgagatctggcggaaagaaaaagaacgaagaggatttaccctcggagataggcccaggaggaagtgttgttgggaaccttgcggatctgatccgtagtataactgaataagtacgttattgcccgaaggaaaggaatggtgaaggcaaggatgagtataagatgcaacatcttgtctcttaggttagaaggacataatgagagaattgaagattgacgaactcgatctctcgcgccaaaccatcctttcctttggctccctctcgtccgaagaccagaaaccatctatgagtccatgcgctattatttctcacatcaccagcacctctcttattttcctcgatccattcatcgtcttcctcttcgtccgaaccatgattctccattatgacctcgctctcctcactctctcttcctgactgaacaaccaataagctctcacaccacgcgagttcatttgtccagtcttcttcggtcaaaatcggtccgaaatgggtaaggacgtattgtctgtaggcccatgtgtggtaattctttgcatcgggttctagggatgtagcgataaagtcgagctctcgatggatcgtcgaaggggagatcggagaaggtagatgggtcaaaagaaggagccgatgatgcctgtaagttgaagagatgtcaaggtatctcgggtgagctgtcaccgagaacgatcttcagcaatgtaaaattggagagaaacgaaccagacttggtaagacttcatgttatcctcggccagctcggtcatcagtcgtaactcgtcttctagcgagcgctgaagcttcatcaaggttgagaatcggtactgcctacgggcatcaagatacatcaaagttatgtttgaacagaataggaaaaggtgtttctgttttgtaagctggcatctgatacgaacgaatgaaagatgaaacaagaaaatgatccaatacggaaacccgtaccagacagtatagtgagcagggttcatcctgatgactctcaatgtcacctccaacgctctgtccgagtattcttctaaagcagacagcgctctaaagtatcccattgcatcttgatctatgtgtgtataacggatgagttccaaatgttctcaacatcaaaatgacaaaaggatgaggcatcggacaagggcgaagagaagagacgtacattcaagagagtacatgatcggcactaaagaattctctggctcgatctgaggaatcgggttcaaatccgcccatctgggatcttgggagaacatactggatgccatcgatgtgtgtttgcacgactgtgatacgagatatctggaatgacaaagagcgaatgcgagagcaagagcagcagaagatccaaaaagaaagcagatctcgaagtttgtcttttgccttggtggttatctggttacggtgacgattgtaggttattagcgtgactaaccaatagtgaatgtaactatccctccattcgcatagaacgctcactcaacatctcgtacttacattctagaaggatgattgatcttgtttgacggtactcactcatccagatcgacactcccagcttggttgaactcaatattgtagaagcaagaagagataacaactctccctttggtcggttgcttcttttctctttcttcagtcctggcgcgctcctttccgcctcttcagcagctatgttggcccttccctcccttcctctatttcttcttctcttgtcttctgtgctcggtatagcgcacgctaccgtgtctcctagatggggccactcagttgctcttctgtcctcctcatcgacgcttatcatctcttcgggtaggacaacatctgttgatggtcaaacatatacttcatccccgctggttaccacctacctgtccatcccactttcctcttcatttgacttgacatcctcggcagaactctcagcttctaccacgcctgctttgacagagaaccaagcgccaggagaagcttggggaagcgctgaagccctcgataacggaaatgttctaatcttcggaggacagctatcgagtgacgctagtgtcgtagcaggtcaagattctgcttggatcatgaccacctcgaacggagggccgtttgtccaacagacaagtggctggggaggggaacccactcgaaggatgggaggcgcgtcatgtagtgagcaaacttttcggtttctgtgcatggatgattcatatgatatgctgatatatcatcaacgtgattagcgctcggaaccgacacttacttcactgcaggtgtccaaccggacggctcgaacaacccaacattgactacctacgtcttttcttcagaatcatcaacttttaccattctctccggagcatctattccaactgcgctcatctcgccttcgctacattgcctctcaaacggaactcttcttctatttggaggttactccccttcgctctcttcgctacctccattgtccacagcatacaccttggatacctcagatacgaacccagcctggaaaacgattaccctaggtaaagctcagaatactgttccgacaggtaggagaggtcatttgggcgtcacattcggcagcagaaacgcgatatttgtccatggaggtggaaccggatcgaatgggttagaacaagtggtcgatgatgcttggattttggacgtcaacgaaggaacgtggaccgaaatccagccgacgggaacagcaccagggaaaaggatggaccacgaaggcgtgccgatcggaaattctcagatcttgttctttggaggtaggtcgatctgattttttctctctctctctcgcgcgcgctctcgaacgtctactgcttttctagaactcccatcatcaactcaggcatgctgacatttcttgatgaattaccacatattctcaggctacttgacaacttctgcagcggatgcaaggctttacgtttacgatctagtcacaaacagctacctctcaactttcacccctccttctacatgggcctctacctctgtcacttcttcttctaccgacctggtcgctgcgacctcttcaggcagctcgacaccttcatctatctctgctgcagtgatcttatcgaatgctgtcgcgaccgctaccctcacttcagtttacaccttacctaccacctttgttgtcaacacccttgtcactagaacctcaactctcacctcggcagggacaacctacatagaatttgagaccacatcatccatagcaactgccacgtctgttcaaacagaaacacaaaccctatatgccctttcattgaccaacggccaagcatctactttaacagtcgacaaagccatttccacagttcagactgcagctacccaaaccgactcgataaatcctgctacctacactggtgctgtagctggtatcgggacgatgtctgacgtctctacaacaggccaagcaacctctaccgattctgcctcatccgcgacaaataccactacaaacgggccgaatcgctcaggctctcttagttctaaagcaaagacagctatcggcgtaggtgtcgcgttgacattgttatcgattgctgccggatcaggcgcctacttcatcttggttcgtcgtcgaaaacgatccaacatcgatgacgatgatgatgacgacgaccttggaaacggaccggacaagcgacgcggaagataccataaccttgaaagccacgagaagccgggatggctcagaggagcgctcacattcggcggtttttcgggaaaaaaggaatctgagctcgacggtgcggttcgagagaaaggttttgggttttggacatcgcatcagaatgggcatggaggaaaaggacatgttggatcgttgatagctggttccgagaaaggaagagccttgccagtaatatggaatcggcatccaaatgaccgacgggagagtatgctttatgacgaagactctagtcgatttggatcatggccaccgtacttccaacgaacggaagaagtagcagacgatgtattgaccgtcggtagccgcgctgctcaacggggggatggagaaaatccgtttgaagttgagcggatcgatgcagaggaggttgaggcgcacggcgactatggatcgattggtcggcatgtttcaaaccaaaacctaggtcccgctttagcaggcctcagtagacagaaggaagaaatggatataggaggggggcgatcaccgtttggagatgataacgagagagagaatagagacatgtccgaggatggagaaggaaaaggactactcctttcgtctgcctctcaaaatcctagagaaatacatccaagcacgcgtactggaggtcgttctatggacaatccttttccgataattgacccggaccctctctctccttcgtctacatcatatatatacggaagctatcaaccgtatatgtatgaggacccattcgatctctctgcttctctcattccaacctcttcctcccctgatgtaatgacggatagagaaattccacgatctcagagaatgaaatttggccatggaaaggaagctctttatggagcggtcgataccgctgaacatttatcggtcgccgatgacctttcctccaatgcgacaacttctcagtcgctccatccgtatacaggttatatccatcacaaccctacagccgcgtatgatcgaatgatcaaaccttcccggtcgacctctacaacgggttggcgaagagctctcggcctacgtcaaaaatcaccctcgtcggttgaagagagtctcaacagactttccccttcgttcacaggtataaacgctggagggcttggtagattccaggagattattagagatccggcaacaccacctgtactgcctgatctcagcgatgaccatcgcaaagaaagatcgttggcggaatcgggtgttgggagagtagggaaacgacagcaggagttaagcttgaagagtatgcaaagtggtcgtaagtctgttctcattcattgcttgtgatttggtacggtaaaaatctgactgtgggtaacgatatatatcgtatggttcgaatcgcccacaggaacggccacttcggagcaaatggagcaatacgcgcatatgaacatcgttcagcgcaatcgagctacatctggttcgacaactatgacctccagtaccacaccgatctcatccccgcaattcgaacctattgagttctcaccgataccgccaaatcgatcgccgtcctctgcatctacgccaacacaaaaaacttccgtagatccattcgcggataaatctgactcgtctgatatcgatactcctcctatacataaaacacaacgaccaagcattgtatcgacaacatcttcttgcgcgcgtcctgcagggggccgacctaaaccatcaggtagtcctttcaagtctttacccgtccggccagccccatctgcatcgaaagaacaaaggcacttcccaggtgcttctgctccgactactgcttccgctcctgttgtccctcaaacgagaagatccgttcgtgagacggtggctgcgtttgaaacacgaaccaacggaccagtaggagggagatcgagacacaaggtcaactatgtgtctgtgcctagaccgaaattgacgatcgccaatccggacggaagtctcaaaagatagtggattgatatgctttatctctgatgttcgatttttagcttctccgcctctcccaaatggattcctctgtttaattttatctggttatctttatagaacttacttattattttctttatcatatcatatcatatc

SEQ ID NO: 1418 - DNA, 1588 bp, Xanthophyllomyces dendrorhous
tatcatatcatatcatatcgtatcacgaaaagaaacggacattttcctatctgactttaacgtttcacgccattctcaatatttctaaactttctgggcatgtttatcccatgctcatcatctttcaatctttcgattttctaagaacttctttcgtctttgttccttcatcttttatcttattctcctgaatcactctgcagttcttgtcttatctttgttgtacgttcatcgagaaaccctctccaaaagctgatccgcaaatctacacatgttcaacgatcttgatgagcatcacaccatagccattctgttgtttagcactgtgttccctccaaacttagttttgcgtgctgaaaggatttgtggaggcagagcagtattatatcaattaatgagtgaacagtgaacgagaaaagggggtcacagaagaacgaaactgtgagatgcatgagtttcgagggagagaaggatgtgatttctacaggaatgcggttgatgataaagaaacagaaagagaagtttagatgaaacaagaaaaaaggagaaagaaataagacactgaacaagagaaaagaaacagaagacatgagaggtaaagaaaagtcgttataggtgtgaaaaagagaaggttttgtgataacgagagagaaaagggaagctcagaaagacgactcttgatcaagagaacaaacacaagaatctagatcgaactcgggtagataagaaacatcgtttgaaacagaaggaaagaaagatcccgaaattaagcggtcccttccttgcgacgactcgaggtctgcactgagtggagaagatcttggacggatcgataggcttttcgctgggccgttgatgtagaagaggtggagggaagaggtctatcggcaaatgtcaagagcgagtacagtgaagcgatttgatcgccctttcgtttcggaaagcaaaccaggaagaaaaggggaaaggaccatataagtaagggttcacggaaggagaggagaggatgtctgaaggaattcgaaagggagtggctaaccttttgttccaagttgtcgataacttctttcaggtgttcagccaagatgtttctcttggcaacattagaagccggatccatctgtttgtattggtcggcaagttcagtgtagatcctgaaattgaagcaaagaaaacgaaatgatataaacaaattaagtacaaagagcataggttgacgacgggaaaaggaaggaaaagaaaagaagaatgaacgtacaccttgtagtgctcgtattctacctcaagctctctcaaaacacgacagagcactgtctgaggaggcaatctaacctcttgtccgtcagctctcttttgttgcgatgaagagctggtggttggttccctggatcgaatcttaggagacaaagctcccttctcgaccgggacttcttcctggtcttcatcgatgacgagttcttcttgttcaaacgagcttgcccatgcggtttccagaacgatcggttcaagtacctttttctgcgccttctctctctcttctgccatcgctcgacgtctcgattgtcttcgaggggacgaagcgatcgag

SEQ ID NO: 1419 - DNA, 6428 bp, Xanthophyllomyces dendrorhous
aacgagggagggggatagccgcaggatacacggcatcgagctgttgggaggcgaatctggggctggaggagagcagtggaggtgatcgggtaggagaagagacggctgcgactcggaggccttcggatagacgggagcccggtctttcagaataagtggcggtggagagaggagcgggcgaggctcgcttattggtttgatgggaggagatggtagttcggagccgggcgagttcgtcggcctgatagaggatggaaagaaaaggaagaaagaatgtatttgatgagtttccctctgttaatgagagaaaagaaggaagaagcacttactccgactttgtttcttccaactcgaggagaaataggccttattgtcctgtcctgatcctgatcaatcacagtttccctctgctgttcctgctgctgctggaactgtcgttggagttgatcttggtaccgttccctctcctgagcctgggtctgttccctctcctgctcccaagcccttcgatcgccgacggtgtcctcgactactctccttagggaaccaacttctgtggcgagtgttctgacctcctctctgagtgagtcgatctcgtttcctctcctctgcagttcggcttggtcaagcgcgcgctgttctcggagttgctcgatcaacgccgtctgttcctgcaacgactttgttaacctggaaacttctgatcgaagttcggcgaccaagctttcgagagctttcttttcctgaacgacctcccagtatctggtctcccaagcgctggtggtttcttcgacctctcggcgacctcgttcgagtccggtttgttctctgctggagagttctcgtcggagatattctcgctcgagagcccattcttgcttggcagcggtctctctttcgcgagtagtctggagttcgagttcgagttcagatacccgctgaagggtttctttgttttctgatgtcaggctcgagagcttttgggagagtgttgcgagggattctataggataagctgatggaaaaggataagagagacacaacaggtaaataacagaagaagaagacaaacatccagaaaagacgtctccaaaagaacgcctcgggggaaacaaagagatgaacagcgtaaagagaccaaagactcaccatgtgaatcttcacgatgatcaccttccttgacggtcttctttcctcgcctagctggcgactcgaccagtccgtccgtcaatccggtgacatccggtaagaacaacacactcttgccgtccccaagcccagcggcaaagcttgattggcctcggctggtggacttcttttttgtcaacccaggcttattagcgttccgtctggcgacagattgtccattggagtttccacgcttgagcgaggaaatcgagttgaattctctcgactcattgaatgagagctccgacatgggttgtctatcgatcggaccagattgacgacgaggaaggttggactcgatccctcgagcgagcatttcgaatttgctctcctgcaaaggaggctgaatcttggttggaaacagagatcctgtacgtgcggcagcggcggtgttagcagagtaccggttgccgttggatcgagaagatggtcttcgaggcgagaaatcttgggcaatcgcgtcgacaagtttgggccgaccgatcgggtttgcgttcgagttagccatggagagtgggagtccgctggttccgattaaaggactctcaccggctgaatcacccaatccgaaggagagccctttgtcgtctttgatgattggagcgagctctcgatcactgtcgaatccagactgctggttatggtgatgatgacctccgcctcttccattatgttgtccaccggtgagaccggttcggagggtgatagcactagcatgatggccggcagtagagaccggactgggaaacccggtcacggttgagaatgactcgggttgggcaaaagaggcgagtccgtggccgtggtgcaggtgatcgatggctgacaagttgccgttctcatgggccgctcgaccgacttcgatagaacttccgtcttcgtcctcgtcttcgtacgcgtcgtcgtcctcatcgcgttcggtagcgaacgacgtgcctgttctggtactagtcgcgacggaagaggaagcacgggaggaagacatcaacgatattccgcctagctgttcttcgagtctgatcctatctaaatcatcatgtgaatgaggtattaacagggatgaagctgaagaagacgcgtgccgatgagcggccgccgacggaggcggaaacgagtttgagagggaaggggactgtcggagggagaacgggccggctgtcaagccgttacgagaagaaggggttggatagttgagtaatgagtaggatctactgtttccagagacagagaacgggtggtcaccttggttgctcttccgacgcatcgacctgggcgaaggtgagggggatggctggtgggtagtcgaggaagacgaagacgacgagaacgaatggtctgatatcatcacagaacggagagagaaagagaaagagaaagagaaagagagagaggggggagaaggagaagaggtatcgcgagggtagcacgcgtgagagtgtatgtatgatacgaacgagtgggtctggatggatgtgggagggtgaatgtgagaggatggtatgcaactgaggatggaaagtaaggatgtatgggtgaatgaatgagtgagaggacgcgaagaagaaaaaggcgggtagaaaaaaagaacaacaaaggaaaagaaaaagaaaagagaagaacagaaaggacgcgactgattttctacatacatctactttgatacgtgtttctgttcgttcctcaaacactctcactcttcgttctttgcttgcgttgttctctcagtgttgaagcacgatatcacacgtatacctagtcatccgttcactagctaagagtcttttataggtaacaccgactgagcgatcgctttcgagcaaccctagtcttctcagtatggatactctctctactcggatatcgtctctccaactggagcagcaccagcaccagcaacaacaagcgtaccatcataaccaacagcaacaggaaaacatccatcctgataaacgaatccatacaaagtactctacgtcctcttctttcaacccatcctccaccagctcgttctatccgtctcaaagtcagcctccgtcccagtcgcaatcgcagtcttacggtcaaccgatatctggccagaatcaaggacaagttcaacaaacggcgagggtaccacttatgaaactggcgatgggagctcctggatcggcataccgaatgaacccatccaatccaggctcacccaaccgggcccaagtcgaatcaggtcagagtagacggcctgaatctgtgtctggttcgaatgccgggggtgccggaagtgggatgaccagctctgggtcaagagtggaccctcagtttggtccaaagggctctgtaaagcccggagctgtcagaggagcgccaacaggaacggcatcggcgtcggtaccggcaacgacgatggggtactcgaacggatcggtagcctctagtgttggcacggtcgctggaaagatcgatatcggtcgatacgacggtgggttcgaggccgacgagcgagaacgaggccagcgagagatagaactcggccatccggttggttctacagagagtccagatggagcatctctggcgcctacgactcgatcgtaccatgcgtggtcgcttcctcaattcgagatcggccgtccattgggaaaaggaaagttcggaagggtctacctggcgaggacaaaagcaccgcctcagtttatcgtcgctcttaagtgtatgtacaaagcagagttggtctctagcaagacggagaaacaggtccgacgggagatcgagatccagagtaacctgaggtatgattgagttttcaggagtatacattcgcgagtctttttgttggcttgctaaaataaatcacattggggcttgttttcttctcttttcttcttgtgtatgtgtaaacgcacccacccgttaacggactctgaaaagacatccaaacatcctaaggctgtacggatactttcacgacgaaaaacgaatcttcctcatgattgagttcgccggtaaaggcgagctctacaagcagctccacaaggccggtcatttctccgagaagcgctctgcccgcgtgagtgaaatttctcgtttcgagagacatagaaaaggacaagagaagaatatgaagaaaggagagcaggacggaaaggaaggaactgaaggaaatttggaagagcgcttccaagaaagaaatacaagcaggaactgaaacggctcttttcatttggcaactctagtacatcgctcagatggcagatgctctaggataccttcataggaagcatgtgatccatcgggatatcaaaccagaaaatctccttctcggtgtcaacggagagctcaagattggagactttggatggagcgttcatgcgcctggaaatcggtgagtttcgaggaaggctgattggatggatgggcaggtggatttgagtaagggagaaccctgtttcgagctgagggctaaaacacgtcatccttgttcacctgctcgcttgatacatctcttagacggacgacgctgtgcggaactctggactacttaccaccagagatggtggagggaaagtctcataatgagaaggtagactactgggcgttgggcgtgttggcgtacgagtttctctgtggagtccctccattcgaggaggttagtggtcacaaggagacttatcgaaggatcgccaatgtcgatttcacgttacccaacggtatgtcagtcgaggccggggatctgatcacttctgtaggttttctttcatgttgttattgtgttcgaacagagcgactgatggacaaggtgactgatccgagatgtttggatgaccgttctagctgttgaaaaaagatccggaacagagactcgcgttagatctggtggcaatccacccgtgggtgttgaagcatcgaaaaaagccggcgacgtcttctcaaggtgttcccaactgagtgtgtgtcagcagccgtatgccttgttctttctctccatgcgctgtgctctgtgttctccgtcttctttattccctgagaaccggccacatctgcggtcaacctggtattctgcaagctctttctatatgtttatttatctgcgtgcttgtctgccagatttcttctgtcctcttcttgtttcattctcctctcttgtcacttaacaacagatcttccctcctcttgacgaatatatatgctcagaccttcatatatgccgaccaggccgaatgtattccgaaaagatgcgagttcggcaaccttaattgggatctcgtctgaatttgtttgtctgtgtgataatctccaaaataaaccagagaggtgtattgctagagaacagatcgagggaaagcgaaagagatttctatctacagcacggacgagcaagtccgtctgggtattatcacatgttactcgtcgggatatatctggccacaatatctggctttcaattggttgtatcggttgtgattcaaccatggccaggacggggatgagaaagggagaataggaaatagaaaaaaaatggggaaataaaaaataaaattgattatgataaaaacaaggagacgcttgcgccgaggacaaggagaaacgtactaaacagatcgtattccagccgttggacatccggggacgacggggaacccaacttcacgcacgttctatttttaaaactcgattctagttccgtaggtgcctgatggtgcctaagtaatgaggctgatctgactgtttgtgcctgcccagacttctgtgcctgtttgcggttacgtgcttgtgaggccaatggcccactcgacttggcaccagcggccctggtcgacgtcatttcaagcaaaggcctacccctccgtcgcaggccgaagctaaagcttaagaccccaggtttttaatcagattgacgtgcctgtcggaattttatctgatctctcgtctgtttactttctctctatccgatcagcttcgtcttgtctgattggatcgtttcttaaaccgactcacaaacagtccacgaaaagagtatggtctctttggcagcctgagtctgtggccttctttcgcaatgttcacacagtgttctcctctctttgctctccttgttctccttcgaagttctctcttgcctctcttgcctctcctgcctctcctgcctttctcgctctctgcgtccttcggcgttccctttcgttctctgtttatcagctccctcttttttcattctcttttttagcctccacactttgcttcctttatcctctgtcatttgg

SEQ ID NO: 1420 - DNA, 47341 bp, Xanthophyllomyces dendrorhous
cgccctagacgtcagatcgccacggttgcactttttttttttacttctctccctctccctcgctcttatcatcgtttcaccccgcctctgctgtgtttgttctcattgaaaggagatgtgaagttctctctcctctgcctgaatccatcgttcccagaaatgttaaatagaaatgaaaatgcagaaatcctcgcttgttctttttactctctctctcctcatttccactcttcctgttcgctacccaatattcgtcctatcgccagtgttctaaagaagaaagtcttgcaggctaccactcagctttttcctctttctttgttttcctcctcccatcatgactttaagtaaagctcagcgaaagtaagtacacccatccttatcagtgtaggtgtgggtgctgaagtgattgtggcagtggcagtggcagtggcagtggcagtggcagtgacagtgatagtggcagtgatagtgagacgctgatcgcattatagttgtcgcactaacccacccttcgttgtctttcttcactctttccctcgccatccgcaggtggggccaaaggaactttccaatcttttgttggtacgccatcaccggtgttgtcggcttgttcttcatcagacatgtcaccctcaccttcgctcggtacatccgacggaaacgatcgatccggctcatgagtcagcagagcgcatcaactgaacatggctcccatcccgggtctccctcgatcgcaggcagggcgtacaataccacactcgccgtaggtaaaaaatctttcggctggcggacattcgctgttggactttggtacgacgtgcctctgctcgaattattctggagtgtcatgtacaccatgaccgtcctcattataggctggatttacagtcagtccctcgagcttgagcttgatcccttctggtgtttaaattagctcttcacttccagacctaatctcgtggtctctttccttcttggctcactatgctctcagtcgatccggcggatcctacggcgacacaggcagtcaatatcgggaacttgtgtggcttgttggcgttcatacaggtgaatggttttgtttgatgctttcagcccgcctacttgtacaagttctcggcttaatgataaaaccttgtctgtcgtatgaccaacgtttctcgacgtcataaccctcctcaaagttcccgctcgtggtcggtctcgcctccaagaacaacgttctgtcttggttcaccggaatatcttatgagcgagtatgtctctgtctctctctttggcgtcatctcttgtctatttttcgtttttaggttttagtcttgtttagaccgttcggttttctcatcactatctctgtcttaattcttcgatcaacgctgccgcaatactcatgcccgttatctaatctctccttcaacctcgccgcagcttaactttcttcacagagcatccggtcgagccctcctcatcttatcgtggactcatgtggtgagcagaggaatgatcattgggttcgtcgttctttagcctttccctttgagcatctccgttgctcgaatgtctctccctctctgtcttgttgaaccttttctaatgatggggcgcaaactctttcctctgcgaacttaactatagcttgtccggaaagacttcgctcaagctggtaaagatgagaatgggtgtcgtcgccttccgttcgtctcttctttttcttaaaatagatgaacgagtaattaaatcaaacctattcatcacccttgtaatgcaaacatgactgatgtttcttccttcttacgggggatcagtcgcatacaatttgcttttcctcctctctttgaagcctttcctccgatcgatggcctatgaggtcttcctcatcagtcatatggttctcgctttgctcctcctcgtaggttgctacatgcattggactgaatttggatcggtacgtttttcttgttcgctttgttacaaacgcgttctaatccacaatctggctggctgacacgtcccgcgcttttatttcttccctcccattctagtacatctggccggcgatactcatctggggtctcgacagatttgtcagggttgccaacatcattttcctcaacaagctctggctgtcgttccgacctagctcggccaacgtagcttctaccgctgtcgtgaagtatgtccccgcttgctctgttctcccatctctctctctctcttcatttcctcctctgcgcgcgtcgtgggactgacatcatgttcacttcccttggcacaggattctccctgatgccgcacttgaggtcacaatggagcgatccatgcgatgggttcctggacagcacgtatacctgacctgtccacaaatttcccgattccgttcgtcctttcgttttcttttaccttttgctctctgttcttacccagatgtaagtctgaaaattgactttgtatcgcatacgtctctcccacagcgttcgaggcacacccattcacggtggcttctatccagtcgaacgactcgtctggcccatcgacagtccggttgatcatcagagtccgagatggcttcactggcagactcgccaacgctacccaaaaagccggcggacagaccgaggtcaaagcttggttggacggccctcacggattagtcaaagggcttactagctaccactcggtcgtcttgatctctggtggttcgggtgtcacttacaccttgcctcaattgcttagcttggtcgaacaggccaagcagggtaagtcggccgttagacatctaacgtttgtctggatcgttcgaaatcttggtgggtcatcttctccttctccttctccttctcctctcgcgcgctctcatcgtggtcagagactgatttgttcttcggcctgtcccgctcaatttgttttttccccttctctttgcttcttattattctccttagaatctgtttcgtggatcggttcgactctggcctcaatccaagcatcatgccccgcgtctttgatactcgaaatcaagatctttatcactcagaccaactctgtccacccgtccggaaccggcagccctgtgtcttcgtcccagacgcttcctgccatccacccccacgcgatccctgtcggtctgtctgagcagagcaatgagaagcccctgaagttggactctgcagagagctccgagtctggtagttcagacggacacgagaatgagaaacgttcgaccgaatactcaatcgaggacagcatcggacggtgcgtctcgatgggtcgaccggacctagacatcatcttgagggatgtggtggatggtgccaggagtggtgccgtcaatgtttctggtttgtccttcgctttcctttctgtcttttgtggcctttgcgctgtgtgctgacctggtaaaccaatcaaactctcaaaccgaattttaaaaacaaaaacaaaaacagtctgcggaccgaccagtttatcgaacgcggtcagggaatctctcgcgtcaggaaacgcctacaggctggccgatgtcgccaagggaaaggtcggcgctgtcgatctccatgtcgagagctttggctggtagatagacagctggcttgcttgctagctatcaagtcatgatagccggttgatatttagtgtctatctacccttcttctctccctttgctcctttcgcatcttctatctttttttttatcaagatttcaagccctctcttccttcgtcttcgtatatgtacaaacgcgtataaagatttctcgattagattagccagattcttctctttccctatttcttctacatatctttgcccacgtccacatagtcattctcctcccttcatgaatcacataactccaatctgtccaactccctcgtccctcgtcttcttacgaattggtttcctcgtctcttttttttcggataaattaatgattgtctctgagtgcttggttaaattcgcagcgatgaatgaacacaatacatcaggacggcccagagccaatagatcatagatcataacgaattatgaggtttctaaaggaaaaaagatgcatacggagaatttttaacaccggcgtataatgccgtgaggcatgaaaatccctcgatgagaagaggtatttgagaaacaaaaggaaacgagaaaagagagagagaatatatatatatatacatcaagaccaaacaagacgatgaaaaagagactatcaattcacttcgttccgtgaggcttgtcctactcatcatgttactcgtcccgcactcgcttgtgcacaggacactcgaatgccaacctacttggtttgaaacggctccgctctctcaaatacccattctgctcgtccaacccaacgatcagagatctctccgaatccactgaaaacaaaattaagccctgaaagagaggagagaaaagattatagaaagaggccgaatctcgtttagctggtactcattggtgattttcgaagacaagctgtttttggaaaatttgtatccttttcgattgaactagtttcggtttcagagataagtattgagttcgttaatgactgatagaacgagacagataaaagaagggtaaactcaccggtcgatcacagggtacgtctcaccaatcttctttccagactcctgtctaggagaaacggcggcttgatctgaatccccctcggtcgctgtcgtcacttccaatcgattggacccgtccgttgacgtcatcagtcctggggactgtccgccattctcccaatcaactagacctcccaatcgatttgctctgataccctccacaccgagctctccgagtccgttctgcatgagctcgagctcggcgtctcgaatcctatcccagacctgatatcaagatcaagggagattgtacatatacacagagcaaaggtcagatcaggttacagtcgacgatcagagataggaacaagttcgtagcgatgatcacccacctcatcacacatgcatccgacacatgtttgaacgtcccatttgattcgcttgttaaccgggaaatcagccgagtatgaaggcaaggccagatagggcagcatgcaacaacacgaggctagcgagatctcctgtttgtagagggtggcgattctaacgaccgggtcagatgaatcgtttaagacgacttcaaatgtgagtgtagatgaaaaccggaggccagtgtctgtcgccggcagcgtggtcgatcgaatgtgatcgtccgtgggctagccagaagtaaaagcataaggaaaagattgagggcaatgtgttttcttttagttcaagtactgataaaaggagagtgcgtgagaaatactcaccagacgtcccatccttttccactcccaaaagctacccttgtctttctcggcatcaatcaagacattgccttcatctctggccttggcaacaaatcctttgagaccatagccggacttcgcgccttcctgaaagatatatcgtttggggccgatgatctcttggacctggcttggattctttctggaggtgaccgtggtggtctgttgaatgtagcaattgatcgcatacacactcacttgattcgaaccgaacgtcagtgagagtgtaagaggaccgcctatgataaattgctgtcaagaaagggaacgagagaagagattcaggtagcaggtcagacaagaaacgttcaagagggaagtgtgcgcgtgaaacatcaatgaggggtgcacatacactggctgtgaggccaatcttgtaagggccaagagtgggggagatatcctcttggtggtgctggaactgatagactgtaacgggaaaaggcgagcgacaagcaaggatttagagtgtgaagggccgaaatgcttgtagagagaaacgcactgtttccgtccgcctgagagggactagagacgatgatgacctctcgactgtcggacagatctttggtgaacatgccgccagagcctacgaccgttccctcgacgctgctcgttcaaaatagtggaccgagacgttaggcacgaaatacaagaggatgatcagagagacaaacgaattgattcgtacaagtactgaattcgaccatgggccgatcgctctgtgactggactagtgctcgggatatgaaagttgtactcgatcctgtgtgcgcgcgcaagaggatgtggacatgtgtgtgagtacaacacaaaagatagagacgagagagcaaaagaaagaatacctcaggtctactcacgtgttgacacccttctcgagccatataccctgtccgtcgccgtctagaaggagaactcggtcaaagattttttcgtcttcccaacctgacttttcgatccggagacgctgcattccaacgagctcaactttgattgccttgacgagctttcgttgaggggcgacgatgttgagaaagccattgaccttaccgtcccttccaggcaccgagtcgtctgaattaacctgggcaagggcgttggcccagcctctgccgggcggtcgaataaagacaagtgtttcggcaaggcagagcgatgcctttggttttgtcaggttcatgctcaaagcggacgagattagatgaggcaagtgtctagagtcttgtccgcatgggttcctgagaggatctccaaggggaaatatcggtgcgatagcgtccggaagagactgattcgaagtggatcctaacgaagtttccaagatagacgacacaggggatgatgagagagaaggtgatgatgggagcacttgagagcttgtgctgggagagtagctgggcggatcatccctgggagtcaaggaggatgaagcggtgagtgtcctggagttgttcatgacgagttttcaggaattgaacaaggaaacaaggacaggaacaggaacggttgctagatcaagccaacgggagaagggcgcagaagaaggagattgactttctgagatcttctgacgggtctttataagggaaaccaatggaagagaaaaggcgaggaagaaagaatcgaacagagaaaagagacgaaaacaagacagacagaggtgacaacgacgaaagattatgcacgatttgattgatggaactcggaagaacaggatggaaagaaagatggccgaggcaagagtgaggggatgagtcagtaatcaggacgggcgcatgtgtgggcgagcatggttcggtcagtgttcaattaacctgcggggaatgctcatgcgtcccgttccttggcaacacggcttgctatggattgagcacatctgttcatatatgtgtacgggtgtgtttgtacgtagggtgtccttctatctatttgtccttctacccttctgtctacccttctatccttctacccttttaaccatctgcccatattcatgaatatgtctgctcgcacccgtttcgcgctcatatgattggcttgcatctccatgatctcaccaatatacgttcataattaatcgtgtgagtgtatgtgtcctctctacgtgcttggctcggaacgggcgatttcggagaagtccgatgatagtgaggagaaatccccggcgagtagaaccgagagccaggtgccagtcggtcggcgatgtgagccgacggtgaatttttaccttcttgactcgacgaactatgtttttctttgttatcttctggtagagccttctagtttctctttgtagtactcttactgttactatgattttcttgttccttggtcgtcaatctattcacaatattcatgatgttcatagtatctagattacacccctttctaattcttccgttcttatttctcctttcttatttcttgtttcttcttctacctcgtagttttcagctcatatcttcgtcgttaacgctattcacttttctttgactatcttacttctcatctgtgcgcttctcggccgagatgacagaaagctgtcctacttggtcggatcgggcacaccgcatgttatacttcatgtaatcgaattagtacgccataggaaactctgggtttaccccggctgtaccccaacaaagccccgaacgtgtttgccccaaatgtaccccctgtcaataccccataaacccccagatggaccttctaaccctaactggaaccactgtgtatgatccctggccagaactgagatctctcaacaagcaacccggtcgtttggtgatctcgtattacaaccactccgagacccacaaccatacatcagttggctccatagtcctatggtcgccccgttcgacctgtcgggctctgataagacgaccgtatcgtcttattcagacaccgaagacaacgacagggaggtcgaagagtcagtcaccacctattcttctttttctcttgtgttttcctttagactgatacatccctcgatgccctatttaccctatctctctatctgtttatctctcttcctctacctatagtttctcgtccgcagaggtcgaggccgcacacttcagatcacgctacctcgagatctaccggacacttcaagatacaaaggccgagctcggtacgtccattctgtgtttctcctcagcgaacctgtcaaacgacgatgcgacaattgaccctctctgtctcctgtcttttgtgtcttgtgttgcgcttttcttctctcattctcatccatcgacattcaatcttcataagacgagttccagacatcatccaaagaactagaagaagaactcgagcgagaacttgcagcgaccgaggctgctcaggaagatctcaaaaaccggatcacccgactggaggccgaaaaggaagaatggaaggcaagtggatcctatgcattccaacccattctctctactacttcaatatcgggcgcggatatcagactcggccggcttactatgctcccatgcccacaactttgggaattttcatcgttgcgctggctcttttttctttctaggcaaaacatttgtctacacagaaggcacataaccttgcgctcggatctctccagcgagagctcgacgcgattgtatgttgattactctatccttctccttgagaccgagcttcccctccagaccagctgatttctctccttccttctcggcacgccttcctcatgaacatcagaaagcagaacgcgatcgttacaaggtctcgttacgggatctagagatgggcgtcgacgacctggagcgaaacgaacgcatggtctcatcttcccttcaggacatggagtcgaggtataaccgagcgatcgaggaaaagacgctgctcgagcaagagttaattgataagcaagagttagaggaagagactcagcgtctaaaggatgagatgagaggtgtgttttatatcctcttctttcacttccttctttatcttttcttttcctcttccttttgtttctctcgtcttttctcattttgtgaatacaatgactgacattgcgaatggtctcatcgaccaaatagatcttttgtctgaactttcggtactcaaacaacagcaacaatgtaccaaagcaccttctcttccacctgcctcgcctacgttatccgaagaaacctcggtcggctctcgacccacgtcgctcgtccgaaaatcttcccaagaactctccatggcagatttgatgatgtctcctccatcctcctcctcagcatcaacatccttcctggaacccgtgcttgcatctccgtcatcaccctcgttgagggctactcggacgagctcgggtctaccgaaaagccatacatcaccctcgatctcacatatcgtccgttccccgtccagactacccattccgggatcctcacccaatcgatcttcccgctcaggtattacctctagcacgacaagtagaaacctttcgttgggaagcaccatcacttccaggacggtggtgtcgtctcctctgaactcgaccctcaagccggtcggcagcaatcaaacgacgactcaaccggccatcgtctcaaaccgaccgacaaaagtcgactcgaaatcaagaggagttcggatggtatctgatcttggggaacgcgtccgaacgttacagagtaggattcagacacataatcttccacggatgaggaaggtgacacctggaaatgtttcctctcgcgccaacccaggaaaccccttgtcgccttcttccagaagacagggttcaattcctcctctgccaacattgccaacgtcgccgccgataaacagcctgcccagttcggcccatccgaggatgaaagcgttggcagataggtcagctccgccgagacttggtaacggccaatacagcactcccggaacaccaggctcaggcgattgggtacttgttagtgagaatgaagaatcacctacggctctcaaacttggagcacgggctccatcagtctctagaccgtctgctcgatcgtccgctcgtccagtttctcgacaagccctaccttcttctcctctgagagccggatcatccttagcgttccctccttcttcacctttatcgtcaacatcgtccccgcctgcattatcggcagcggcgacaaggatgaaccgattgtcgatgtcgagtcaactcggacatagacctgcttccaggttgtcgaccttggcgcctgctgggatctcagtcagagcaaccaccccgacgccctcgacacttgtcgaaccttcagattcagaacctaatcgcccgcactccagaggtccgagctctggttcagacatggagtcgcaaacaggtagagggctccctccgagattgtcagagtcaaattcatcgacaacatctctgaatgatctagcagatgaacccgatcaaccgtatccgttctctactttgaatactcagcctcagcctcgtcctcactcacgtacacaatcacattcaaattccatttcgcattctagatccagatccagatccacatctgcatccacatctacatcgtcccggccaacaatctctcaccctcgacctatccaaccggctggttctaccaacccgaccgaacaaacggtctctcaaccacaatcaaagattcccccaagatcgttccattcgagaggggatggcattctgaaacggtcgaccggtcggacgtccctgattgagcgttcaccaactaccttcaacttgcctagatcgtcaccgccatcgtcgccgccagcatcctccggtcttcggcctcaggcccaagggcaagggcatatttcccgtcttcggcaacctcgaacctcttttggcccctcctcttctaccaccacgaccaccctcaccaccatcggcgctagtggtacagccgggcgaagcaggccgaattcaatctcggctcttccaaagacaaaccttccgcctgtgcctgccattccgtcttatatgactgctagcttgacgcctggtcctaaagtcgggcatggagtgagaggaagacggtcggtcggatcggtctcgatgtcggtaccgggttcaggcagggtcatgtcgcctgttggtggtgttggaactggcgcgtttgctggtgagaccgttgttgggtcgaggtcggatgttaggccaaaatcagctctggcaggacggattaggagtctgacgggtggtgggacatgatgtctctttctcttctcctctagtctagtgtcttgttcctctgcatgttctccttgtacgcttctcttttgggacttctttcgtgtacatatatgtactctcattggttcatatacgcctccgtggtagcggtgtgcttgttataccctgttctcttataaccactacatatgatattccatattcaattccccttcctgcctggattttattaaaacgtagacggcccttgactcagtcaacgaacatgatcgatctaataaaatcagggagcacttcgtggtggttttctagagtagtcacacaaacaccaataagacattcggaaaccaggattatattattgtctgtgtgactactcaagaaaaccaccacgaagtgctccctgattttatcaggttatgagcccggataagcgcaaagacactccagaccacgatcagcctgtgtaaaaatgcccgctgggttacaggtgattaggtaatgtggctggagcccaaaagtagcaacactaagttgatgtgaagctcgagggggcgtgttggatgtgagcatccttcacgttcacatggggttgtatttcagtgggaagagcggctctacgtagttcagggggcgcagttttgaatcctgtcaactccaattcgctattttatcacgatcgacttgaaaactaggaaggtcaaaagtgaccgagccaggaaattttcaaattgaactggagaagttgagtgtcaaacccatttagtactcgcatagtccttgggaggttacttgaatcaatgattcaaaggagcaagcaagtgtggacaggtctacgttccctcctttatcaatggagggactccctcctcctcttgtttgaccaagaaaaagaaggaagcttagaggaggtgtctagtctccaataggacggtaatcttccactggctagttagaaccctgactgtaaggaggaatctctcccgtggagaaagaaaccgagaagtagggttctaggcaataagctggtggttgtaggaggtaagaggaaatagggagaaagagaagatacagaagaaaaaatgagaggattaacgagggtgaccacctggataaactcaagggagttgttcatgatgcccacacctggttcaagaccaatgcgatgagagaggtggaaaaggaagagatgagaggagttgatgatgttgagagaacagttaaaaacccaaaaaaaaagtcttcctaaatacgtcaacttttttgttcagggctcgtctcactgacgcgttcccccccagacgcgctacaggacttctttacacgcttacattcactcctctcatatatacacgctcgcactcacactcacactgtctccttctctttctcgagccagttcaacatgggacgaaggtgagtggcgtatgtgttaatggtctcatggttgttcataatcaccaagtctcacctctagtttgcattcctgaagtacaggactcactccggtaattccagtcttcgaaccaacaccagctcatcctcctcgtcttcctctgatggtccgtcaagaacccttcggtcaatcttgactgccaaattagctagaggagtcatcgagtctcttgtccatgtgatggtgtttgaatcatcatgctcgcctgcggatcagacgaggtcgtttgaggaaacaatgactcggatgattgaccggttcgattctaaggatgtcagagtccaaagatcactctctcgactcctcaaggtccgttctcttcctttgtgatgatctccaaacgatctgtcagaccgatgtcgaagctgatgctcatacgtgctttccttccaacggtagatattctggattgaacagaaacggatagatgctgcgcttcattcattctcgtctacagccgcttctggatcaacctccaccggtagaccacctcatgttccagttgttttccctcgaagtcgatcaaatattcctctacccatgtccaaccaagccagagccgcaggtgctggggatgctaacactacgacgaatcctttgatccctcctcatcggttcatccctcttgtcaaccgggggtcgacctctcgtccgttaggcgcggtctcctttctcgatagagctcgtccacgttcacgaccgactatccctacgaacggaccgacgttctccgatttcttttctgaaaacgacgaacatgacgatgacgacgatgatgagaacggggaggatgatgagtttggacttcgagaagagacggatccgattgatctgatttctgatccgacgggtgatcatcgaacacctgttgatacaggcttagattctcatcattggggatttgctcctgacgatgatggtgatgatgaggaccaagaagaggaagacatcgatcatgggtgggttcatacaggaaatgtcaatgaagacgagagcgaggaggacgaggacgacgatgatggtgattatcgaccgagtgttggagtcggccgttctgaatcaaacggaatagccgatgaggaaactgatgagccgcctccattttctcgagctcgtcggttcacagaccttcttcggccaagcgccggattaaggacaggtttgttgagaaccggtggtcctctcggaatcagagcatcctccagagatttagggttgagaagattgggttcattgaattacattatcggggacgaagacgaaaacgagaatgatgatgacgaggatgatgcggatggtggcatcgatactgctatcatcattggtcaagaaggaggaaacgacctcgaccgaacgctcacctctcgaactcgacagactctaggctctcgtcccaatacgttcgtccgtccgaggagagctccgccaggcccaacggcaccgttggaagaacactaccaatatgcgtcctacatcagagacatggcggtgagcgacgatccgttggtcgccggtagggctcgtagtccgttgccatcgctatcttcttcctggatgtcgatcattcaacatttggcacctacatcaacatcacggccatcaccatcgccaacactaccagcatcttcatcatcaatccaaccatcatcaaatatactacctgcaagcgatgtaaataccgagaccatcaccaccacctcctctgaccctccagctgatcttcctgcacggtctgcacccgcgctgggatcactgaacacatcagagctgagattgaatccagaggaaagaaacgagttcgaggatgcctcagcagagaggagggcacagtctagattcggaagagaagatcgagtccggtcttgagctttttctctctttgtcctcctttcagtagtccattctttccttctcccgctgtcaatccttctccttccgttctttcgttctgtgcataaaggaaggagaagtaataccaaatcggcctcctagaaaaatccagttgtaagagataaacagatgtatgaaattagagaatcttgtatggccttgctggacgctatttcgttttcttagtatctcatggttcatgtgccttctagagaactttcattttatttttattctcatctttaagactggttgatcatgagaagtgacaccaaaagaaagacagagacatagatcgagatcagttatacaaaagagaagaagacaaacaagcagtaaactgggtatggagagaagaagaggtcaaacgcgaggagattgttacaagtagagtagaaggagaaatcactgatatgttgtctaatccaaaaggctgaaggtctttttctttttcttttcctcagagttacatttgaaaagaagagagagagagagagaggataagaagaaaaagaggcagaggcagagacctgaaagacgggaaagaaatatagatactaagaagagctagcccacgtcctagggaactctcccccaaccccctcccatgcaagcgctctcactccaactttccgagatgatctaatctgtccaacacaacggtcttactggtctcttcaatctcaccggccaagaaaatctcatctaggatggcgtaaactttgtaaaagttgaagacgagatcgagctcgcatacgttctgaaagaacgcgtctgatgattgagattaccaacagatgcataggcaaccaagccagagatagggtagatcaggttcggtgttagatatatatcaacaaaacggggagcgatcgatagaaacaaccagaaagaaggaagaaacattagaagcatacctaacacctcgacaaaaagatggatagcctccaaataggccaactcattatcgttcgagtccacacagatacagaagaaaagaccggcataacgacttgagtgtgagcgtgagtgtgtgcatgttaccagttcagcgtgccaacaagaatcagtccaagattaagactaatagatcctgcatgagatgaaactgagggaacgaaccgatagacgattttgaagctgcgaaactgatgtccgaagccaaagtagagagaggccgtcaactttaactcaacaacatcaatgtaacgtgcgtccacacatcgacagaacgctctgatgagcaagaggagagagagatctgacggacctcgacaaaattcgattgatacttttggtctcggggagcgatcaacctatggacctcacctctcagtcggacctacaagtcagttcgcttggtcaatcattagctctcgacatatcaaacagtaaaaagagaagaggagcgaaagaaaacagcaaaagcagagtaaacagaggaacaaaccttttcgtcgtcctcgtacgggacataccacttgctcaaccgagtcttgccttgtctgaatgtgatttaaaatgatgatcagttcccgagaaccaaaacaagagacaggttcgtcgacaccatcatcacgactcatccgcatcagacgacatgcatatacacacatatatataaaacaagagagcagagaagagacatgttcgctcacctattttggatcaagataaacttgatagacatgatggttgcctaaagagatgaggttcgtcttggggttaaatccgagaagacgaatgcgtgtagatggcaagaggcggtagatgttggtatagaaataacgtcctagtctgatattaggaaattattgtattcgtttttatcatgttcgctcaacgccgataccgtgcgtttgacatacttttcctttgtttctcttattatcggattcaaaacatgaataagcttcctaaagaaccagttgtccatcattgaacagtaaaagaggaaaacgtaagatcctaaaaaaagaacaggtgaacgatgaagcagagttgaagaaaattgaggatactctaggcctgttgtcggtaaccacatcaagaaaatagagacaaaaggcgagaaaaggacaagagtgaaggaaaggcgtatggaaagctgtagaacgcagctctagaaagatttgataagcaagaaacatcatcaagacctccaaatgaggactgaaagaacagatcaagggactacaaaggctttcaaagcaagacctcatcgcaagccgacttgttcaagattttctgggggaggacgatacacctgatgtatttccatccgcatcagaagaagatcagtttgtgttatcatagaatgaggagaacagaaaagaaactcacgatcggatgtatacctccttagagacattgacctcatccgccaagatggcaatcgtcttctttggcttcagggccgcggcgtcctcgggagcaccgtccaccctaccccaagcgccactttggaccaaagttcacaaggaaagaagatagttcaacactcggctcacggaacaagaagtggaacaaggaggagaagaattcaaaagagagctgtgcctacatcttggagtctctaccgacgattccccatccgactacggcgtgctcacccagctcgacaccctctaacaaaattgcctcatacactctagccccctcgccgatgatgacgttcggtccgatgctgacatttggtccaatcttggcgctcgggtgaatctgtgccgtcgggtcgatcgacaccgcgccagtgatctctgggctcgaagccgttcgagccgtaggaggggtaagaagtccgggagaagtcttggagaggtgggagaggtagagcgcgttggcaggaagagcggagctatcagcaggaggaaagtaaagagagaaagaaacaatcgtcttagccaggaaaaatcaaacaagcaagagatcttgacgaaaaagggacgaacccagcgctcttgatctgctgccaaaagtcaatggtctcgtaaacgaagagctttcggctactggccaaccgggtaataacatcctgttcgagatgaatgatttcgtccggctcggatgtggggtcctccctgtgaaagcgaataataaatttggtcaagaagatcagtaaatatattttatctagatgagaatgggacggaattcgaacgcacgcggcaattcgagccttttcgtcggtagccgttttgatctctgagaagatactctgatcgaagagataaactgtgaaataacccgtggcagattacagcataagaatgggcgggtgataggtagtggcgctgtcatggtgattctaaaaaaggacttacctccagtgttgatgactgaacgtaaaaaaaataaaaataaaaataaaaaaaagagtaaagggcagtcgtaagcacaagaacaaggcaagaaggggttatgcacaacccaaaacactctatgttgggatgtaccatcactgatgaatccctcgggcttctctacgtaatggagcgccattctgctctcctggtcaacaactatagatccgaaccggagctcctggcccttgggaacctttttacccatgattgtgcccactccacggtgcttggagtggaactcttgaagagacttcaacggaaaggacgagcagatgtcggcgttgaggacaaaaatctgatcaggcgaatttcgaaggatgacatctcggactggaaagtgggatggaacaggagatgtcagaacattgagggagtgaagaagagaaagaatgtgtgttcaagaaacacggacagtgatagagtcctccagcggttcccatcgccttgaactctcgcaagtacctgtcgacaaaagtccagaccggtctcacttagcacgttggtggctatatacatcctattaagcaagaatcgagaagctgaaagatacatacgaaatgcccatgttcttgaattctctcctggtctcttttaggaaaggctcaatcactttatcgtcccagactccaatcaggaaaatctcggtaagacctggcacctgggagagggcccggatctggtgatagatcattggctgtagcgggagaggggataaaacgtgggtttgaaatagatcagacaagcgaagagatgagccaagacgatagacttacctttccggcgatggggaaaagaggcttaggagagctaagggagagaggtctgaaacgggttcccttgctgcgtttgtggaaggcgatagaaaaacgtttgagagagattttagaactaaagcggaacgagagatgattccgaccaagcttagactataggacgagggtgatagagaacgctgacttacgaaggacctccgatgaggatgacacctggaatttataaagttcgtcccgggaaccagatcgccaaccagagtgatcgaggaaagcaagcgttgagggatggttaggaaggacagaaattgacaacaaaggacagcgtatacaaagttgatcgaaaagagatgagccaacgctccggactttgccggcgttgagagagagagatgggatctagctctgatcgctagcgatggacgaacccttgatggcagcgtgagacattgtttggagacgtaagtatgctttatgttctttagaaagagagtgcaagacgactggatggtcgaggtaagatggaagcgagatggttgtatcgtctgtgaaagaatccgccggaaggaaacaaaccgacacggccagtgatgatgaaacagactggcccgaaggttacccgagggactgtaaccatggctaccgctagactacccgatgtgagcttgatgactaagcgttttctggcagcctggatgctattcaagtatatgcataggtttctgttgggctcatactacatatgacggagtagaacatgtgcgcgcgcaagagaaagagggagataggtacatgtgtatgtgtatgtgtatgtatatgtgtatgtgtaattatatgtgcgttctgagaaaagccaactgagagactggaaagcgttggccaatacgatgggccaaagagtcatcactcaatccccaacgacttcatggttgcatcacactggtttccagcttgaagcaaagggaacgaagaaaagacagatcatgacgtattcatgatgggtcacagacaacatgacgtcggcgttagagaatggaagaacaagacgttgtttttgacctatgcctgaggctgtatagctgcttgacgggcgtactcgctaacgcacagccaccggtatatagagagagagtgtcggtgtgtatttgtctgtgttggaaattgtatttgaggttgtactcgaatttgtaatccaaatcatattagaaagtattagaaagcttactaggagttctactagaaattctactatgaattctgaaggaaatcctaataaaaatcacatctcaagcaacactacagatctcaatagcaaacctattgaaaactgtagtatgaactgtattcaaaatcgtattgatcttcccattaggaaattcgtaatcagcgatcgtattacaactataacaaattcgtattgttttccatcttggcctcgttctccattcgtccttttcttccatccgcactctctttctctcatctctctctcctgggtatcttatccttcttactcactcactcactcactcactcaccatcactctttctgtattcgtccctctcttgtgtctctgtccttaccaacaagtttctacacctcctttaccttcctctcagccgagtacatcaagtgggagctgcttctttgtcgcttacatggtgcgtttcatctatcttgcttgcctgcctccttgtttttttctttggtgtttcctttcttcctttcctctatctctcttttcttcactactctttgctctctctcaaagatcatactatcgcagatcatcctgtaagatattggaggcatcttcagtgatgggcttgtcacataagtgaggcaagcaagaggggagaaaaggagaagaagcagaaggaaaaaaacaaccagatggacgtatgacaggagagcgatgaagagttcaatcatcccatgttcaattagcacgtctcttcatcatcgctcggtatcacacatcgtttttcctcttctcctcataaaacatacagaaaattcgctcttctgctctctgtttggttataaaaataaaaaaaagcggtttgcccttatgcagaccacatcgatcatccttgtttctgaatcattctgcgtcgtcaattaaggcgacagtctccaagatagaagactgacttggttctctgtcttttgttcgtccaaccctctcctactctctatgaaccccatgtctcggatatccaatcttttacccgaccttggcgcctcttttcttcatcttccttctctgatctatcataaatctggtctgtcgatcggcctgtcggtctcttaaccgatcaaggctacttccaccgaaaaactagatcgttccattcatgacaccgagcgtttcatcatcatcgagcagcaggttcttcaaggctccgtcgccatggccgctgctcaccgaagggtctcgaggggaaatccggaatcaaacgccctcgtccggcaggcagagcttggaatcgatcagagtaaagcccgcttggaatttcttcgcggtcagctcgagaagaagaagaggaggcgagctggattgcccaaagtggaggaagccagatggaccaaccagcttggtatgcccgatctttattgtctcatctcatccaatgatattctcgaacgagataactatacgaactcagaaagagaaagcgctgaacctatatcgtacctgcttggtcgatgacctctctagatttaatccgagcggaaactccactatctgttcctcgaatctcgcacatgctcagcaaactcgagttcaaactgaaactcgaagaccagttccgacagggccgagaaaagatggcttccgcgctgacaaactcgacagcaaaggacgaccgaaaggaaagagcccgactggcagccgatcaggaggagagcaaggaaagaatcaaactgctcaggatggcggccaaaaagtacaataatctactctgtgatgaagatgaagaggacgaaagtttgttcttatctcctcatatcccttctctctatctccttccttccttcttggcggctaggatcaggacacatgtcacatgatctctgatgctgaccaagcatatacgctcttcgttttcttgaatggacccaccagatctatcaaaccccgccaaggaagctatcaatcgaaaaccaatctctggtaaactctccctggccctagtctccggacgagatctcgaacatgcccctcttcctagctcgtcttcatcctcactccggtcgtctccgaaatactacaatgagacctctgtcgagttcaaggtacactctctcgttaaagcagtctctcatccatctcgaaacgatcgttggcttcaagagttcacgctcgaaatggataaagcggatgaagtcgagatctcattttacgaccagcccgtcggcggaaagagcggaaaggaggaaggcaagcgagtgttgattggagtgatgtggctcaaagtgagcgatctgttggaagctctccgaagacagaaggtcgatctgatgggaacaggcgaaggcggcgagaccaactgggtcaccgccgctaccgtcagagatcgggacggcagatcctctgggccacccaatggagggagaggaccacatggcatcgcaggtggatcacagaacgagttgggcgtcaaagggcaaggcgtcaaaggacagagctcgaacggggagggtctggagggttggttctcggtcgaaccacaaggagctgtcaatctcaaaatggacttcggttcgtccctcttctgtcttttattctttgtatagagattcaaagagaggaagagttgtattactgacttgtgaccgataacgatgacactcttgtcctctcatcccttcttctcttcttctccacagtcaaagagaacgttcgtcgacgacctctggacggaacccctggtgggctcggtcgtcaaggcgccgtcaagaagcgcaagggcgaggttcacgagatgaacgggcatgccttcatcaaacggcaattcttccaagtcattctttgtgcgctctgcaacaagtttttgatgaccggagacggttatcagtgtgaagactgtcggtacatgtgtcacgaggcttgctaccataaggtgctcacaaaatgtatctcgaaaccgaactacgaacaggttagtccaccatctgtttttgtatactctcatctttctgtcatcgctatacaatcattgctgacgaacgagcgtaatgactgaccggtcttcttccgactgatgtgtcatttctcactctcaggagggcgacgaagacaagatcaaccacaacatccctcatcgattcgagccatattccaatatgagtcctaactggtgctgtcactgtggatttctccttccacttggtagaaaaatccctcgaaagtgtaacgaatgctcgattacttgccacgaacattgcgcccacttggttcccaatttctgtggaatgtctatggagaatgctaatatgatccttggtatggtccgagatgttaagagcacgaagccaaagagggaccagcaattggctgcttcccctgctcgacacaaccaacagcagcagcaacaacaaaggctgccactctcaacctccactcaatctattccagctcctccttctcaaactcaactccctccgctatcatatcagcaagaccataggcatcctcctccccagatacagcagtcgcaaccgcagcaacccttggtggatcgaatgcaaaatctttctgttagtagcaagaccccagagcccagacctttgcctccgactcaggctcctgcccagcctggttaccaaaatgtccaccagagccgacctcctcagcagcacgcttatggatcttctggatcacatcctcttccctctcctccgacccaacagcagccttcgaggggagatcgaccactacctcagacaccagggttgagcggatcaccatctgtttcgactattcctgcaattgctccccctccccggtcaacttcatctcaacacatttcgtctcaacctgctccaagcccaccccatccgcaacatcagcggcttcccagtacgccgcctcaaatcacccctcctgcccaacacccacctcagaaacaacaacagcaacaacaccaacaatttccggcggatggcatatctcccgcaggagttgtcggtactcctcacatggtctctagagtcaaaccgaagaagatcggcctggaggatttcaacttcttaacagtactcggaaaaggaaacttcggaaaggttatgttggctgaagaaaagacgtcaaaccagctctatgcgatcaaagtgcttaaaaaagagtttatcatagagaatgatgaagttgacaggttgagttattttcttcttcttttgctctttgactgtgatatttctttcatatgctgatttcaatacaccccatttgatgtggtaccaatagcacgaaatccgagaagagagtattcctcgcagcggccgaccgaagacatccgttcctcctcaatctgcattcttgcttccagaccgagacgaggatctatttcgtgatggagtacgtgtcgggaggagatcttatgcttcacattcagagaaaacaattcactctcaggcaggcaaagatgtatgcgtgcgaggttctgctcgctttggaatacttccattcgaagggaatcatctaccggtgcgtcttcttattttccgttcctcactcgcttgttactctatcatccgtctggctttgtgtattgaactgctgttctctgttttcttctctttgatatgtgcatttggtagagatctgaaattagacaacatcttgttgacggtcgagggacatatcaaggtggctgattatggtctgtgcaaagaagacatgtggttcgggaagacgacctcgacgttctgtggaacgcctgagttcatggctcccgaggttagtatgcttttctaatctttactcaagtttctatggtcgttgtatcttaaagcttgatgggctgatatttgttttattacaacagatcttgatggaacaacgatacggtcgagctgtcgattggtgggctttcggtgtattgacgtacgagatgcttctcggtcagtctccgttcagaggagacgatgaagatgaaatctttgatgctatcttggaggaccctccgttgtatccgatcacgatgcatccgaatgctgtcatgcttttgcaaggagtgggtttgggtcttgtttctcattatccttcagtttggtcggttatctgtcgacaagaagctgacaaccgatcgcggggtgaacgttatttcctagcttttggagagagatccggcaaagagattgggtggcggtgagaccgacgctttggagatcaagaggcatccgttctttgctgatgtcaacttcgatgatgtctacaacaaacgaattccaccatcttatttcccttcactcaaaaaccctctggatacgtccaacttcgacgctgagttcaccaacgagcaacccacgcttacgcccgttcatacccggctcggtcaaagggaacaagaagagttccaaggcttctcatgtaagtgcttttgcccttctgtgatgaagtacgtttgtactgatgtcgatctgctggcttcgaacggcattcttcttctctagggatcgcaaactgggtcggagacgcttaatacgacacacacgtctatactccggctagctggcctattttttcttatccttgtttcctctggatctcttgaacaccttactttctttccatccttcatcttgctcggtatcactgttgtccctcttgccttcctccgtatctgtttttcttccattttatgaccccttcctaggcttctcttaattcctcgaccgcggccttcgggctttatcttctcctttttgtacaaccttcttccttactcgctagtgattgcgaacgccagattctccgtctttccctattgattgttttgatcgataatgtcttctattcttccgaatcttcttcatatatagataaacttttcttcgctcatggttcatctttctttctcctctcttgttggatcaagttttaattgaagaaccatcgatcattctcgacttcaaatgtaggttgctccgagattcactctacccgattgcgtctttctttctcctttttcctccccactcttttgcgttccttaaaattctattcgctatacaaaacctcttcctttttttctccctcgaccttttttttcgttcactttcttgcttgttggttctccctttctatgtgatgacagtgatgtgcctggatccttctttcctttcttttttcttctttctttttacctcgtgttgtgttgtggttaatctccgattttattttgtttcatctcgtttgaatagttcggttcagcaaatcaagaaaaagacgaatcaacatcaggatacaacgagaaaagcgccgagagaaagagatctcgatattacaaccttcgaaagaccagacagaaagagaaagatagaacaaagacctgagagaacaggccaggagagtatcaagtagactgaacatagagtcccctcatcttgttgccgactgctaatcgtctacgagcttctaaccaactcatcgattctgcatatgtctgttttcattccagaacaaccccccaccccccaccccgagaaagacaaacccaagattattagaggattgtcggttgataccgattcaacgcacgagaaacggtcaagaaggtgaaagagggaaggacggacattggggataacttcgacgtctaatcctgccccgttgtcttctttttgccatgtaaagtggaaatccttcgtaaccaaagaacgcaccaagaatcgaacaagccaacaaagaaatcagtataaagatgcgctgaataaggagggaaggataaacgtacgttggtggtgtttcttctaccggtggaaacatcaaccacatcagccgtcacttgagagtggacctggtttgtgctcgagtccgtatgggtcaccacggccgttaaccgaaggacagaaccgatcgggactggaagtctgtcgcgcgaatagcatgagaacatacacatctgaatcagagattcttatagagaagtaataagaagtaaagaccaaaatagatcttacttgaatgagatctcatctagagctctgtcgttccaaacagaaaaccatcagaccaggataggggaaacgtatgtgtagcatagataggactcacaaaaacttcatcgggcttcgagtgaatagtacgacgttactgtacgacagctcgtacgctaacctcatcagatatcctggttgagcaacaagacaggaaagaagaaaaaattgaacccagttcatcctggactcgagagctcaagggaccagaattgagagatgtcctgacctccaaagatcttggaatgcatgtttctctgctgaggactagctcaaccaaaggccgcaacagaattagattagattcgctactcaagaggatcgtacgtgactacatatatactgactgcattaggtggtcggcgcttgtctgcgattcaaagtaaaacagtacatgaaaggagcatataagcgctattctcgatgaaggggtgaaggcatccatcgactcaccagagtgtcttccatcttcacaattctcttcccctcgcttttagctgcatcaatagattgatggtttaggataaactgatgaagaatcgccatctcctcagatgtaggagggactttcgacaaagatgtcttcgagctagcctgttttcgccttttatgctctgatggagcaagaagagtggtgtcagagtgagtgtgtatcattgagacgtagacactcgtagagatatatgtatgaaccttttccgacttggaataactctttctcctctggagtttctatcaaaagtgagttgatccgtctagcggtatgaaacctagtatctctggcaaccatggtgaacctccctggtttgtttgacgatcagagataacaacacaaacataggcaagcgccgtgagtttctacttcagatcacgatgtcacggatgaacatagcacatatacctagcatgagagtctcgctcttttcgtctggcccccgaagtccctccatccgaacaaatacctccatactgctgctccccacgaaacaaacctggccactcaatctcaggtcttgaacctatccgttaaagacatggagcgagcgcaagcttgagccatcaatacgagggaaggcaggaaagacataaactcaaagatacgaaccaagagatccttgaacaaatctaatctgtcggctgaagcggttgccatataaaccgaagatttcgcttctccatctgttcctacagagccatcatcctgtgacttggccgggacatacaggtgcttataggcgatcgcgcctgccaaggagtctatatgctctgtaagcttcccaatccgtaaaccgccagaagtggagatgtagtcatttagcagagttgggtctgacgccaaaggaaggttgatctgtccagtccaagcgcacatcatatgttcgacgatgtgacgagatacgaaagcaagtcaaagttactttagccgctagcttgtataagaagcaaccttagggcagagagactaacctcaacgtaagagtcagacatccgtctaggcggtagctcctcctccttttcatccgacctcacagcaggcttcgcttcttcagtccctcgcgactttacacccttcttatcttgactatccattccaggataataggtgaaactccaaggctcgatgtttcgaacaccctgccatagttgaccagatggtctcatagcaatcccttgtctatcggatgatatagtttgatcacctttttttttcaagaatcaacatacacaaagaaaaatctcttagtatcctagcggacatcaagcccttgagtcaataagcaaaacaaataaaaaacaaaacttacggcccacttgatcaagaagttggtctatccgagtcacatccttcaattcttgacgagccttttgattctgtacaatctccgtctgttggttcagattggatgagttaagctgtctgtgttgagcccatcgtgtagccaccagtcctgcctttgagaggcaatgagaaggatgtctaggacagaagtttcgaatagcaatcagcatggaaatggaaaaggaatccaatgacggttggttggttggttgagagattcccaaaccgagtcagattatccccagaagagataagatctttgcacagttggcttggtcacgtgatctagcccaaccattctgttcaaactaagcacacagagcgaaacaaagtcttgggatacgaaagaaaaacgatagagagagcgcgatcattcaagaggaagtggcaagaggaacagatggaatagaaaacgataacatgaaatctaaacgttcattaaccgaccagactcttccttttcctccctctctttgcaggttcctttccggactctttacctatcacatcatcatcgatctctcctctcttgacgtttgccagctctttcgccgcttgttttgcacctcctacccaaccggtacaataagccgctccacacagacagcgttgtcggccgggtacgatcaaggtggtcgaccctgaggtaggcgttgactcagtaccggtttgagcggcagcggtcgatttgatctttgtagagaaagaatcaaactaatcggtcgaatatagtcagaatcgacatgaaacaacaggccaaaagcgcggttcaatctgaatgtagagaaaggggaaggaattcacattgtagtcgtagaaaagttcttcgccagctttgatatctctcgttgtccagaaccctacctcgtattccttcgaaaggaaaggaagatccgaaaacaataaaagacaagaatattctttgagcctcttcgacttggtttctagtcaaagatgaagcgttgacctacctcaaacccttctccgagcgtcatccatttttcgacccgaagatttggatcacagccatctgtttttggtccgttagacatataatgaagagcgcgcactcagtaaggtcttgatcaaagacaagaagagtagaagagggagcgaaaaaggaacggacggttgataaaccgagcaatattccctttcaacccagaatcaagtacctctccatctccatagtcaaccgcatagaactccttcctgtccccgtagatagaaccgagtcgatcatagtattccgtggtcgatacaaccttttgtgcatttaatttcattcagttcaaagaaaaggaagatattgattttgaaaggaggagtgaaaggttagccgaaataaaacttagaataacataggaggaagaatgaaacaaacctctccccgataatcaatgacaaaagaattcgctggaatgaactccatagctttaacggtgaacccccgatcagatgtctaaccaagctcatttaacgagaagcgctcaactgtttagtctatctattgagattaatacaacagacagtacaaaagaaagaaagactcacggagaagactttgatagacggtcctgttcttttatagagagacttgttcaagcatctacatacgtttaatccatccatccattcaaatctcttagcttctgctctgcttctagtcgatgaggataggaagagaagaagagggaaagaagaaggacgaacacttctccgaaccgacagttcttgggatgacatagatactgcatcgctctaagaagcccattcggatcgatttaaattgattcgggaagatatcaataccgagtaccgacatagacatcaacacccgaatatggttagatgagaggaattcctcaccgatttacacagtgttctccgcaggcatcgatcaaactaccttgatccctgtcttcaggtttccatcccggtggtggtcgacatcttttttttaccgcaagtcagtgcgatccaaccccgatcaaagcaagttgaaaagatggaagcaaagatgataaaaattgggtttgaaaatgaagatatgaacgagaagaagaagaaatgatacggaatagaacagaaatgagcatatgttttcacctctgggttctgaggccattttcctcaagctcaataagacatggttctatgacttactcgcattctgatggctgggccagatccttcgctcgattaggatacgtatctggttaattccatgattacatagaaagatattccccacatcacgtcgcacattccataacagtttgttcatctttcatgttctcagtccaaccataaggaaggaaaccaaaggagggcaaaacagagagaagagaaggaaaaaaacgccatcctatcaatcctcaagaagacgtactcttcgtaatcatcttgaaccctgccttcttcccatcgatctccgccatcgcttttcctccattctttccagtttttccttccttttctgtgctcgctcccaattgagattcggtcttaggttttgcttttcccctaccctttcgtttgttttttgaaccgtcctcgctcatgctcgagtcgcccacatacccagcgggatccaaagtcgtgttgggattgacaccaagtgtggccgtggaggccgtggagatacgggggaggaaactagatgaagggatggatacaaggataggattaaagttggagggtataacagaagcgagcgacgtttggtgctgattatgagcaggaagaggcgccgaagatgaagggggtgacaacgaagaagatgaggacgatgaagaagatggtgccgaggaggatggtgtggatgaagatgaaggtgccgaagcgacagaaaaggtagatggtatagattttgcaacggagccgatgggcacagaggacgcacgctcggtgctgggtcccaaaccaccaagtttcaatctgatcgagggtcccttcttcttgaccgctaccgcctggtctgcaacgaccgactctgtcggattcaaaatgagcgataggttcgaggcaggaacagagccggaggcgagattaagagaggtaggatgagaaggaggaggtgaacggtgaagtggccggaaagagggatctggttggctcgacaaagcatcgttcacagagaatgttggcggcaggagctgtcttggtggtgacggtggtggtaatgatgattgctgctgtgatgatgttggtactggttgagtcaaggacgatgagccctgaaaaggagccaccgttgaatccgtttgagcagagactggattggacaggagcggaggcgacagtttcgatttctttgtcggtctttgtgagtccagggtaggacccattgagtgaatcaccggtttctcatccttttccgccacgtcggcgacaggtgcggtcgcagtcgctggctttaactttgctagttcagccgcctcgttcgctatactcaactcttcctcctttctctttgctttctgtccggccgtcagcttgatctctcccggactgcccaccaagacgacgtttggatctccacctttcccgcccggtccggtggcgacgtgagcgaagcctggtttgatcaaagagactacattccctggccttctcgttccttcttcactcagcattcccttgatggcctgtgcctgtgcgcctggaatcagactggccgggagacccatttgttccattcgtttctgaacggcgatcttgactcttgcttttcgttccttgtcggacctacgggcgaacgaatccttggtcgaccacgtcccagccggaagttcaccttcgaacggagggatacaccctaggtcgaccccacctacgaagagcgaggtcacggtgggtgcgagtatagtggacgtcgaaccgggtgaggagtggacgggtggcagagtcgacgactgagaacctgcctttggaaggggagtctcggatagacgggcaaatggtgctttgaacgctctcgaacgggctgctggcttctttgtcgtcgccgctttcggttcgcgcggtacgtacgatggtgcagactttgtcggcgcaaaggatgaagtggaagaagaagaagacgaggcggaggaagaaccggtggcagctgtgttgttgttggcggccgctgccgctgctgccactgctgcttcactggccaggacggcaaacgttctgggtccaacgaatctcttcagctttttccctcctctctccgctctaccgccggtggtacctgctccgccgttatcggtgccaccgacaccaccggtggccgatcctgactcgccattttcgcccgaatcctccatgtagaatccagcggcgggcacaccgacgccacctgagggtttggcgcgaccggaccgtcgacgggttccatcacccacagcaacggttgcgctagtcttcttggcatagacttctgggtcatgacctggtgtggatgtatcattgatgaaaaagatggccgggtgggtgagtgggacggagggataacctccattgaagaacgaagtatggtagtagctgttggtgttattgttgttactgttattgccacccgtcgcggtcgtcgtcggaagagcatcgccattggaagaaggagtgtttgaattcgaggttgaatctatatgggagactggacgctctggtagtcggaagaaccgacgaggtcggatcgaagccatcgctgtgtaagaggaacggaagcagatggggagaagagaacggaacgcgcgcgcgcccgagacgaagcatgaagaggaaaggatgggtgtcagtactagataactcttagaacgaacggacaaacagaagcaacgaagagagcgctcatgaaagatatcgatgtggatgttgtgaaagtgaatgtgattgcgtatgtttgtgtgtgtgtgaggcttgtgcgcgcgcaaaaaggagagatgcgttctggacagatatgagaggaacctgaacgaaccccacaaccttctcgccagaacgtagtctctcacttgttcactctctcgcatacactggcacactttagcagcgcagaacagaaggagacgatccaagggatcaaacggaacaagaagaaggagagagaaacgaatgaatggatgagcgcaggggtatcagaagctcagacaagcgacctttgcttttttctctccttctatttttcctctccctcgccctgctaatgtaggcgcatacatacacccagaaggagcgcgctcaacgcataaagagagacacaagactcctccgagagaagagtgaacacagcaaagaaaacagaccgaccaagaaaccgctgaagggaagagtgttgaggaggagagagaaagagagagaagagagaaaaagagacggggagggaaatcgcgcgcgcgcgcagtagtaagagcatccgcagtcaggtacatacaccttcgtccttggttacaacctgacgcaccggccgcctctctctccctctgggctgccttagctacggtcggagttggaaatgtcacgggtaactcgcctgatgttcctcagccctataaaatcacagaggatcctttctcttttcgctcgttcgttcatcattgacttctcgctctctttgctgtccttgtgagtactctctttctctgaatcgatcatacccatgtccgcatacgcacacactctctcttcaaaggatgaagcatctttaaacacatatcaactagaagctgtttcatagctttcgggcaatgattgtttttttcagaatcgccctgaaccctccttttaatatctccctccttctcttcttgatacaacattccgttgtgagagaccgagtactgattcgtgttccttttgcctttggtctgtttgttgtcttgcgtctggcaggatctttatagttatactccttgtttttgaatatcatgttatcatttacacaactcttgtcgtgcatcgttcaaacctaaacctctttgaaacataatcatcagaactgagagaaaggaaataagaattgttttaatggaaacaaaggataccaggttctgacgcatatcgctgatctcttctatattctccgcgctcatatcggtttaagagaagaatgaaatcatattgatacactacacgtcaaactgggtcctattcattctgttctttttttaagtatctcgttcaacgtctcctctgatccctatcgctctcttcatccgaccgagcaggactctttgtcctttgtttcctcggaggagaaggtgatcgactgtcgtatgacctggctcgaccatctcgacgagaatgggatgtcgttctcctctttcgtggtctggaggaagaggaggaagaatctgaacgcgagtcagagtctgatccagaatccgagtcggaaccagaatcagagtcagagtcagaatcagagtcagagtcagaatcagatccggatgaagaagacgagaccgaggatctattggttttaacccgccaaaacacacccaatcggaacgacagaacgcacacaactcagtacagacacacatgagcagcagagcgagatacctgaagagaagtaacgtacgctcgtctcgatttcttattctttgagcttcctccatcagcggcagcggcagccttgagcgcctctcgttcctttctcttctgttccaatatctttgtggctgttccctttctgatgagccccaagatcaattaaattcagaccaaaaggatgataagctcggtcagactaatcgtcgtgcagccctatgtagtggagggaaaaaagagaaagagtagacgaacccagagttgagaaactcctctggaacctctacactaggtgcttctctctttgcaggtttcgtcagctgttgagtcctcgtcggcctaggcttgtacggccgttcgttcttgcattgataagagtaatgtcctttatgcaggcatttctggtttaggaaagaaaggattaaagatctcgtcatatcagacgcgttcaaacagatcgtacaatcacatagcaaaggcgaagaatagagttgggatgggatggcaagcaacgaacctggcaggtcgtggtgggtggagccgaacggaaagtaccagagtcagccgtctttggtttccacatctcttttcgttatcttcttcgtgtcttttttgtgagagtgatagagagaagaggcgtagagttgagtgagtagaactagaaactgtccacacacacacacaaacacacacacacacacataactacaagaaagcagagtaagcagagaagaggggcacgatgggtggtgtaaccctaagcgtaacattacgtaatccgatcacccatcactctacgtcattagccgtccgtcggactgtgcgggaaggatctctcgattgtctctgtccttgtacaggtgacagagcatgtgttgagggatgccatcagaattgaggagcagacctagtgatactgatgatggtgatggagatagtgatggcactggcgatgggactgcaaccaggactgagtatgctgaatgggatggagaactcaagtgaaggtgatcaaaggaaagtgaacgttcgtccagaaggctgttcaatcagtccccagacagaggccgccgctgagcaaacacatacacaccacacacacacacatctccagacactcacacacatgtttaccatcgtcatcggttcgatcgagactggattgtaccccagtcaagattagttccctcctaacagctgacctcgagattaggatttgatctctgatctccataaaaggaagagataccttctgtctatcctgtttctctttccctttctctttctctttctctttctgttctccacattccacctagccttctcgccactcagcctatctatccgtttaccctttacacactaacaactccttataatgcatatccctaaccttcagaccatcatggcttctgccctcgccttctctggtgccgttcagaacaaaagtacgagccgttctgtttcccgcatgtcttcccgtcccgtttggttttggtgatctgatgcattctctacatcctgttaaccatcaattgtttgacatcccggtcatcagacccatccaccgtcgcgaagggtgaagttctcgatttctgcaataaggcttgtatcgacgatgatggcaacgcacactgcaccaagcctttcgctctcgaaaagtcaaagtgttacgagtaggtatctcaccatcccgttctgttgtatcatctaccctggttgacactatcgatcgaatggttggacttgtcctaggttcgcttggcagaccaagggtaacactttcactcacaccaccctcgagcttcggtaagatcgttccttctctcttcactttctctgcaccccggttctctgtaacagaccattcgtctgaccgccgttgtgtgttttcttcttcttcttcttcttctattccctcaaccagaaacgtcaagaagcccaaggacgtggtctactacagggacacgaacggaaagtacactgtcgagaaatctgggctttactacctcgactttgtcccccgaaccggttgcgacaacgaagtcgagtacgagatccagacttgtgtctagacggtctctcgatactcgtcttcgatatttgacaacaatactcctctgatgatcttctatctctgtcttgcccctccccaattctgttatcccaccacactacttgtagcccatagccttctgccctgcctttttcgcgaaacacctgagttggaaatcctatccgatgtgttttcgtctgtaaatagaaagaaagaagcctgcgagccgaaagagttgtttgcacatgctcgcattgaaaggtctgttttcgagccgaacgggaagaaagaatatccggacatgcaagacaaataaaatgaaccaaacatcaaagataaatagcgcaagaaagaagagaaggttgatacagcgtatggggtgtctagatgccaagatggtgggtgatgagagtacagtgaatgttgagggatatagaggtgaatcgtgggtaaaagagagagggagatatgtgagaaaatcggttgatttgacgtatagaccttaaaagccaggcaaaaaaaagaataaaaaagcgaaaggagaaagaaagaaagcaaaaaaaaaccaagaaagagaggaacacaagaccgaaccaagatctacagaaacgggagaaaaaaacagatagaaggggagtgagaaaaagaatattacatccccgtctcacattattgcgcaagctgcacatccgcccttcacttcctcatccccaccgcctctacttcttccaccacccttacctccacctttacccgtgcttctatctatagattgttctggctgtttcgttccgatctctccagaggttgtgttggatgccacattctgccctgaccggatgacatactgtccttctcgattctgcgcctgggcttgggtcgagggtacttgatctgaagaactcgatcggtaaggttgactaggagaccaaaaataaaaagaaccagaactaatcaggcgcaggtccaaaaagaattaaacataagaaaggatagacgcctgacgtcgagaggaaagaagaagaagaagaagaagaagaagaagaagaagaagaagaaaagaaccatggacagaaaaaggaagtacatacgatccattcatgtgagacagagactcgactcgttcacgttgtctattgagagaaaccgaaccgtcgtttcctatagtcgctccaagagaatctagagcgggtgtcatttgcgcaggaggaatcggatcgacggcggttgttgttgttgttgttgctctcgtcaaaggcgacggcgacgaggagagaggaggataagggagagctttatggtcggacggccgtgaagcctgttcagtccctctgtctgttccatcattgattgggcggtcgacaaaatcattcatctcgatcaaatcgaacgattcctctttacgcgccggtccgtcggcaggggttccagactcggtttgagagacctgtgagatctgagcgagtcgtctgtgggagggtgatataggaagaggatcttgccattctgagagcgggttgatttttaaattcttccggaccgctagagcatgcaagggatagaaagagcgcacgatatcagacttcagacgacaacatgataataaaaaaagatttaaggaagggagagaagtagaccaactaggaatgacgacctcgtcccaattcctcagctcattcttcgtcggcggactagagctactaggcgggacggaaaattcgtcaaacatgctcaatctatacgacccatcaggtgtcataggtgaacccgaatctggctgtgcctgtctagatatcgaaccagatttggccggccttcgcttcgaagaaggatcagcagaattcgtcggaggtgatacccgagatcttgaattttgtctgttcttcgtggtcgtggtgtttggaggtgaagtccgagaagaagaaggagtgacaccggtttgagatgtcttgattggagtctgagaattcgtacgaacgatagatcctttaggcgttatcggagaagagcctattgactttgatcttgttggctgagctggagaaggaccgtctctatcttgaacattctgcgttgggatcatgttcgtctggacggttggtttcgactgacgagcacgatcgactgatcgtctaggtatactcgaagattgctgaccggttgtaccactcatcactctctttctctcgttctgaacggatccgtcctgtcgttggccggtaggtcgcatatagccatgtgtttccgttgatagcctaccaacaaatcccgtctgcgccgcttccgacctctccgaaccgtacaacgtttccgaaaggtcttcctcactcccgattccgttgaggatgcccacaccatcaggaaggtggccgtttcgagcttgtcgagcgagttctttctcggtaaacggttcgagatgacctgtcgcactgattaaatccctagacaggatttgaaagggagcgatttcatccttgatcatcaattccgaccgaggttcttcctcgccccatggatcgttcatctctgagagtacgaacgccatgagaaagaaaataggcaaccgagaagagccgggtgttatctcgagcgagctgagggaacgagacgagctgtctatctggtaggtgtttgagggagacagacagggaacatcgacagaaaaaaaacacaagtgcacgtctcataaatcccgatacggatcacgtggatctcactgataagattgtgggatagaacgtttcctttatttattgattgactgactgactgactgacttgacctggaccaaaagaagcagcaaatcgatgaacaagaacgctctcgaaagacttaacgagagaacaaagagaaggtaagtaattggctgtaaagcctgaaggcatctataagtttctacttctttctgagaaaacaggatgactagaatacccgaacccaaaaaacgatagagtaagaagagaaaaagacgaagacgaagatgagaacgtagtatcgatcaatcgatctagatatacgggaaggaaaagaagaatcggagagagaaaaagctatttgatctaacaaacaaataagaaagaaaccgagggaacaacagagagaaggattaataatcaagaaaagactcttaacctttatcaactgaaaggagatacagaggggaatttaactctttttttatttacccaagagcgaccgttgaaaaacttcagaacggcttcaggtacgatatctgtagaaatacacagggttttggatttggaagaagaagaaaagagccaaagagaatgcgcaaactcaaaggaaagaaaaatcgaaagatgacagccaagacagaaggaaaaaaaggtgaagaaagaaagacaaggagagacgaaatgaaagcaatcgaactcaaagcaactcaaagagacaacagagacagacaacaaataagcggatgacgtaaagcaacagaacgaaataaaatgtagaaagagcaagcgagaaaacgaagaaaaaagaaaagaaagaaagtaaaaagcagactcaagacatgaactgcgtcgagtccgggtggcttaattgctgtgaaagattggcgaattggttcgaggatagaccaacagttccgtacatatttggctgcgactgttgtgtttgttgggactgagcttgaggctgaggttggagttggaaaggcggggcaagaccgtggctaggagtaaccatcaaagaggagccaactcgaaggatgtcgacagaagtggccgaaggaggtagaagcttcaaagcaagaggaaaggaagggaaaaattagaaaaggctgatacaagcaatcgaacgtagatgatcaacatgaaacaaggcacatacttctgcaccataagcaaccgctttgatggctcttgccgttgcgtctgcatttgtctgttcggcgaactctctggagacatggccgacctcaatgaatctttgctgacattcagcttgagcttgcgcgatgaccgtattggatatcaacgatgattcagagacaagcaccgctttagatataacaggcagacaaaacgagaaagaatgaagcgcgagagtttgagtcaatttgtcagacagcaaaatggcagaagaaaagaaagaacaagaagaaacggacgatgggcgccaatgccggatggctgaccagatgcttcctggattaatcaaacgagtgttcgaagaaagttagtatcatcacaccaacagaacaaagataggccaaagtagattacgaacctgcacagcctgaatcaccgccctctctgcctcctgcaaagggaacgaaggaggcatttgcatcgatcttgggttcatgttgatgttcgtttgttcagacagcatagaaggcgaagagaccaaattcggtctttgatcaacaagaaaaaagcaggaaaataataaaaaggaagaacgatggttaatcagcaaaagagaaaagaaagagagattctctcgatagaactgaattgatcacccactggtgtaagaaactagtcgtcaaccctgtattatcacccacgaacccaacgggagtatgatgtactggctggggcaaagggaacgaagggtactctgttgaaggcgaagcctgtagcgaggacggggcggaagcagcgttgaacccagactgagacggcgctcgtgacaaattggctcccgatttttctttgatgaaagattgtacagttagttcgcccctgtgaaccacgggatggtgggttggctcagccggaaactattttgccaaggtttggaaatgatgaaatggtgagtaaggtggactcaaaaacacatcctccacaatcaatcaatcaattaaaccccaagaccgcgacagagaactcacagtcgcaacagtctcgatgacgatggtctcaacatggtgaggcggaattccggataaccggttgtctttccacttcaaccagacgggtagtgagcccggtggcgacgagaagaccgcttcgatactggaagcagatgtatgcgggtcccatactcgcggttgccactgtttctccatccgttcgttgataacagttagctaatcgtcgcgtcggtctgactcccaacccaaggaagaacaactcacttgccacattgcaccaaccagcgcggtatttgtgaagtttccattgatcttccgtgagcttaagaatgagaagaagcgcaagaaggaaggtcggtcgatcaaccaagacacaatggatcccgaacgaaaagagcaaggaaaaggagaaaactaagataaaacacctacaactttctaaactcccagcctccttcaggaagctttcgagcgtcaacattccagatgtggtttcctttggactttgacttttttccatcctcgttgaatcgagcaatataggactggttccatagataatgcttaatcttcttagccggcatttgttcgtcgtcgaacccttcggcctgaagctgtagtcaggtgtgtttcaagaggccaagtcagtttccccgatttgaaacatgtgcaaatgaggcggaaagaaaacagagcacacgaactcgatcggtaaaaacgttggtaaatgcctgaattcggaacttgaaaggtcggaaatcccatgattcatcaagacgttgcatcttttttgccatcaacacctgatgcaactgttcgcctttagaatcggtgacgttgactatcaaataaacaagaaggattaaagaatggtcaaaaagtgtcaacaaacccaaaggaaaagaagagccctttttgttatgaaagcacgagaacagagagagagagagaaagcttacgatcagaacagacggcactcaagaaccggaggaagaccccatccagacgctgtctaaattcttcggagtacaacacttggccgcctcccagatgatcattcgaagatccttcacctcccgctccggaactcatccgtcgcttcgactctcccgggatgatgtccctatagtcgtacatctcggacgcatacatcctgctatcttcatcacccgagtcatccgagtcttgctccgagaaatctagatagaggggcgaggtcgagcttcttcttgaaccgaccgcctgggccgttccttgtggcagaccagtctgtatgttgaacagagaggaaaacacaggctcggctgtcatcgtcccacctgccgaagaagacacaggtgaggccatcaggttttcaacgtttggcggattgctgagagtagaactcatccctcggagacggacgaccggcctaccgtctgctgtcgtggcggttgatgaactccgtcgggaagacgaattcgaactggggtttcgaccactcggtgttgatacagaagaagaagcaacggggagcgtttgagattgggaatggacgtgctgacgcgaggaatctccactgcccgaccggttgccgacgaggcccatcgcgcttgtcccagcattgtcgaccgtcaaacccgaaaactccaactgattctgcaaatccatccccattcccacattcaaccctaatgactgctggggttggtttcccgaccaattctgcaaggcaaccggatccatcgtaccccctgtcatcatgtcaaactgcccatggaatgcaagtatctgctgcagagacagagcaggcgacgttgaatcgggtctcgaagttgatattgctagaggggagggaacaatagatgcatgcgactgctgaggttgggtctgaggctgctgctgctgctgttgctgttgctgctgttgttgtgattgcggttgcgttgagagggatactgatggcgattgtgtagacggggatggtgtgatcaacgttaccggtgtcggggaagatcccaagccagatggtgacgaggatgaggcaggtactccgagggaagaggtcggccgcgtgggaacaggcgccataagggaggggctcaagaaggattgttggttctggtcaacctcactcggaaggacctggtgttgaacgttcgggaacgaatgagaatggatcatcggaggcggctgggctggagaggactgttgggaagtaactgttgtcgaagttgtaggagccgttgaagaggatggtagaccgagtcctagaacacctagctcgttcgtccgaaggtgtttagatgctggggcaacctcattggtctgcaagaccgatgatgattcggcagaccgttttgaatgctgaacctttgagacatcagcggatgagttgatcggatgagtgttgccggacaaaggtgaatccgaagaagccacattcataggcactgaggtgacagctgttggcgacaacgtctgtgcgagaagagagagttgccggggaacttggatggaggtgtggtccaaagacgcgattgacttgagagtactgctaatttccgtcagatcaccatgaggaatatcagcttctctaccctcaatgagagagttacggatagcagctgcctgtcggttgatagcggtagatgcagcttggatgctggtcgaccgaaatgtcgattccgagaacggagtgagaatcaaacaaggggtaagcatactctagaatcatccgacacgtcccgcgtttcctgttttcactttcggtttcaaagaaaaagtcaagaacgactcacgcttcgagatctctcaatcttgattctaatgtcatggcttttattctcattgaaagatctggtatctttgctcctccctgacttgaatccccggaagacacttgggatgaatggagcgaggaaaccattggagaatcctgcaggctaccacccactgtgccgacgggagcaaatgtgaagctgctggatgtacttgatcgaggtctcgtacgcgtcggcgagggcgtatggagcgagtagggatggttgggatccatcataccctgtaccgagttggtcggaggcggtcctatgccaggcgaaggcagaggaagcatagcatgtgatccaggcgggctgagctgctggagggatggatacaattgttgtcgtggcgagggagcttgagagtgcaccttgagttgttgaaagtggtgggttgggtctccaacgacggactcatctgagatatcggcaaatgctggatggttctgaaggtgttgctgctgttgctgttgctgttgctgggatagcagataatcctcagagagctgaccgaagtagccggaagagctagcctgagaagccgtggtgacggacataccccactcgctggatgactggagtggagactgtccgagattgggggtattgtagttggatgctaacgcttcgacaagagaattcgttggagacatcaaagggggaatctgatgagaaggggtagagacatttgaatgtattgttgcatggttgccgggatgatagatagaattcggagagtctagatagggtacggaatttaaatttccggtgaaaccggtatcgaataacccgttgaccggtccggcagaggccatagctattgagagcgacatctggggacgatggcctcgatgggtggtgaaggcaccgttcgaagggaacgagctaccgggctgagagctcgaccttgacctgttccctaccggagcagagttcgcggttaccctggctgcgacgacgttcgggtttgaatgaacgtctgagccagtcggtcgagtaggcagcgttccggatggagagccggtcatgttctctgttgatatcgaggggaccaaattagactgagtggtgatctgttgttgggaaaatgaggaaggagtggatgaagaagcgaagtcgttttcgacggatacggccggccaagagaacctaggtggtgatccttctccaatagtcccaaggctgaaaaaggaaggaaagagaagcagcagcaaagaaagaccaaggggtatatgcggtacccgaaagatgtcagtttcaggaagaggagagagagatagagagaaagaactaaatgatagaaagaaaagagaagaggaggaagagagaaaaagaagaagaaaaaggaaaaagaaagccagtcttgtgcttacggtggatttaaaggtggggacgacagaggcatatcaaggccaagcatcccgaactggtgagagttttttttgatggtgagagaacgaagtgaagagactaccaatgaaccaggagatcaagaggttgtaagatatggatgtgagatgtaagatgtgtgtatgcgagtgagtgaggtagatgtaccgacagagatggaacgggatgggattgaatttgggggatggatagtcgattatagaaagcgagactgagcgggcgtgtgggaaaatgcccgggtgagtgtcgtagtagttgtagtagtagttgtgacagtaggcctagtcagttctaatagcaagtgtagaatattctaatcagggttctagtccagttgtagtatagtatactgtactataatgcactataatgtatcgtgttgtattctaatacaccgtagtgttcctgtcgagagtgccatatcctagtctattaggctcgggctttaacactctgtcgcctttcactggcctacttcattcacactcggtgtccccgcttacttcgcacacttcgcatactccctcactatccgctctctcatcactttactcatacatattcatacacacacacacaca

SEQ ID NO: 1421 - DNA, 15335 bp, Xanthophyllomyces dendrorhous
cacacacacacacacacacaaacacaaacacaaacaccggcttttgcactcttcttgtccatctttttctccttctctctgctctatcaatttttcacttacagccatagtcacacgtggttacagagagtttttcgccgcaagttctaggcctttgacacaagtgtaacatgagcgtggtgctgcgcggcagctttcctcctcatgtggcgaataacacgtgtcatgtctgaacctcagctgtacgcatggttacgcagcaatccaaattattctcatccttctttcctcgcttctgccttgcgttcccttctcttttgccttcgagggttcaatcgtacaacctacagaactctacttttcagctagaagagatggccaactcacttaacaggtctctcatatcctcttggtcatcccagcagtcagctcctgccccctcgtcttcttccagaaagtctaaactcaacctaaacgctctgccttctccaaacactacctcttccacaaatcctctcgagtctcactctggccctcctacacctgcttccgagtccggtccttcgagctcgactgcgtccaaacgtcggactaggccgacttcaaccagctctccgaatcctgctggatcagccaccaaacgggtaaaaaccacacctagttccaccccggccaatcgagagcctccgacggccagattggctgccatcggtggtctgaccggaaccattgagaaactactcgagcttgtggctcttcccttgttgcacccggagctttaccaagctaccggagttcaaccaccgagaggtgtgttgctttatggtccacctggttgtggaaagacgatgatcgcaaatgctatcgccggcgtatgtttctctcttgctctctctttctctggcctctgaccgtggatcgagctaaactttactcgcaaaccccctcacaggaactcggcatgccgttcatttcgatatctgctccttccgtcgtctctggaatgtctggagagtccgaaaagacgcttcgagaaactttcgaggaagctcaggtgtgtgtttggatgttcggggtttcggactatgatgtctcaatcttttaggcctgtcgtgctccaaactgaacgaggctcctttgaatctatgtctcaatcacctcagaaaattgctccatgcctgctattcatcgacgagattgacgccatcactcccaaaagagagactgcccagagagagatggaacgtcgaatcgtcgcccagctcttgacgtgtatggatggtaagtctccgactttttgcgtctcaaacggagatatgagacctgacctatctctttctctcccttctctcttccttccttgacttcccacattcagatttggcatggcacaaagatccagagaagaaaccagtgattgtgatcggagcgaccaatcggcctgattcattggatcccgcgttgagacgagccggtcgattcgattgcgagattggaatgggtgtacccgacgaagcaggtcgtgaagagttagcctcctttttctccttttctctatctctcatcttgtctctgggcctctctcaaagaaagctcattccaatgatgactaatcaatccacgacgcatcctctttcttgctacaagaattcttcgaacgctacttgctcctctatcgattcctaccgactttgacatccgggctttagcaaaggcgactcccgggtacgtaggagctgatttggccagcttgacgagtgctgccggagtgggcgctgtgaagcggatgttccgagaactcggtacggcagacttgaccgcacataactctccacgtgcggcattggaggaacttctcccgtcggtgggagaggatggccctgctggaacggctctcgagggatcaatcgaggaggacgcgaccatggagaacggggacgcgcctgacgagtccgggatcgtccctcccgtggctctttcttctttactaacgtcatcgacgcccaactctccgccaagcacccaacttgttcttcccacttcctctctatcttcatcatcgacagaactcttccaaaatttgtcttcctccctgctctctgctccaatcactcaattcctcaaacatcatacttccgcccttcctccttccttactgtccacccttagaatccttccttccgatttcaagtcggctctgcagacgacccaaccgtcctcccaacgagaaggtttcgccaccatccccaacgtcacctgggccgatattggagcgcttcactcgaccagagacgaacttcacatggcgatcgtccaaccgattagacggcccgagttgttcaaacgggtcggaatcgaagcaccgggaggtgtgctcatgtggggtccaccgggttgtggaaagactctgttggctaaagcggtggccagtgagagcagagcaaactttttgagtgtcaaggggccggaagtcttgaataaggtgagtgtccagtgtttcttagagaaatgacgatgatcacgacagaaacagacaacacggattcatcgggctctgacaaatgatgtgtgcgtgtcttgttcccgatgtttacgtagtacgtcggagagagtgaaagggccgtcagacagatctttgccagagccagagcatcagcaccttgtatcatctttttcgatgaactcgatgcgcttgttcctcgtcgagatgatagtatggttcgtccggaatctctatttatcttttgaattcaggaggaatgaagctcaagaggtctttcctcctcctcatcacacacacatatagtctgaatcatcagccagagtcgtcaatactctcctcaccgagctcgatggattggattctcgaaaaggaatctatgttatcggagccaccaaccgaccggacatgatcgacccagcgatggttcgacctggtcgactcgacaaattgctctacatcgatctccccactccgaccgaacgagcagagatcttacgaacgatgacaaagaagacacctctctcacccgctgccgaagcagctctggaacccctcgcgaccagttcggcatgtgacgggttctccggagccgatctggcggctctggtcagagaggcggccacgttggctctgcgcgggaagcttgaacaggccggcgcgttcgaggtggacgacggtgtgctcacgttcgagggaaaacatgccgatcaggatcctctcacacgaagcctcgacggcggcgcaagcggcgaggaggaagagacgatctgggtcgaaccggagcatttcgttagagcggcagaaaaggtgacgcctagtgtgagtattgcccagagaaaaaagtatcaggcgttgagaaacaagttctcgggcttgcctgtcaagggaaagagagagcccgagttagaagcgggcagaccggtcgaggcgggcagcagttcaggtgatgctgtggccgatggcggcaaggagggtggatcgaacgaagagatgaactagaagcgagacaagaaaccaaaaaaaaaacacttgtggctctttaatgtctttcccatctctctttcttctgccaattttcctttctccttttttttccttccctcttacatgacacgctcaagcgaaatttgaaagaacacgagaagaatattctcccttttgtcattattttgatacttttcatacaacaagcaatcttcaacgaaacgttgacactgtcccgtaattctagagacttttcgacgagcacctaacaagccttccagcaaccaacccagatactcccaagaagacacggaaagatgagcaaagacacagacacagacacgcgccttttacttttcggcgttttgcttccgggcgtccgttccccagatgaaataatcacatttgtactccagattgacttcttctcgcagtcgaccattcttctttccgcccgaatcatgacctggtccaagaggtcttttttatttttatttttattattttcattaaaagagcccaggaaagagaagaaagagaaggcaaagcaaaaaacagagcgaaagggaaggaaagaatgagtatacggagagatgtaagtggagggaaaaacaaacaaagaaggacactcacaacgaacagagccagaacttctttcccttgttcggtccctgcttcgtcaccgttcgctccacacaaggcgcctgatgaaccctacatctcggaggttccaccttcttcagtagacccgtccaaagctgagctgctgacggcgcaggttcgcccgaatccggatcgattttaggatctgtgttcgactcggtttctttggcgaacgcttgttcttcctcttgagcgagctgaagcgcataggctctatcggcggcttcgtcaggctctgagcgctctgctgatgtatgctttgcgtccggttcgtctgagtctgagcgcggccgtttgagttttttgtcgggcgagatagaatgtgggggcgatgaccgtcttttcttgaaagccaatgtcgatgctgtcgggggcgtggaagaaggagtcgatggagcgaagaaagagaccaatgatgtctggccgccgttcggtttgatagggctcgatttcgttcgattctgaatctttggtctcgtctctgttggcttgatatccccccatgccttttgatgttgtttcgatgctgtcgatgtgggtattggagcgggtaatgtttgagaggacggccgttgcggtttggcggggattgagcgaggagccattagttcatccgattcgtccgtcaggtccacgacgacgatctgatcgttcaccttgtccgtcgcagttgcaggcgctttggaaggggcgaccttttgtactggttggaagaacgacttgatgctctttgcggagaattctggatagaacattgtggccagctttgggggttcattcgccactctcgtcccatcctctcttggtttccccactaccttgacgtttcttgcttgctcttcgccctcttgatctgaacgttcagacgaagagttagctttcaaggtcgagattgaaatcgagggttggaaaggaacgttcaacatgtcggccaataatctcggcttttcctctggcgagaggggaggcagactttcgtgcaggtctacatagacaggacagtgatctgagcctctgatatcaggtagaatatcacacgacttcacccatgggagtaagccttttgtgacgagaactgtatgataaaaatccaagattttcacacccgttagccgaatctttgagatatccggtttacctccaagaaggaagggaggtaaggaggacaaactgtaatcaagcctggtcccatagtttgaagctcgagcgtcgatcttcgtgttccagcctgtccgattttgcgtggccgcaagccaagttcaaaggcgatgttcgtgaacaaacgagacttcacagggcagagggtgtcctaggttgtaccaataagctgttcgaccgaacaagaaaacagtcacgtacaagtaaacattttctctctttctggaaaggccgatcggacgatatctgtcataattcctttaggttcgagaaactggtcgaaccattgtctagcctattaggtcgaacatcaaagtgaagaaaagaaaaatatgaacactcttgatccactctctcacttgtgttatctctgttcaacagacgcaatacaccacgccccaaacaagaaaacaagaaagaaagagagagagaaagaacgaacaggatgatcccaaaacccgttttgtttactagccagcgtgccctctccatgatcgctcggcctgtgaacgacgttcatatcacccaccaccatgacttcccttccgttcttcaccagttccttcactcttgcctctaggacggtgagaaagttcaatttgaacggtaagcgatcttcgttcgtctcgttcgggcaatacacatttataagaataaacatcccaaggtcgagtgtgagggatcgaccttcgacgtctagtttccagagtggctgttccggaggagggttcggtctttcgggtgtaggctctgttttgaacagagggatggatgaaacgtccggatagggtaggacatgatcgtctgctggaagaggcaaagacgatggcgaggatgtgggaactgaggaggaaggatctttgggagagatagacaagccggtgattccttctgaagctttgtgcggcacaacaaccgattgagaggtatacactccgacgcctgaatatcctttaccagaatgagggaacgacaggaaggcgtcataaccaggagggcatgcttgggctttcgtcaggttcgatcggggtatcttgagctctgagcgacgcgaacgggaaaaccgaccgggaaaagcaggagccagaatgaaattagtctatacaagcacagagagagagagagagagagagagagagaggttctcaaggctaataaggatggaagtggaaatagagagagaacgtcctcaccctggacacataggatatcagcctcgagttcctttaggacggcatcgtacgtcttgagcgcgtaccacggactgtagttcatcaacgtcttgagcccattgacgttccaagtgatgatcttcatgtcgaactgttccgatgcgaatgaatcgagtcaacgtgagagctgtgtgtatgtaagtatgtatgtatgtctatgtttacgtgtacagatccggatggtgaggggaacaaggagacgatcggcgttgagcgagagtcggtgacgtgagcaaacggaccggctggatggattatccggtatttctttctctccgcctccgatcacccttcgtcttttttccagctttcaagatgtctctgcaagatcaggatactctcgctctgtcgaccgagctcacggaggaagatgtgaacgtcggactccgactagcgatcgaccaggctatgaaatctcttggggaaggcggtatacccatcggtgcttccgtgagtgtctttccgatacttgagaggaaaatgaaaaagaagaaaagagaattattctctctctctctttctccaagtatccactttgctcatgatgtttgtcgccctttacgatgtgtgaatacatgaatcaagctgtatcaccacccgaccaagaagatcctagctgtgggacataatcagcgagtgcaggtgtgtgtgtgtgtgtgttttttttctcacggccactttatcgttatctcgtgtgaactgagcgagaggacgaacagacggacggactgacgatatcgcaaacgaaaaaaacttgaccgaccgaacggatgaacgaacgaacaaattaacgatgttgaatgtgacctgtgaaagatgaactcaaacatccgacatggcgagacggactgtttggagaatctcggccgagtggagccgggtgtgttgagggaatgtacaatgtattcgaccttgtcgccttgtgtgatgtgttcgtctacgattcttgtgagtgtgcatttattcttggtttactttttgggaaggaaaagaacaaggaacgttcccttttctcttttcttgtgtttgccttaccgactcgttttacttttttacagttgtacggaattcctagaggtgcgcgctcaatttacagctttaaaaagtccagctaacgtccagggatgatcctgaccatacagctgtattttctcctcgtttaaataaaaaaaattaaaaaaaaagtggttatggctgagaacgagaactttcagggtggagaggatctgttgaggtcgcctcctagctctctggccgagcctctgcagaaggctcgaattgtgatcaacgcccgatcggaggaagctactcggatgatgggagactggatcaagagtgaggccggagcaaaggtctggtgggaggatattggactaaaggaggaagagaagtgagtaagggagggaacgagcgagcgagcgagcaagcaaatagagaaaaatacagtttagatgagaggagggagagacggagcaggttgtacgggtaggtgggtctcggagccagagagagagtgtgtgcgtgtgtgtgcgtatgtgtgtgtatgtgtgtgtatgtgtgtgtgtatatgtctactaggagggcctcacaagaacatgatgagaacacagagaggacatgacgcgagctctgaaaggcgcttgtccagcggactacagcaatgttgtagtcttctctctaatgaagactacaaaagcgacgagcaaaaacactacaaaaaaagactacgacttgactagaactcgaccagaaaaacactacaatctctagccattgcatcatttcccgctatcggccgttttcttccatctcgtctcttttccccatctcaccttctgctggatctgcccaagcgtgcacccacgtcgacactcactttcctcggacagcatacacgtaccggcaccggcactggcaacaacacacacccaaacatacacccacactcacaaacactcacatacactcacatacacacaaaaaaacaacacactctataggcaggatcccgctcgccctcatcctaatgccaccggtagagccaatctcaaagcctaatcgctttccaccgtccgtcccgacgcttcgaccaggaggttggctcaacccatcgagcacaccctcttcttcaaccgccaccacatcaaccactccgtcctcgacgtcctcgtccgcatcgccttcaaggtcccacagctttctccaccacaactcgtcttccttcagttccggtccatcccagtcgatcctgtcgaacgggaacacaaacagtctcccgagaacgccttccggcatgaacacaccaggtgatcagccagccgaaggaactaccatcggtggaccaaagaaacgtacgttccacatcgttcttttctattcatccatcgttcatcccttttcctcttgtactcgatcgtccggccttgttggcttggcttcttgttctcgttcttgttcttggcagccgtgagattgaatcaagagaacacacagtgctgacgtcccactccttccggatcgtcgtggacatgccagccaaagatctttcgcatgttccctgcaagttcttcaagtccggaggctgcaccgcaggatctgcctgtgtctttgctcacgtcgtggccgaacgtaagtcgcctcgttcatatcaaatccgtttgtcctgggtgatcctgatatgtcctcatggctgactcctctggcgtcttggcttgatccacccatcattcccagccggtcaacaaaaacagacctgccagtacttccagaaaggaagctgcaagtttggtcacaaatgtatgtgtgccttctgatcacatctgatcgacctggcttgaatgtcgtgtgctgatagatatccctcgtccaatctcacccggttcctccgtctcacccatcccggtccctcaggtgctctcgcccatcttttgcccggacaacccatgtcgatggaccgaaagaacaaacgaggtttgtgcttttactctaccttgcctctgacgactcgttctgtccgctttctcacaccgctcctttcatctctcaatcgtatgactcatcggtgaggacctcgtgaacagccgtccagctgcaagcccaagctctcaacaacggcctcaacccagcccaggtacatcctacccagccggatctcaacgtggcagccaaccgctcgctcgcctccacattagcaagcttgcagacccagtcggcaaactcgggtatgatgtctgcgctctcccaacagatcgcgtcatctccgctctcccaccagacgggctcctcgaccatgccggcaaccccaccggccgatgttctttccaacggatggcacaccgacatgtcgtccgcgttggacggttctcgaatctccgggacgagaacccttccgcaaggtgtacacacctttcactccctctccgaactctccgtcaccccgacctcgtccggtctgtccccttcaccaccctcgaccgcagtcaaccaactgtcccgaccggtcttgttttcttcacataccacatcctccggaccatctggactgaacccatctcgggatcccctcgcgatcccttcctcggccagacgtccgtcctttcccgccgccctctcgtcggccagtctgttttcgtcttcgccctccagacgactcatcccacccctgtcctcatctgtcaacgtgtctggcgatgcctctcccttctcgtcttccccgttcgccgctccaggcgggaagagtctcttcctgtcgtcctcgtacgaaaatcacttcatgtcgacggccgaccagatggcgttctctccacctggtcatcaatcaggaggaaaacacctcatgacctctccaccgggtgcgctcagacggccgacagctgtggccgaagaagaagctcactatctgagctcgctctctggtaacgatccggaggacgaagagttcattcaagacgatgtcgtcgacgacgatgaaggcgaagagtttctccctggtagtttgagcgagcttctcacagacaacgagatggaacggcgaatgatcagaagacactcgaaccagatcgccccgttaggactcaaggcgttgtcaaagtcggcagcgccgacgttcccaatcggccaagggcgatccgtcctcaagatgggcttctcaacaggtaacggcacttctccttgggacggaacagcacaaatctcgaacggagcacccaatccggacaattctttgtcttcctcggccggactgaccgtcggaaggaactcgacaggaggaggtcggggcccgctatcgttcagacaactcaccagtaccatcgttacatcgcctatggctcatcctgaggatccgacagtgctgatgaacccccagtcgtcttttaaccatacctcggttgaatacgctcatcaagactcgaccccaacgtccgcttcggctgctctggccaatactccgtgggacagccagagtttgttggcgagccgtcgatcatatgccgctgccgcgtcccctccgctagcgacccaacagacgtcacgcgtacattcagcctggccttctccttcggccatgacgacggcaacagcggcgaaccccaacttgtccccaaaaaaccagttgggtcaccctcatctgcatgaaccgacatatacccaaccgatcctatccccttcgtctaaagcgcttgcctcccatcctcccggaacgtcccttcctccaggtctgggcgcagcctccagcaggcttcatttcatcccggcgacctcaccctcgatgtttactccctttggtagtgtggcaggtaacgcaggaggcggaggctaccccgatcggtcgtccacatcttcttcggcctcttccgtctcgacctcccaggccggactttactctgatggccagaaccaaccgttctcatctctgactttccagacccagggtcacagccagcaagcgcaggggatccagcaaagccctcatggtttaacctttggcacggccgttaccctcagttcttcatcttctgcagataggttcggccgaagctctatcggcgacggacgatcgatcaaccaggaacagaaccaacagcaacgaattggaggtattcaaggccaggacgaaccgttcagcactgccgtctttaggaacgtgtgggaccggccggatcgacctaacggttatgagactggatcaaaagcagcaggtggggcagcagtaggtggacctcgttatgaaggacgaaaagtcggagtagagaaccttgggtcaggagtaggaattggggaggacgatcaggatgagttcggggatgacgtcttgttcaactaaatgagctagaactggagagccggaggagactcaggtgggtgtatagcaccaggagtacaaggggtgtctaggttggggcctctcagtagtcgcgtactcttctgaccgtcaagccctctctttaatcctctttgggctctcttctattttctatgtttcctcaagtctatcatttatttatacgattttttcttctcttttgcttcttctcctttttcttcttccgacatataatctagttgtatcttgactccaccccttacattctctcttctagagattgaaacaaataataacattcagaagccaaacaaagaaaaagggtctcaacaactttcgttctttcacgtcattctacatacgaccttgctttgttcttcatctatctacacatgtcgttcattctcttctccgaatcccttctctctctctctctctctctctctacctcatctatcctgcccgtttcttcgtaaggaatgggtgtctttcttttgtttcctctctttgtttctttcggtctcttgatgatgcattcttcctctcctttcgaacatgtcttctgaatggtgaatctatgatttcgtttttggatcactttcgttcttcgctactcacccatacattctttcgttgtccctatgtcttttcttgcttcctctaatttttctttctctctctgagatgacatctagatctgacaatggatatccgagaacctaacaaagaggctaggagcgaatgagaaaaagggggaaaggggggggggatgaaaacaagaagaggatggaagagcgaacgtgacaaatcgagaaaaggagcacacaaaaggaaagagatcactttgatcgcttctccttccgttcccttcgtttctttccgatcaacagcccaagctctttcctttccctcttttccttctcgaccgaaggatcctcagcgggcgcattggtatcaccgcccgccggtcctccctcgcgctctcggttctggccgggtcgacgacgtttcgatcgatcgtctgttccttcagagggttcatcgttgaatttcctcttggatggatctctatcgcctcggggttctcgaggaccggacattcggttcgtacgtctttgaacaacctgattatgggtagtgaagccaaggaaaagaggaagagaaagagagagagaggtggaaggaaggagagagagcaagaaagaaagaaagcaaattagtggacagacatggaagccagccgaaagaaggaaagtacggacctggatgttctcaatcgaaaactcgatgatcaacgtctttttcatcacaacagatcgaccggacgcaatttgttccttcagttctgattccttctctctgagcttcatcaacctcaactcgagttcgcccagatcaaccggaccgcctgcctgcttgccgtcctttcctcctttcttaccggccacagccttggcagaggtctcctcgagaatcatgtcttcctcgtcgatgtcagaagcctcggcgtccgctcgaccttttcctttcttcttgggaccgtgcgatcggataggttcgggcgcggccacggcggtcaactctgccaatctagcttcgtccaccaatttctttgttcgttcgatcagatccccaacttccacagcccaccattctctcatcaggttctcgaccgtcgggttgttgttcgcccatcggagtgccttcagtgcatcctggtgggatctcatctcgaggaaaccgtatcccttggatttaccttcgccgatcaacgagtccactcgatcggtagcccggacgatcttggcttgaaccaccaccgtctgccgttcggcccggccggccttcttcttcttcttgggatcctccatcgacttgagcacagcggcagaaagagtgccgtcccgtttctcatcctcgtccagatcttcccgttcgcctcgaccgacctcggcatcgaattctcgacaagcatggatcgccaaccgcttgagcgttcgatcagtacagaacgtaggcagctgtcggatcgaaagtcgggtctttgagatgtacaacgacgggttcgaagaaagtaaggtctttcggtcgttgaatgacttttggcgtttctcgagttcgatctcggataatgaggccgcggcaggggagttggcaaagatgactagaagggaaagaaaggaaaggaaaaagaaacaaggtttcaatggcgagtttgataaggtggacgacaaaaaaaccaagagactgacctccttccctcatcaagtaggtgtttttcttatcgaccttctccttcctcctctcgttctcctccttcatcttcccagcctcctccctggtgacagcccagtcgacgtccaaaactcgtccgttgagaaccatgttggaagccaaggaagatgacggatcggccgtcaggacggaagagagcgtgaaggggttgctggcagcagctgttcgatctttgacctgtgaggcgtcaacgaatcgtatgggtcagtatcaaaccgcgcaaagctttaacaaatataaattcgatgattttaaaaggtttggtgaggggaaacaaaaaaaatcctgaaagacaacacgtacgggcacagagtttgcaccagaaccgcccatttcggaagccataagtctagcctgctcgacagctttctctgcgtcctcctttcgccagaagcaaacgaaaccagtccctctggatcgaccagtagctctgtccatcgtgattcgggcgtatcgaaggtttccaaacgttcggaacctattggtaggcatcgcaaatagaatcagtcatcaacacttaatgtggacatcagaggaagcgcgccggaaaaaatgaaggatggggggagggacaaacaggttgcgcaattcatcctcagtcacttcgaacgagagatttctaacaaacaaggtggtctgatcctggacttgaggcaaggcgggcctgacgggttcctcatctttctctttttcctcgtcttcctcctcatcgacctccatgactccttcctcggtcttctccacctcagcctcggcctcctccgtctcctcctctacaggctcctcctccttctctttctcatactgatccttgctcaaagcccaatccacagcaacctctctgctggcttcctccttgccgtcctccccgatgacctttgttccgttcacactctccattgccttctccgcgtcttttcttgaaagcatccagacaaaggcgaatcctctcgctcgaggtttggggttggggttcgcctctgtcggctttcctggaagagagggaggcagggtgattgagtggattggaccatgaggcaagaagagtctctgcaaagtcttcaatgtggtctggtttatcggaaagacaagccaaaaacgtcggtcaggctctgagtgggctacgcagcctggagactgatatcaaattgaacgtaaggataatgcaagagggaaa

SEQ ID NO: 1422 - DNA, 8036 bp, Xanthophyllomyces dendrorhous
  misc_feature (5930)..(5939): n is a, c, g, or t
atgcaagagggaaaaggacttacgtcccaaggcaaatttcgaacgatcattcgactgttcttgtgcaccccaccatctttaccggtcgcagcttggatcttgtctgttcgcttcttgatgacacatgacaaaatgttgcccaagtaatcgtgggcgtgtagtcggatggtagcatccaacgcggctgccgggcttggcaagagtaaatgagctacaagaggaaaaaatccgaaacgaaagcgagacaatcagctgaagccggatttgaataaaacaaagaaatcccagaatatgaaaacaggtaagaacaaaagcaaaagctgtagtgctcaccaacggtctcatcgttatccacggggaatacgagatttcccaactcggacccagcgacctttctgatcttcttccatagcttcgctttggttaatccctcggggatattgctaatgacaaccgttcggatcgcgtccgagtcgtatcctcctcttgagccagaaggcgccgagttggtgggcacagagttggcagacgtcggttggaacggagtggtagggaaagcaggtcgtcgcttggtgattcgctcgacgggaggagcaggctcggtcgatgatgggtctgcttggagaggctttgagagtgacacagtgatttatttttcgatttaatttttttttttccaaaaattcgctcgagcttagctcagtatggactgacaaagcgttttcaaagcagggggaaagaacaaaccttcttctcggcaagaaccacacccagccttcggtcctttccatctccaaaggaacctccatgaagctccttgacggcacgctcagcgtcctccttcatggcgtacatgacatatccaacacctttggactttttggtcgtcttgtcgagcacgacgaatgcagatcggacgggtccgatatcagaaaaatgagttgtcaaatcggtagtggtagctttatcggaaacgattcacgggaaggaagacaaaatggagagtatgaaagttggaatcatcagcaaagttgtaccctgtgtgagtgagtggttgattgagagcgaaagacaagagtcggacagaccagagtaaggcaagttggagacgaaaagagtacttccaacaggagccgaggaatcatcctcgatgaccgccttggcgatctgtgtttgatccatgtttgctgtggtggctaggagggttgaggtttgatgagcaccaaaagttgaggatccggaatacaaaattttgtaatcttggtgggttgattgagtgatgcacgtgatcgttagcgtctgaaggcgcaaggcggacgttcactctagaacgccaacttgattccttccttgctcagtcaatcatcatatgttgtctgaatagattcgtttgttggaatactagactggtcagtcaggtagaaatctctaggagactctgtttgaggttgtgttgttgctttcggcgatacagatatacatgctgaaattcgacgagtttgatctctggttcggctctcggtgcgacttcctttgtcattcttactctcctccaggctgatacaaaccttggtcttcaaagacaggtcaagcgtcatcacgatctccccatatgggtctcccaacgctcccactcgagatcctgtgccatattgtgttttatgcgttccatctagatgagccgctgatcgtatcgagactggcgacccggtcaaaaccgactgaactcttggtcctgtcgaaagctcacctggaagcgttcgagccgttgctctaccgacggatctttcttacctgggcggtcgactacgtgacgttctatcatccgttgacgggcttgttcaacgatcggaagcatggcgctcgccgagcgagttacgtacgcgaggtgtgctgggacccaagtcagcgcttaccgttaaacatgcaggcttactcgactggggcgagaaacgaggatggtagcctaatggatccgtcgcgtgtgcttttgccgttgacgatcgttccgctcagctcgctcgaccatgtatgtatactctccacgaacccgatccctgtcgacccgagtgaggacgatgtggacgtgttagtgagagatcaactggcttcgctctctgctaggaggatcagcccggaagtctgggacgatgtgtatgagcttgtgctgggcgaattttcgatgaaacaaaccgacgaatccttcgaggctcaacaagaactcatccggtcgttcgtctcggaaacgggactctgtctgcagttcagtgtggacgcgttgacacaggatttattgttatccgaccatcgttccgtcgacggttggactgacggttcacctatcaaccgtcttgttggaccgcaaggtcagattcatatccgactagaacctcatccgccatcgacttattctgcttctgaacaactcggcgaaccggccgaaccagaagatcctatagcgaacgaacggaacaacatattggatacattggatgaaccggtcgacctggctcggaacgagcacatgaagagaatgctctctccgatcaaacctttcgttcaggtatacctctacaggatagcgccgcatgaggtgggtcgtcctgcggatgatgatgatggcaacgaccaggaggtcgatggggatcctccgaggtttactctcgtcagatcaaacggttcgctgtacggtctcttcttcttgccttcctttcattcgttctctgttccttatgttgcgtcatttgctcacgtccccatcaaccgtctgaacgaaacagccaaccgattcagtccaggtctatctagatgcaacacgaggaagaccgagaagcaaacggaaacattgacaggaaccggaatggggttgttaactgtcaaagactaatgtgtccgtgtaattatcatacagacgttcaaagagatttctgttaaacatacaacaatctacattcaagtaaagggaagagcacagacggatcgtatcgagaagggggagatgtctatcgagggagaaataataagataaggacaggaaaggaaagacatctgtctgggaggaaaaagaaaagctaactccgaaggctgaagagccaacaggagaagaaaagaaaagaaaatgctacagaaagaaagtctgatgggaaaaagaaagaaagcaaagttccaagactgaatatataacaaacccaacagagctatatttgacagtaattcctatacccaaaaagaaagatgagatatagatgcgacgtcctaaaagaaggaagaaaaagaaaaaggccggaaaagagaacaaaaaagaggcaccagagacgagaactacgatgaaccgaaagcacttcaagccaacatccactcgatcggtctttccattatgtcgacctgttcgacacaaagtccagctttgacccatttgcccactctgctctcgtccagttcaagctccatggtacgttcgctcgggggagtaagcggatgatctgagagtctaatgtgagcgaccggaaagttgatacctagttcgatgaacgagtcgttcaaattcagtgtcaagcatggatctagcgccaaaggatcatcgatggtgtgtccggtcagatggctgctgctactactgctgccattggccaagcccaagcccaagccagatagatagtcaacttcgaccgagtgatcgatggggatcgaaaagtaatcatccgtgatcgttccctcgagagaggaaagcatgatgggcagatcaacggaggacgaactcgtggccggtccgatggccctactgtcgaaagaataggcaggcgagtaagacaaatggccgggtaagggctgggtggcctggttgagggagatgacgtcgtagaatgagagcgcggtcgacattgattcgtcagtgccaggctcaagcatggatcttggttccgacgttggggaagggtatacgttttggtccgaatctctgtcgatcggggagtagtatggtgattcgaggatcggatagaccagcccagtatttggttcgtactccgaatgggatctttcgagggaaatatggccggagcaaagggcgttccgtctgcttcgctggtttggcatcgtcgacgagtggtgtatgggtgtctattgggtgtttttttttcgaaagcaagaagaagaaaaacaaggtaagcataaggaaacagtggcaagtatagtatcggacagaaagataaagatgtattcactaaaaacgcgggcacaaccttctgcgtgtaaggtctgggagataaaggaatcgaaactttcggtcgatctcgtcgccgacggatcgtcaacccgttcgaggcaggactcgatgggatgggcaacgatgaactggccacgcttgctatcttcaccgagtttgcctttcgcctcgcctttcgttctcgagtggccaccttgtcttcgaacggcacggcctcaaaagctgtgggagatgcgcatcccgacagatagttagctcaatacattcatccgcagttcgacgacacggaccagagaaacatctgtgactgaccacaatcggtcttccctgccgctttacatcttgaacaggccccgttatctatacttccggaacattttacttttctaacggaggaggatagaaagtgccgcgttagaatcgatcgacacagttatagatcaaaaagggaaagatggagggagagaagtggcagtatcagttgagctggttgttgtttgtgttttgtttttggggcagggaatgtatgcattgatcgagagaggatgaaaacaacagcgaccggggtgacgatgaagaaaggaggaaaaaacgtctggacggggagaaaggagaagtagatgatacacaaatgttatggacaaaccttgaacggcacaaggtgcaggcctggttgactcttgatgttgagctgactgcagtgttcgtagagaagagatctggcaggccggatgagatcgcaaaggaaagagacgccgatgccgagccgctgggcgaaggcgatgattctgcagatgcaaatggcgacataggagcaaggatctgtcgtgagtgagtgagtgagtgtgtgtgtatgtttgtgtccttgtaatagtcttgctagcagagccgaaggaatgagtggtttagaacgaaggcgcgaaggagagcgatttgaggacaagacggccagtgggtacagatgcgactgaaggtagtacctcttgataggatttattaaagagaagcgagctagatccgacaagagtcgaacgatgtcgagaaagatgagaaatgatccgaggattaaacgaatgagaggatgtaaaacaatgaaagaaaaagggaagagaagcgagagtatgtgtatatgagagaaggagaagaggattgaatggtatgcacggatgtatgctcttaggttttgtttatcacccaagaagattgattgtgaaggaagaaagtttcccgcgctatcgtttctcctcttttcttttcttctcttctacatgttcttcgtttctttctttatttttccttctcttcatacggccccatcgttttggtcctttcatgtacaccactggaatggcctccgatccaccattcgcttccgtgttctgttcggcgcggtgaaaataagaaagattactgcttcttatgcgagaatatgagtgaaacgcgcatgttagcctcggttcgtccagctatgtgaaacgaatagcattcataagcgagcgagtagagcggcgttttagagacagcctaattccagagagagacaagccacatttaggacgaatggcaaggagaacttctgcggctgcgagcgctaggtgtgtgccatgtctttctctctgtggtgtttgcgcttacctcttcagtctcgttcccgcgtgttctctctgtccatgtatctctgccagtgtgtgtgtgtgtgtgtagnnnnnnnnnnagacagatgaaaatagtctatcatcgattttcttatccttttggttccaaaaatgattagagaatatcactaaagaaaagagtaccgaataagaattacccgatgatcgagaagaagctcgtgattattaaataatatcctacccggccatttgacgaggcccgcacaaacacaccatctaaaacgtgtcaagtagacttcgcgtttagtctcgccgccagctacgatcggcgagtttcatagatcgttcatgtcgcaatctaggcttttagttctggactttcatatattgagttttggcccgacagacaaaaagcgcagcgtcaggaattgggtcccgccgcctgagggcaacaggaggaataacaatagtacccgttccttcccgcgacctgatctatccgttacactcgttcgaaacatgcaaggtgacacatagcgttcgacgcgcgaagcaatcgatagccggttacctcggtagtcagcatctcgagaatgatatagattaatccgagcgtacacagagagtttacatgcctaaaagataagcatcgggtgtgtgagccttaatagctcacgcgcgaagcgtatttctcagatagtatcgatagagacacgtgctcagacgacgcgtccaaattccaacccactttctgaattttcctttcgtcaacacttactctgttaaggagaaaagagactctctcgtcacgctcatgtctcacagttcagctcatcactggtctcattctcattctcatgcatatccgcctcctagtgtttcagtagatcaatcggcctccttttcctcgtcgaccttcccagcggaagaccaaccatcacagactgaaggtggatactctgatgcagaagaactactagatcaggacgtcgatgacaatgacgtcgtcgacgaatcaatcgacgaccaagagtcagaggacgggtcggatgaagctctgtcggacaccgggtttgaagacaagatggaaagccagctcggactctggaagccgaccgaacaagaattcaaggcaaccaaagacttgctcgtcagctgggattgggaaacacaaactgtcaaaggtcggtcatcccggcttccgacatccagtgtgataaagagtatactgatctttcgctatttcctcaacagaacccgatcaaggtcaggtcggaactgaacaagaactcgttgcggtcgctcacaaggcgatgcgtcgagcactctattctctcgaccgggatcagtggagatatgacagctggccggctgacgaacaaacgtttgcccctccgttcccgcatcgtagccagaggggtcacaaccagagtcaaactcagggtcagagtcagggtatctctgttggtagactctaggttcggagaacggctcgaaatgaaacggtgtaagctagacgtaaaatcgtgcgatactctgacgagacggaatagagtacgtgatctctcacctcatctcgtttctatcattttttctctcttagtctcttttattctctatctaaaacaactggttaattgcctttcccctttctcccgcacagcgtcctagttcgaaccttgatggccgtcaatgaaacgaaccctctaagatttgccccataaagattagggaagattgggtcctagatcattcttctgctcaaatgtcccagaagtggttcgatgtccaatcagagtttctgttgtttcagtagtatctgcctcacaattatttggggccctagcatccttcgatttctgcaatttctatgatagaccaaacttgttgtgatttttaggagacttgttattttcatgaaccccttttatgaaaagatgacaggtgtctgtacgacaatcgtcaacataggctaactttcctcctcgcatataagaaaagcctttccccagtgcacacagcatggtctcgggttttctcgtggcttggttttcttcttcgccccttctttttgctgccttcgtttcacttttctcctcgatacttgagatgttatcctttcctttcttgtgacatttcttgtaaccctctttcctcgattgttctttggtcaaaaacgaaaaaaaaaaaaaaaa

SEQ ID NO: 1423 - DNA, 6199 bp, Xanthophyllomyces dendrorhous
aaaaaaaaaaaaaaaaacagcctcgttctctcgcatggcggatggctcatcgagcagcttgaaatgttgatttaaccaacttccctttagtcttcgattggtcgtttttctctcggatgtactttttatccattctctttttggaatgtgaagtttctcgatcgtttggccatccgtccccattagctcttctgtttgttgttgttgttattattattgttgttgtttttctcctttccctcatgatttctaatgcttattcgatttttgatcgtttagtttgatattgccactgtctctgttttcactgctgtctgttgttatttttcttcgaattttcgattacccttttcgcctagatccgcttaattcgactctttgaccgagccgtctccccgaagtcttggtgaaattagattcacaatgtgtgaaaacttaaacaaaggaagccgagaaatgaaagcaaaaacaaagcagagcgaggcaaaggacgctgctagccgatctgtgaatgctgtaaatcaataagattatgacttaaattaacatccacaacaagggccataggaagaagaaaagaatccgcaaggaagagaacagaacgagggtctagaaagacaaaaattgacaacggcgatttgattagacattcagaaggatctagtctcttttttccatcgagcgctggtttatctgggctgatcagccacccaccaaattcacccgaatttcagccaagattcactctgggccgatcaatcgacggagaggaggatagattcgttttctgacgttgtttttctccgatgggatcagcgtcttcgatttcagttttatagataatattaccttgttgcttgatcggcacgaagaacttactgataccatatgtcactcttcggacactcttggctttcttccgaatcttttcaaaagtcttcctacccgttcggctcggtctcggtacacctccatacattttgttcaaacccttattgtctttgtttgttttttctctttgtcctattttcgttctctaacacatacacacacacactctctctctctctttctctctcatcagcccactgttttgagtgttccttgacgtttgaagggggcatgcacaatgtgccacgtgctctatcacgttcaaagtctcatcagaagaaaaatcagtcatttttaatcattgtgttatgtcctctttgctctactccttccaaagtctatacaagaagcacaaaaagttcctctacctctccttctcataagacggaagccagatttagatgcttagatgttgtctgtggatgcatcattcacggaagacaacaacacgaaagagaaagagacggagaggtcagttgatgttttcctaaagagcagaagaaaagagaactgcaaagagaacaaaaaacgaacagaatacactggtaggagaacccggctgggcgtcatccaacaaagcttggctaaatccgttctctccatccttctcaaccccactctccaacaaggcctgagcatcctcaacagtcatcagcttagcggaaaccaacttgagactcttctccatatgaggcagcaactggctaagagtgtcaatctcggagaaaggaagcgttcgggtgaaagcggtggtagctccaaactcagcgattcgtttctgtacagtgcgagtaaaaatctctctagtttagcacgtggaaatctcgctcgagatttggaaaaaatgaaaaagaaagtcagacacaccttgagagtgatggcgtagggcatggccttcttgttcttgatcaacccggcctcagtcaaagcgactcggaccttgacatcatcaacactgtcggtcttttcatcatagctaaacttcacggcctcaaggaccgtgttctgccaggcaggccatgtctttgcgataaacaaccgaagtcccaacggctttgacttgtcaaccaccgggcccttgcccttgcccttcttcttgtccaatgcaatctgtcggtcccgagtatccttaaggacagctcggatatactcaattccgttgatgatctccttgtcgatcggtcggatctcggggaagcgagctttctggatggagctcgagttttgaagcacggtggtccagaggtgatcggcaaagtgagggatgatcggggtgacgagcaaagcggtgtatcgaatgcactcgagcaacacatcgtagtgcatgcccacatcggacgtcatctcggtgtatgatcgtcgagcgttatccataccatagtatccgtattgaagagcctccttgtaccaggtcttctcgtaggcatccttggtcttggcggcaagatcgttcatctcctcctcgaacaccttgtcccagtagctatccttcggtccagttcggagcgcagatttgttagccaaagtctcctcgatccaggcaagctgggtgtagagtcgctggatagcagagttggcggtgagctcctcaaagttcgcgtcctcaataccgtctccggcatcagccaaagtcaaccgagtggcatcagctccgaatttcttgacagaatcctccaacgtcaaactgtttccggtactcttggccatcttctttccgttcaacatcaagtgtccgttcgctcgcatcgcctgaggccagtggtgctccgggaacaaggcggcgtgaacgtagatgcagaaagtcaagtggttcgggatcaaatccttgcctgacgatcggacgtccatagggtagaaatactggaactctcgcttgagcttatcaaatgtctcctgggagatgttggaagaagcggggaaagaaccggagccgagaacgtattcccaagcctcgtccgtcatatccgcaggagagatcccggccggtccagtggtctttccagtgatatcaccacctggttgtcaaacaaaggggttaactgttgggtcaatctcgttcaaagaggccaatcattgaaagaagaagaaaaagaggccactcaccctgaagaaggtaggcaacagtgtagtaggacatgtagatggtggaatcactcaaggactcaaccaagaactgggggtcccaaggaattcgagaaccaagaccgtaagatcgggagcaggcccactgcttgagccagtcgagaacaccctcaaatccgttccgggtctcgttgaagtaggtgttcatctgagacaaaagcctattggtgcgaagaacaagatttagcaaagtatagatgacatagtcaaacagctcaatgcaacatttgtattgaaacgttgactcttacctcttagcagtctgcttccactcctcttctccgtaatcaatgtaccactgatctacgagcgcgacaatgcactcgtcaccacttcgagaggtgaccaaactctcaggctcggcgtacttgaaggccaaattcttctcgatgagcgagtccctgaccttggtcttagccgtctggacagcctctcccttgaattctccgatggccatagttccattgaagaagccctccttgtaggcaatatctttggcttcggcaagctgcttgacatccttctgggactgaatcttcatctgctggcaaagtgtggcagcgatcataccaccgtagttgggagtagtgatgaccgagatgggctcgttggaagcccattcaggctggatcttgtagaattcagccttctttcggagatccattaaagtggcgtaatcgtcaggagagtcagaaggaaccgaggtaacaactccagtaccctatttatgaatatcacagtagcccagacagaacagtaatgagagcagatattgagtggtcaaatctttgactggaaatgtgacaacaagactaagagatgatgattataccttggtagcaaggactccgtccataggcaagacccagacctcctcgtagaccgagtgaggggccttgattttagttccgacaagggcatctcccttgatctctccaagcttattgatcttgccctcttcggcaaagattccctggtaagccatgtttcgggcggcccgctcagagataataaatacctcattgttggcggcctcgaagaagccataggtgatgttggttccgacgaaacagttggtctgtccgtacctagaagcccaagagcagcgagacaccgagtcagatgtacagttttcgagcggcaaagaacacgacgagaacgaaagagagatacgaacatggtctcgggcctcaaagtggcagcaaccatgtagaccttcttgccttcgatgccctggagtccattcaaaacctgcttggcagcctcaggccagtgggtaacctccatcttgagaccggtgtactcctggggcccaacggcctctccgccagaacggtcgtggtccatacagggctgtccgtccttgatcgagtagatggtgtttcgcttaccgaacttgatcttcttctgagcgtgtagcttgttcatctgccatcgaacaaatgagtcgtagtaggggttctggtcggtggtctaatggatgcagaagacacaagatacacgcgcgctcttcagcaggggtattctcgccatgcggctcagatattcagataagaaatactgacgatgaaagttcgtcgccaatcgattcgagctccgaactcggtgcaatcctttcgagcgataggagggaagtactgaagccagtggagaggatcagcaaacttcttgatctcctctcgaggaacacctagatatgaacaaacacggaaccatacaaagatctaagtagatgccagctttagaatttgaaacgcaaatattgatcaacgcaccaatgctctccataatctggaactggtaggtcaatccggtagcctttccggcgatctttcccttagtagctttcgatgggtctttctgagcatcagagaccttgttagcagggggaggggcggccgaagcctggggaacagggttctcagggtcgtaaccctcgaactcaggttcaaacatttccatttctcgaatgagcttatcagcagcagcctagagacgaaaagagagaaattgttgaaaccaggatcagttttgaggaagacctggcaggaacgacaatgaaacccatggagaacagaacaaaccttgatgggcatacccgtgcagtgaagtcccatagggaacaacgctcgcttgccaagcatcctctggaaaccagtagcaaactcgatcttggagatagtgaacgcgtgtccaagatgaagggatccgttcatgtagggatagctatcagaaacaaacgacaagaagtgcgctcttcgttaattaactgtcgcctttggtctctctgagaaaagacgagaggaggagagtgatcgacgtacgggaaagttcccatccatttggggtgctcggcctgaatttcactaggggtaagctccttagagctgagctcttcgattgatggaggattgatctcgaagagcttctcttcctgccaccgagcctgaagatccttctcgatcttgataaggtgatctcgtttgaaggtctgtggtcatcgatatacacagacaggattaaagttgggatcagtgtctgacgagaacgctttacggatgcataaggtcgaccatctgttcagctcagcaaaatgaaatctcaaagcaacagctctcatccttctctgacgccatcacacacggccaacctgattctcttccaaaactctgccacaattaccgctctactgtattcaagctcgataaagcagcagcagccaccaatatgaagagaaaaagaaaagccagaagagaagaagagaaaaggacggagggaaactccttaaagatggcagaaaaacaagaaacatccaaagaacaagattgattagactgtcacagagaactttcagtatgactcacattttccaagacgagaggtccgaccttgactttatccatcatgtcgaccttggtgttaaaatcggccatgtttgcgtatgtcctctgagagtgggtgtgactggcaccgtaaatgtttaggcttgagaagattaggaaccgcggttttaaagagcggaacgctagagagtgaatcgtgacagatagaatcctcggaggtagtgaggatcagagaaggaaagaaagaagagactttcgtcgtatctgctggaggaaacgaaaaatgggagaggcgaagaaagagggtgaggaaggccttggaa

SEQ ID NO: 1424 - DNA, 1042 bp, Xanthophyllomyces dendrorhous
aggatcgtcattgttctcgtccgtatcgggcgagagaacgacgtcggatgttgcagagtgacctgctgagtggtctatcttgattgcaacttctgggcgcgatttcgagtctctgtacactttacgagtgcgagtcgtacactctaaaatggcaggagatagaacaattcggaagaggaacggagtaatgattggaaagattcaattgatcaagaaaaaagaggtatagttcgtacgcgtagaaggcgcgtcacatgataaatgggaggtagcctgaaagaaaaagaagagaaaatggaaatgacaagaaaagaggaggaaaaagagattatggtcgatgacgccagagcagccttgaagattgttgatgagagagcaacaagatgaacaatgaaaagggtgagaaatcgttgagacagcttggaaagaaaattatgaacgatgttcagatgaaaacaaagaggttgagaatgatgaagaacgaaagcaagtgtcaaggaagttaacgaagagaagaagaaaaaacgcggagtgtattttgttgtttgtttctttccagatcagaaggtctcatcctcgtgaagctgaccatcatggagttgttcttctcctacaagctcggcatcagcgggcacctcaaatccctcctagatttgtgtgcggcaaatgtggtccattggaagattcccaaaacaacatgcgagaaactcttaaatcagtctccggctgcggacaaacagaagagcatatgaagccgaccaccagtgacaagaacgaacctctgtagagtagagaatctcttgaatctttgaaagtgtagccttctcgagttctggagttgactcgctacccaatttttcctggacaatcatctcgatatctcggagctgcagttttgttgtttgcacgatgtttcgtagccaagacagacgaaatagaagggaaaacgagatttttagtaactgactcgtgagtcgcactcagcacaacgggttacagattttaccttggcaaagtagaaatctctctctgtctccagacc

SEQ ID NO: 1425 - DNA, 87951 bp, Xanthophyllomyces dendrorhous
  misc_feature (37460)..(37469): n is a, c, g, or t
  misc_feature (78048)..(78057): n is a, c, g, or t
ctctctctgtctccagaccctctaccgatcctttcaactcgtttaattcagccgtgagcgcatgaaccctttcagcagcagcgccgctcatcgaagatccaggccgcaaacctgagaagaacacgacgaaacaccaagccgtatggacgcaacccagttagttcggtgaactgacacgctcgttggggtttcgcttgcgcgcacacgtatctaccctccatccatgcactgtctaaacctggttcaagaaaaagattggggaagtacgtaccagcagctttggctctcgcgccagaactaccccccagacttccacttgacctggagataggggcagaggttgacgtctgtaacgccggtacatctccctttctgcggccagcggcgtcgtagtgccctccgccaaaagattggtcgtggaatcggcgaagccactggaggaactcgaggttgtcttgcatcttgcatttgaccagtcggtcaactggaataggctttaagccccaatcaagagggaggaatggagttattttagccattgtcatgaaaagatttatatcagcagatgggtcactaataacaacgggtggcctgtaggtatagactgaccttcgcgattttgtgatctttgaaagtcttttgcagaaccttgaagttgtttaggtactcgtattcctgcttagcagagaatttgactctgctcataggcacatcacctgaagatcattttcagacagttggtgtttaaatatcgttttagtacataccgttttatcaatgagctgattggaaagtgaaagaatgaagctaaccaaatatagagtcaagaatctgttgaagaattccaaacgacatgagtcggtaaatccaatgttagccagcgagctcgtagtgacaaccaacgttcagattgaggaatgtatcgtagaatcctgtctgaagctacaggattaacccaaaagtgcgaccttccgactgacaggcgagctggtcaccgaccatctcatctgcatccgtgtatgctctttcaatcattcatatactctgcgttctgagttgaacttctaataatgaagatcccggagcacaacgtagacagatctcaagacgacacaggatatatgccaagctcggtctccaagtgacgcgaagaacaggagagtgacaacgaagcaggtcaagaaagagggtaaaggtaaaaacgaacctgacagtaagccgctccggttccaaactgttctaccttggaataactaatttgaaggaggtcatttgtccatgcgatgagttctgatcgagctagatttccgacatacaagccagtgatatttaagatggaaagcagcttgttagtttccataaatctacagaaagggaaaggaaaacaaccaagaagagtgtggccctctttcttcttcgttcaatctcttctcttcctctctcctttctagtatttccagagaagatttgaactagatataagaaagatacttacattctccagccatgatgcccagcgaatgtgtagagtacaagagaggaggaaaaagaaggctaaacgaattgtgaatctttggtgagtatgtccaacaaacaaccgtatgttttcctgttcctctctggagacaggcggcggaaatgtcttacaccatttacagcgtgttacactatttcccactcataagcacttgttctcctgatacacaattcgactcagacacttttggaggcagttcgtcacagaggatagtatatcaaagtcacatcacatataaagagatacccagaaggaaatgcgtaagggaaagacaagagacagccttcactttctagttatcgtagcctgaatcaatccactaggcgaagccactggctcaaacacctctaccaatccttctcggccttttccgttctcgaggttgaaaggtttgaggttcacaggcctgtttccattgagtattcagaatgatcaagaccgatcagtttggaactatcatctactataccagaattttgatgtagagatgcgagacatacatataatgcttgttgggcagcgaataaaagacttctttgattggagaagctctagataggatagtctgagcggctcggtaaagtgtagccttaatcatgaatttcagaaacgcattagttatgccggctgcaggaataagtaaaactttaaggacatacctgaacggaagccgagtcgtgcgtcgcaaacacctcaagcgtagtggttcgtgctgtgctcgccagctgatgatgcacattggaaaatcaagatgataagcggaaccgtgggcaagataaagaaggtgtcagttagttcctttcagacggggttgagaacattcactgaaacctaatcagtatggttaaagggaaacaacggaccttctcgaattgcacctccgcgccaatcttgtttagattatcgatagtgagcgggatgtttggtggaagcgttacagtgtaatcgcaagtgattgaagtcgagaaaattcggtcgtccacctctggattgattgaggttcaagaaatatgcgcgaaaaatggaagaaagtcaataaagctcggttggttggagatgaagcaaaggcagaaagaaacgaaccaggcaacgtggtgaattcgtctcgtaaaaagttggtgaaagaacttcccgccgtcttcaagaccaagagatctttaactccactcttgacgattgctgtgatgtcgtccgttgatgttccatcgaccaccacggatacgacacgcttctcgtctccgtctcgaacgaaagagtgtgggtgtgctccgatatcttgaacctttatttcgaaagaaatgcatgaagtaagatacaacaggtcagtatctacaacgaacagtgaaacgctatgtatacacatacatcgattctagaccatcggagggattggatatcgatgtgggccttctgaatgtgactgtacttctactcagcagaaccgaaattccatagatggcttccttatcagtttctatggatttgcccaagatttagagcgataccaaacaggacgtacagtaacgaaatgagttccaagatgaagagcaaacaactctggggtcatcacatgaggcgagacctttgccatgatataggtagtgttcttgactgttctcatacatacaaaagatcttatcagaggagcatctttcgaccgagagacaacgcaaatcacttgtgatgaacaacgtactagaatcagtagcaacgattcgggtattgtccgcagcgtcgtagctctcggcgaaatcaccttcgagaagagctcgaacaacatactcgacgactgtggccagcatccgttcgacaaggttttgcgtcagtatgctgagagatcgaataaagatcataggcgagaatagtctcaccctcttgtttagcaggcttgccatctgcagcgggggttcgaactactctggccactcggacgagatcctttccgtatcgagcagaggaaaggaaaccaaggtcttcttgagtatcggacatgtctgtttgtttttggtgaagagtggaaacgtgatctagttgaaagttgtaagtgatgaatgggataaggagcaacgaaaaaagaaagaaaaacaaagattaacggttctatacaaggtgtttaaatgaaggtgaggatagagatgcccgtttggatcatacgagataagcggaggacatggagagctccgttgaggccggagccgggagccgaaagataagatataaccctaactccgagttgcctctctacatgaagatccctcggtcagcaaaccttccatcccttccaatgacatccgacacgtccggatattccaatatattctcagtggagttcggagaagtgataggcagtcgttttcgtttttagaagaatatggcttgtatcatcaaaggcagatacagtgagatcagataggctcagtgatgagggatgagatcaagacgtgagctacaatacggaaaggaaaatacagcaaacctgaatgtatgttatttgagtaatgcagtgagcaagaaacaacacaacagcctcgcgaggtggttgttcactcaaataacaacaatatgagctccaaatatgatgccgacacaaacatggacgcttccttagaatagggtacctagcagaatgagcctggtgagagaacacagtcaatgcagccaacgaccagacgcgctttttcggactgacgcgtcaaaggtacattgcgaccacaacgttcaatcagcccacgctgttctagcaaggacacctcaaacatggctatgctcaataccatctcccctcctccagccgtgttcctacagcctaggtgccagaagcatcagttcaatcgaccttcatcgaagatatccctttccaatatcgtcgagcgcccggctagacttcgagcaatctacgttggtatctctgctgccgttgcccgacttgaacacctcgtctcaactcagcctatcaatccaattgaaatcagagtcgagcctctaaggtcggatccatcttccaccgcagacagcaaagaacaggacttaatcaatcaacttcaaggcctaaacctttccacctcttcctcagcgccttcgtcgattctgccgctcccctcgcctctctctcgaattccccagcttgtcttttctgatcctccaaccgacaacttgattctttctccggcggtcaaattcattcatgctccctcaaattccaatgttactaccggaaagatcgaagcaaactatctcgaaaaactagtcgaatgggtaaagtgtaccgaggacaagatactcaaaaaagagagtgaaataccagaagatctgcctcagttggatctatactgtaggtactgattcctctctatttggtcttagtctgagtcgtttagagaaggactaaataaacaggtcatgaccttgtgtctcgacagtatgctcagaatcgcttgaagcaattgaaggcgccttgtcaaccgtcatccaaagtgttgacctcgtcatatccaacaccaatgtcgagacacgaaccaacaaagcgccccttcccgaagaagccaacagcaaacaaattaagacaacccaagctttctgtgctatccgtccgcctggccatcattgctctcaagaaactcctatgggattctgttttgtcaataatgtcttggtaggagcggcacatggtgagaacatatcatttcgaatcttcggtcgcacgtgctcggaagaaggaataacaacagctcatatgcgtgtttcgtttgtctcgtcgaatggtttgatacttagctcatttgaagcacggaatagatcgagtgatcatccttgatattggttcgtataacatcccttacgatctccgcgtccctcgacctgcctctatgtcctactaatctgatgctcactgtctgcttgttgaacctatgcgtcttctcaatagaccttcatcatgggaacggtactcaagacatcatctaccgaataaatgctgagacacatttagaggagcttctggtagccggcggcaaaccgccgagctctacagccagaggactcaaattcttctatgggagcttgcatgatatcgtaggtgtcaatgctaagagctatcattggcagattggtctctgatcatgcatcgactgacggaagatctgctcattcgtgattacctttgtgacggcaggaaagctttccttgcgaagatgggaatgctgagcgcgtcaaagacgcttcggtctccctggcggcccatggtcaatttatgtacgtttctaccgtaacacatcagcgaatcttttgactgacgatagaacaacaactgcatgtcattcttagagaaaacatccacttgtctccgtataattcccccaatgatttctatgatcgatgttacccaaggtacaaagtattactcgataaagctcaacagttcttgctcaagacaggaggtgtaccagagaaaacattagtgtttatcaggttcgtcatatcatactattgtgatggatcattccttgttattcagttcatccttttcacatcctctattcctaatttggtgtttaaatgctggcttaaaaatatgaatatagcgctggatttgacgcgaatcagcatgagttgcctggcatgcaacgtcacggatgcaacgtccctgtccgtatttttcttccttcccaccttttccgaaaagtagacagacatggctcaacctacattccgaactgatctgtcgcatgatactctaaaatttctcaccgaacaggtatcattctactcccaatttcattcagacacattcaaatttgcaaaagagcatgcccttgggagagttattagtgtatttgaaggtggctatggagacaaggcattgatgagtggagtattgagcagtttggtaggaatgacgctagaagaacaaggaaggttgaacggggaggactggtggagctctagctgtctgagcaaggtaaggaaaatcctctctgttctttcttgttctacatctcatgtcttggaacgtagctaaaatgatcagaccaaaatacatagcttgagaaagcgacccgactgccaacttctcgcagaacaacccgatctcaaccatcagctctggctcaaccaatcccagcgccattgacacctgaactcgcttctctgtcttggctaactcgatcactaacgattctaaactcaattgagtcccatccgagtttcccacaacctcctccgccgattccaaaatttggaggaatgagagatgtggctgagaaacgagtattgaggacgagaggagcggcagttgcgagaggggcggtcaaggtcgatgtgaaggctcaggaacgagtcatcacaacagatcagaaagaagagcatatatcttgctcctcttcctcttcctcctcctcatcctcatcgtcatcatcatcatcagaagaggaagaggaagagacggtcaagccaaccaagacaactaaagcggagccaaagaggatcatcctcgctcaaccaatctctgaattttctaatctcaaacttgaccccaaacccgactctgactctatctactctacatcaacaccaacgactatcgctactcagccttcaacgacatcaacgacatcaacggctgttgctcctaaacgaatcattctaaagtttcctaagccggcttctgcacccatacctgctcctgcgcccgtgtctgtgtctgtgcctgcgcctgcgcctgaatctgaacttggacgtcatcccgacggatcaagtcaacacatctagttcttatgattatctccattctgcatgagattaattgagtgacatcggcgttctttatacaaaggaaacaaatgagaaaagaaaggaaaggacagatggaccaggaacttcggactaaaagaaaggaaaagaaagacggtttcctatataggagagggcgacgatcaatagatgtaagaagaaaccaagtgcaaatagtaagagggatactgtatcgacaagtggttagtgaattgagacgtttaagttacatgcaatctgaaaggtatgataaatccttaaataggtatctgcagagaagaaagaaagattcggtaaagatgggaaaagatcattcgacgatgttcggtgaagaagagaaaattcggcagagtacaaaacggttgacttcagagagaagcaaagagagggaaggaagaggattctatcataatcgagtatacagtttcgagtgcttggacaaaaccactgacttgtatgaggaggaagaagaggatactatacctgattagacacttgtcgaagccagctcgtacctaagagtttaaacacgtgaaaatacaacaaacattttagaactcagccggataattgagagcagataccgaacaaagagagaagtgaagaaacaagaaaatgatagaataaaagaaaacaataaacaacttacgggcaggtgatatcttcaattgaggttcgatccgatcgagtgccaaccacgccaacagctttcatatcgattaccattcgaatgtcgaatgtagtcctgtttgtacctggatagatatgcgcacatgcatcgtagaatgataaccctgcagacattcattcgacgttgtgcttagtacgaactaggcccggtacgaagatgaaccaagagacatgcaaacaagtaacagaaactttgtaaaacacacaggtaggatccgtagagttgtaaccttcgtatgagaaagtgacattcatggagaatgggaacagcttcttggcaggcattgtgcccttccatacacctgtgccaacttgcttgtcggtgctcagatcatacagccgagcggtgatcgacttgaaagtgattgggatataagtcgctttggtgtcggctgtttatgggaatttagagtcaacatattgctctgcgatagaaatgaagaacgaaagaaacttaggataaagtctcaaaccttggaggttcaaagtggcgggaaaggtgaagttggcaggagtccgactgaatacagcggatgtgttgtccaagccggtagggatggtgaatggatccgattctgcccagctgaagctaggaacccgagggatgaggaagtacaacatgatcgccatgctagtatccgacgaacaggagcaaataagtttccaattataattacacatgagatagaagtggaaagagaagacaaacatgataatgaggacacctgtgctgtaaaggagcaactgtcttagactcagtccacaacaataccttccacgatcttcatcccgagtaaatgctcgccactttcgtttcctcttcagcgcagagtcttcttttcgactctttttggtcaagctatgtaattcctccttcttccatctgataagcagagcaagagtaaggattccagtcttgttggaagaacaagcggaaagagacgattaaagcactcactctgctcccagaacgggtacggttactaactccgagatttgcatctcggcgttgctcgccggctttccaccttgtgagaattcactagcagcatattttccataatgcgatctgcctctctcttgtgacggcaggagagaagccattgactgagatcctgtcgtggaatttgggccttttggagtctgatgaggttgaccagccccatacaggagcggtgtgttgtacattgacgatcctggccggctgctggtcggccttcaagattcgtatgaagaatgtatctatacacgtcaaggataaattcgagactgtgagaattctagcctgttggaacttaccgttgattacgagtggaagaaacgaatcgctcgccctcaatgcccggagcaaggtgtgaacgggtgttgtaccttggtccggcattgttgaaatctgttgcaacacgtggaagaatgtatataagtgagcgtgtatgttgtatttccggcatacacaggccaggcaaccaaagctggcctggacgactgaagagaagaagaaacgggaacaaaacgaaccagcgtagatatcccaaccatcgccttccccttctggtgcgccatagacttccctttcgtcttcttcctcctcctcctccgggtgatctctgtaggctgattgccgagtagactgaccaggccgattcaactgtgcgctttccggacgagtccgcacggacgaagcgtaatctttggaatgagggcgagaacgctggcctgactgtccagagctagcagagagcgatatgagagggattgaagccgacgggtcagactgacgatgagagttatacgaggacatgatatgtgtatgtgtgtgatatccaagatgtgtgagtacagaacaggcgagggaagagcaacagccaaggacaacaagcggccaggaaaccacgatcggtgactaccccaatttgacaatggttacaaatagatgatctcatatgtagcggatccgtaaccaggctgcataaacaaagaaaggcacaagagaagaaaacccccaaaagaggaacgtttccattcgctttcgccatctcttcttgctccaacccaccatctacttctcatcatgtcttcatcgtaaggtctttttcggtctatttaatctcatgggtgtctgattatgtactcaagctttggtcctctcatagtttcaatcttcagcacaacaagactacgcctttcgaaggagtgagtatctgtttttttctttattcagttcatcttttctttctcggtctccatctcaagtacataaatatatgtatactaatccatcttgctcatctctcacctttctagcaaaaacctggaacttccggtttgaggaaaaaggtcaaagtcttccagcaacaggttcgtagccgtcgctcactcattgtctcgattgatcatatcacatcgcaaacgataggtttcattcagagtgaaacatctacacgcggatctctacactcctttgctcatcactcaacaatcagtccttcgagcgtctcacacacgaaagaatgtcaactgatctcatttcctttgttatcaaacatacacatacatattcaaatcctttgctcgtatattagcactacactgagaacttcattcaggccaccctttcttccattcctggaggaccggagggcaagactcttgtggttggaggtgacggtcgatacttcgcccgagaaaccgtccagactatcgtccaaattgccgccggaaacggtgttagcaagctcatcgttggctacgactctatcctctccacccccgccgcttcggccgtcattcgacaaaggaaagccgatggaggaattcttctaactgcctctcacaaccctggaggacccgagaacgatttcggaatcaagtacaacatgtccaacgggtatgttctatcgctattcctcttgtgtcatagaactatctcctcaatatatctcaccattttcacaacagaggccctgctcctgagggcatcaccgacaagatcttcgaatacaccaagaccatcactgagtacaaatcgattagcattccccatgtaagtgtcctgaaaattatccgggtcatatagcaagttctcaataaatgtgttttacttccctatattcaaaggtcgaccttcgcagcgtaggtgttgtcactcatggccctattacggtcgaggtcattgattctgtagcagactacctcgagctactcaagtcaatctttgactttgaggctatcaagtcatacctacactcccctgctcccggtaccaagaagcctaccgtcttgttcgatgcgctcaacggggttaccggcccctacgggcaagccatcttctgccaaactcttggcctgactgaagcatctattcagaactgtgttcctctgcctgactttggaggatcccacccggatcccaacttaacgtatgcccacgatcttgtcgctcgggttgagaaggagcaaatctctttcggagcagcttccgatggagacggagaccgaaacatgatctacggcgctggagcattcgtgacaccatctgactctgtcgccatcattgctgactgggcccaggaggcaattccttacttcaaggatggaatcaagggtttggccagaagtatgcccacctctggagctatcgacctggtcgccaaggagaagaacttcgagatctttgaggtccctactggtacgcaccattcattgatcttggtctgtcatttgatgcatgcacacacaagcgcattcatctaccggtgtctatcatgatcaaaccgatctgaccactccgttgctgttatttaatcgtacaggatggaaattctttggaaacttgatggatgctggccgactttccatctgtggagaggagtctttcggaactggatctgatcacatccgagagaaggatgggctttgggccgtcatggcttggttgcagatccttgccactgctcaaaagaccatgcccggagctggtatcaccgaaatccagaacgcattctacaagaagtatggacgaagcttcttctctcgatatgattacgaggagatcgagtctgagcacgccaacaagttgatcgaccacattcggtcgacctttgaggcctcatccttcattggttcgtccctcaaggcaaccaccacggacaagacattcatcgtcaaagaggccgatgatttcgcctacactgatcccatcgacggatcggttagcaaaaaccagggactctacgttcgattcgaagacggatcaaggatcgtgttccgactttctggtactggatcatctggcgctacgtatgtctcttttcgttcttttcagatatcgtttcagtctcgttacatacctcttgtcgatgaatgactgattctttatcttcgatttctgacgaatagcgttcgagtatacctcgagcgatactccaagaacgagtccgagtacggattggatgcgcaggagggtctcaagcctctgatcgaggtcgcactctccatgtctaagctggtcgaattcaccggaaggaaggagcctaccgttatcactgttcgttcctgcttattctgttgtcaaacgtctgcatacgagcgctaatccgatctacctttttctcttgatagtaattcgactcgtctatcctgtgctttccctcctcttcatcagatttctcctctgtgctcttctgtaattttgacgactttctagctgcgattgtctgcacttgttccgctatattgggatttcgaatgcttaatggctgtctatctgaaactgtaacggtgcaacatatggaagtgtgacaagagctggaacaagctcaattacgcgcgaatacattcttttacctaacgcgtcaatcaaatatcgacgcgtcagaacgcgtcaagcctgtcaaccaactctcatttaacatctcactgcgcgtgtgctcattcatataccttctctaccgaccacactttccatcttctctaccttgtgcctccttccttggtctctatctaaatcatgtccaaagctaatgctactccaaaagacaaaaagcaaacaactcttcttggattcttttcaaaatcatcttccctcggtcctccgtcttcttccccaagcagaccgttatcgagcgcctcgaacctaaagtcggcaacgccttcgactctgactaagagtcggtcggttggtgggggaagtgctcttcctcatccgccctcatcatctcctctagctgcttcgagtgctctcaagtcaagacagacgaaatctttaagtgggaaaccgttatcatcgaaggatgatcccttcacgatcgatgaagtggaggacgatcatgatgttgagcctatcaccgaggcgaagaagacgattatgacggagaagctggagaaggacgagagaggcggcgaaaaagctttgtcagagacgagcagccggctaagtccgtttccatcttcatccctatctgaagtcgacatgaatgataaagagaagaacggagatccggtggctatggacggagtggaggaagatgaagatgaagagttccctgtcggacgatctgtcagtagaagatcaatctttttaccatctaatataacagctgaagtttaatatggattctgttctccgttggttctgatgttcggtcagcaacgagtcaagagaaagatcaattttgttgaatctgatctatctgacgcagatgatgaagaacctaagaagccaaaggcaatcactcgcaaaggtaacacatcttttgttgcttcagtgatcaacttgaaactcgataagctgaaaccgttcattggtaaaatgcacttctttcaggctccaagaaggcgaaggcagtgtcatctgatgacgagttcaaaatggggtccgatgaagaggctttactcggtaggctttaatttgtcaacttaacgctatcaggctgatcacagacagaagcctgacaatctctgtcgttttgatatcgtgtcttcttcttcgtatgcaatcgaagctgctgctgcttccgagtttgacaagtacgagccagacgactcattctccgctgaagacacacccaaggccaagtctaaacaacaaaagccaaaagcaccgactcgacctccacctcgaccgattcctagtggcacctcctcgagtaacacaggaaatggatccaactcgatgttgactgctgccgaacagaggaagcagcaaaacaaagatgacaagaaggcggccgaggactgttttgactttttgaagacgatcaaagatgtttgtccagctttctcgtcttgtttgtataccgtctatgctgtacgctgaatcggatcgaatcaactcgaatttcctattcgaaactaaacagaaagagggacacactaccggtgaggatttctttcttagtcttcatctggtcagactaactgatatgataacttatgacccgttatcctttcgtttctactttatgcgtcagatcatccggaatacgatcctcggacgctgtatatacccaaatccgcttggaacaagtttacgcctttcgagacccaggttggtagtctataagtttctttatagttgtcgtcgtcttgcttctctctgaaacagtcttgttgttttgaatctttgtttgatctcgtcatacgctacagttttggaagtaagttgttggtttgtttcatctagctctgagtcagaagcagcatgatgctcatatgcgtatatccggtcatttttttcttcttgaaaattatacagcattaaacaatatcactatgataccatcctgttcttccagaagggaaagttcttcgagttggtcagtctgtcttgcacaacggaacgtcaaaattgatacatacgtgaacctaattctctgtttcttgtatattatatagtatgaaaacgatgcggtatgttgattctgtaaccctcttgaatagtcaaaatgactgacaaattctttttcttataaacttgatcagcaaaccggttttctagaatttggattgaaaatgacagacagagtcaaaatgaagatggttagtctggactgagctctgatacacaaatgagtgtgttgtcggtgtctatattgatcataccattcttttgccggatgacaacaggtaggtgtaccggagcagaatttcgaaatgtggtatgcactatccagactacgccagtatctgtctttgtttgcaaacccgccaattcaagactcagcgctgatcgtcttctcgttggcgtaatccgcgctttgacctatagggctgccaaattccttgccgctggatacaaggtagggcgagttgagcaatctgaaaccgctttagggttagtgactcattagatcctattgcatcttgcccctcttctgagattggccattagctaatctttcgtgcctttgtcatttgtgaactgggtttatcagtgcagagatgaggatgaaagcgtctggcggaaaagcgcagatcgtgaacagagaactcaaacatgtgttgacgaacggaactggtatgtcttgtacttgtgctagctctgtttctcgctcatatcgcaaacctgatctttgttcttctctccttcctttcgtttccctatgttccagtgtccgatccgtcatacctggctgggttcgtcttcgtctttcttcaatcgaatgctatcattacttttcgacgcatagaatgtctgaatttatctctttaaccccaattattagagatgaagctaatcattgcatatccatcaaagtacgttagacttcacttgtgattctacatagctcaccacctctgacgagtttctctgccttgcgctctcattctaatatgactaacaggaagactcgtcgaacctgataaacccatctttcggaatcaccgttctcgatgccgccaccggagccttctcactctctgcatttgaagatgatgtctgtaaaaccaaattggagaccatgttcagacagctccgcccaaaagagttgattcacgagaaggtgcgacagcctattctcctacaacagaacacatggcagaaaggaagctgatcttaatcatctgttgatatcttggggcggtctgtttcatatatagggtaacttgtcggtctcaactcttcgaacgcttcggtctatcatctcgtcgtcctgcgcatggacagcgatgaagcctcagacggattttacgtctgcagctaacacgttagacatactttcagacttttttgccctccagtctgaggggtcggacaaacaggcagtgttgccagaagtcattgagaagtttagagaggaaccactggccatcgaaagtttgggaggtctagtttcgtcagtaaagaaatatttctagttccaagccagaatttagtttggtattttcgtcgctcattgctttttttatcgaatgtatcggggttgggtcggagcacagatatctgaagcagcttaaccttgacaaagatttgttgagccaaaagaactttgacatctacgatccgattcgacaaaacaagtctttgatactcaacggaaacaccttagctcatatcgaggtttgtatcctttctcacaatctaattctgcctctctctatcatatgaaaacatgctgattactgtacactttctcatcccggtttgggccaacgatatgcatttaggttcttgtcaactctgaaggcggcgaggaaggaacattgctcgatctactgcagaagtgtagaacacccttcggaaagcgacttttccgcgtgtggctctgtcaccccttgagggacatacaagctatcaatgctcggtaaggttgagtatcttttgaggatcagcttcaaggactgatcaaatctcgagtgattggtgtgatgatgatgtaggctcgatgcggttgacgagctcatggagcatccaacattcataactgattttagagagcttgctaaaggtgcgctttagtttctaagcaattcaataacttattaagccaggtctaaatttacaaaattgtgttatgatcaggtgtaccggatttggaacgaatgatttctcgaattcatgcaggatccatcaagattgctgacttcatgaaagtgctcaaagtaaccacctgttctcatatacgcatcatcagctctccacgaaaactaggctgatgagttgttcataccttttatctcttttgaagtctttcgaaatcattcaaaaacgcttcgaaaagcttcgcgatatttccacgtcatttgagtcaaccagtgtcgctactctccttggttccgcaccggatttatcatcgtatattgaaaacgttcggacgatgttcacgtttgacaaggacgacggtactctgcttcctgcggatggaagagacgaggcatacgaggagataatacaagagttagaaaccctagaggatcaattagaaggtctcagagaaaagtttagcaaacagctcaagtgagtttgttacattgtgcccatgccgataggtcgaattctgatctatctgcgttcatccggacaggacggaagtcgtgtactggcattcagctcagggacagaaagagagtacgtaagacatactccgaatcaatccttgtgtattgatgagactgatcagatgctgctcggatcttgtagttttccaacttgcaggtaaattgacatttacagcaaaagacacagattgttgagcaacttgactcatattggccttgtattctcgattagtcccctcgtccaaaaaggtgccttcgaactggaccaagacttccggaacgaaggtttgtgtaaaatgcatgatttctgcgctttccttgatccatctaataacctcttgttttcccgctgattataggctcaaaatcgatactacgctcctgagactctgccgattattcgaaagattcaagaagctcgagaaactcgtgggcaagttgttcggtcgttcgtcaacgtaagttcttgctttgaatacagtgatgatatatgttgtttcaatcaaattgaacaaacctgcccttttttttccggccacagcgtttatacgccgagttcgataaggagcgcagtgtttggctttcgtgagtgatatcttctatacattctgttatgctctccatcactaacctcgctggtttttattgcacagttccgtcaagacattggccgagcttgattgtctttgcagtctggctaccgcttctctggagcttgatcaaccaaaatgtcgtccgacatttgtcgattcggatcaagcattcttaaagtttgagtgagtggtcttccattccgtggagcgtgagactggctgggattgcattaatatttttcttctggaaactgttatattcaatcagatctcttcgacatccttctatgtgtctccgggcagattttatccctaacgatgtagagttaggaggagataaggcgagaatctctctcctcaccggtccgaacatggcgggaaagagtatgtattggtttgacttaatctgggacgactttcgcagaaaataaagactaacagtgaaatggcttaatcaggtactcttcttcgaacgactgctgccggggttatcatggctcaactggtatgtcgatctatgcattttcctgctgaaggtgctgttctatcgcgggtggctcatgtctaattcaattttccatctctcagggaatgtatgttggagctgagagcgcgacgtgagttgatgcctttcccctaacttcatgctaggcacaaatatacggtttcaacgctaagcttgttcttgaataggttatcacctttggattgtatcatgacgcgaatgggagctatggacaatatgttcagccagtcgtccaccttcaaagtagagcttgatgaatggtacgtttattttcgtattccattccgattttatcagatcattctttgtctgacgagagtcagacctattgctttcaacatttgtcacacccgaacagcgcaaagattttgcgcgaatgtggacccaaatcgttatgcatcttagacgagttgggtcgtggaactagcacgtatgatggaatggccatcgctggtgtaagctttcctcctatcattctctctcacgcgctatcaccgttccatgagttttaatttctggattttggatgtatggcgacgtgcgtcttgaccggaacaggccgtcttacatcatctggccgggacaacgcttccactcgggttttttgctgtaagcgctcgctctgctttctataattccttgtaccttcactgatacctcactttctcttcttcactgtctatcttgaagacacactatggaacgcttactgatgacttcgcgtatcatcccaatatccgagcaatgcatatgcaaactcaagtggacgaggagaaacgagaagtcacattcttgtacaagctcattcagggtaaagccgagagtagtcacggaacccgtacgttatcttttctttcaccactccttatctttgttagcctgtagttctgtattttgtaaccttctctgattcacgttctcctctgttccttttcaacgatcgaaacagatgtcgcccacctagcaggtgtcccgctggaagtggtgtctagagcagaaacgatatcttccacgttcttcaaagctcagcaaagtaggctctcagcaggccgtcgaacagagttacctttggtcgtccacggagacttcgcgagactcgtaaagctcggacttggactaggcgggaatgaaaaggaggaggtaaaggtaggcggagtcgaagtgtttagatacctgagagaaggaatcaagaggactttagaacaagccgccactgtcggatccggttgatcaggtttttttcctcctttctttccgtctttttcgttccttctctttgtggatctattggtgtatatatatatagccgtttctgtcaggttaatcaaccatagacggaacgattgacaaccaagaaacaacgtcttgagaaaagaagggaaaagagatacatagatcaatctggagagctggtaacaaacttgtcataaagataagagaaacgatagagtagagcaatatcaaacacatatagcacagaacgtgaacgaggagcagacaacatatacaaccgaatatggtttttttcgtacaaaagagattttcagaaaagaaaggaaagaaggtcatacgtagacggtcgttgaaaatgatcaacgtatcccactcagacgacgtggcgtctcgcattggacgacccatgagcttccacctcctccaacgagacgaccgccatatccttcaggttcacttcatccgccttcttgtccacatcgttgtccctctccactacagaccgagggggaggggggcgggaatgggtgacgtgatcgacaggagcttcggtcccttcggcaggaagaatcaaattgaggatgacaccgatgactccacaactcaagtaaggagtagagaccacgatgatcaacgaggaaaggaaaccttgtagagcggcgttcgtgctggtgacaccttcgaagaggtatgtcgtccacgtagggaccaaaaggttgccgagtccgaaactgagggaggcggcgaggatgaaacgatctcgtctggtgtaattgagcatagagagaactcgaagaccacttgtggcaacctgagagattggaagataacagaaaagacacaatgtcagtcgatacaaccaaaaatactgcacattaaactgaaacaagtttgaacgaacgcttgcgaacaagaaagtactacacatgttgaagacaggaatgaatcatgcaaatcaaaacatgagtaaaggaaattacacacagctgcatgaattgagatgtcaaaacgagaaaaacacgtacgtgactccacccaggacggggtaagggattgataagaagacaccactaatctttccaatgactccataaagaatgatgaacgaagcgcagaagaaacccgctcgtctattggctgttatttgttgcgtatcgaacaagagaagagacgaggttagagaggattcaacacgtttcgcgacttataacgaaggcagagatgcgcagatggtagaactgaccacatcgagtcaagacaatgattccattgttctgagcaaagattgacatctgtaatgtttatgaaaggcagatttgagtggaaggttctttgaagcacagcttgatctgaatcggaaaagagaagagaggaaaaagagcaacatacgggagagacagtgaacgctccggctagcaaaccagcgactccgtccgaaagcacacctccctggattcggctatcaaacacctcgccctctacttctactcgggaagcttcggaggatgcggtgatactatacatggggtttctcgtcagaatttgcgcagacttcattaaggatagactcagaaagtgtaaaaactcactctccgatggcttcgacagcaagtgtgacatacacagccatcatagctattgaaataaaatgaaagaaaaaatggtagatcagggctctgaacaagattggataaagaggaggtctcaagagattactcacgaaggatagctggtccatagatcgaaagtttaaaagtctttacccagaggaacgtgatagctggggatgtggagatgctgcttccgtcgacgtatcccgtgggtccagcgacgatcattccgacgatcagaccaataacgatacttgcgttcctcatgaacggacttccgaaaatttcggtgatgacgatctgtaaagtccatcaaaacgaattttgagtacgttttccagaggagaaaacctcgagggatacataccgtgatgaatgagaggaatccaagcccaatgaattgaggacttccccacagagcgggtttaggtgcagcgatgttgggacagagtgcaaagtacccggtggctggtcttcctgaacagtcactgttgcgcaagaaggagaagatgggggtggagaacgattagagatcgaacgcaagtgatttatctgttggtagatagggacagaacagcacgtactttgaacctcctgcccagttcaagatacctgaatctccaatcaacgcagctccgatcatgaatacgaccgttccggtgatctacaaatttgttggcacaggaaagtagatgagcatgtatcgtcagatttccatcttgtatctagaacatctaaaacagtctagtgagagagaggacgtacgataggcgggaaaagcttcttgagcttctttgcggagacaaacgacaggccgatttcaagaatcgagcagagcatagcttttgtatcacaaccggttaaagaagagacgttgataggtgagccgatggagatgcttacttcgtttctggcccacaaaagaagataagaggaaaaatatcgtacatgtaccaatgagcgctccgtatgcatccgggcaagcagatttggtgacggttccatcagctgcggtggtcgttgaacattttccagagctatagtacgagtcaaagatggcgaaggcgctagacagtgtggcaaaactggtgcccacaacggtgatcagcccggctgaaaagagtcacacgcaaggtagacgaacagtaatcgttgatgtcagcaaaacaggcagacaagagggtgagttgattgaaaagacttacttccaaggtagtaattcttgtagagcctgatccctggattccatgaagagtaacccggttttgttcgtaaataatgatttgggctgataagaaactctcgaaatgaatgaggcacgaacttgacatttgcatcatagacaaaagtccagatgcgaccaaggaggctgagatcatgtaagactgggtctcggcatcgaggttgatgtagttctaagacagcaaagagggaatatcaggctgagtgtcatccaaaaggcaaaagctatgatacagtccgggactcacagcgaagatgataggaggagtgaccaaaccggcgatcatgccgagcgagtgttggaagccggccacgatctatgtgcatcgaatcggaagtcacaagagattgccatcagatttggttgatatcgatcaagacaaacgagagaagagtagattgatctcgagaagtactcacggccagcaataggggtagatcgtcatgtaacccgtagaacggaggcatcctgttgattggcctcttctccccatactcttccaactcgcccaattcctccgatctctcctttgctttggaacgaccaaaccgatagggaaactggggcaggcaaagctctttaaagtcatagtcaccgaaccaaccatcctttgtggtgagcttatactttgcaaactcgtatttggattgaatcgtctcttttttcgatcgctgatgggcatcaggagcggccgtggcagatggaggggtggtgatgtattctaccgacatgataagtcgtgcgaggggagagtgcgtatggctgccggatatgtgtgagagagtgaccagttaatgggaaggaaaggaaaaaggatcccatcgatcagaccaagagtcgggtatttagatgaaatctcattcaatagataagcaagcaatcaaggacgccatcatccatgaaggtttcctgctctgagcgagacgacggcgaagagagaaggtgttccaagataaatttcattcggctagataagcaagcgactaagccgaggcttatcttttttttgactacctgcgacgcaacccatccggtcgaatcggacgagcggcccgttgctcttggtgatacacattttatcttctttccgaatcagatttctgttgatcgatatcatggattctagtggttgatatcatagatcttggtggatgcttcaatacacgtggccaacgttacagacagaacatgtgtaatcatatttcatttatcagatgtggatgccgctccttttcgtccttcttccgtaggtacataaaagagaagaaaactatgaagaataggcgagcgaagcatcggccatctttaatgctccctcaaacgttttgttgccctgttgataggtaggtaggtagtcgtcttgggtcagtcaaaagcgacgatatttaccgtggcgcgaagaaaagctaagagaacaaaccccgatgaatcccgcggcatggcaaaagatgcaaccgtcgattccaatcagaccggacagctcttgatctcgaactcctcgccatctaaaattgtcgtcacggtcatccgtacagatgagtcagttctgtttcgtcaaaataatggttctcctttccaaacatcgccaagcgtccctatcttctgatttcaccaccctcttcacgttatcacagaatcaaaacattgactcacggctcgggcatagccttcctcgactcgaaactttcgcccgacttgggaatcgcctggatcctccacgcgttggcagcctcatctgggtagagaacgtaaagctgtcgaccgaattgaaattgtcaatagtgtaggctctttgagccccactggctcgaattacaacgccgaggcgccagggcgaaggtacgtaccggcttatcctcatctttgataccagcatcctcctcgacgttgaacagatgctccttccagggagcaaagtcttcaaacacaatcacctttccgctcgggtggacggacgttcgcttctcgaacgcggcctgcactagcgatcgggcgggtagccaggcctcgtgcaagtacgagagtttgctgaggaactctgagccggtcaaagctgaagccacctggaacttctcctatatgtcattagaaatgacagaacagacagaactatcagtaggaagaacacatctagttttgggatgaagaggatcggcacctacgtcaagaatcgagttgtcagacttttcattccatcgtgggttcagtccaccgactcttgaactcaaatcggtgcttgatctgtacctggccggctcggaggtgacatattggctcacgccgttgtcaatcccatcaatcgcctcaatgaaggcctcatatagcttcaggtgaagcgtctgaatcgatggatcggacacaggcacggaggtcacctgggacaggatgtcctttccaaagtgtctttttattgaaaagaatagaaaataaacacatacatacacacatacgttgtttagacgagtcagtttgaaagatgacaaaatatcaatccaagattggaaaggacagacttgtagacaaggcctgcggaggaaagcttggtgttgaagccttggccaaagacctcggtaaagcctcgctggtgatgatcgtatcggtgaacagattcgtcgtagactcctcctacatccacaacaatgtcgcaagtatccactatctcattaaaaaagacacatcaagccgaagcgcaatcaatatcatattgagcttgcccggttggtcagttcaaccaagagggcaacttacgagtagcgggatctcgggttctgacgacggctgagtaccgaagcggttagagttaggcatataattaaaagatgaccagtgccaataagataacgatcgacgtacatgcatccttatactggggaagaagcttgagcataaagacctatcgaaataaagctcaagcggtcaacgtcgaacctcgcggcatgtatcggaagctacctgtcgacgtacagcaagcgcctcatcacagtgaaaggtaccagaatgagtgccgatgaccttgatttgagttttgaatcacaaacagcgcacgtaagtgatcgttcccaggcaaagggaccagaaaacatcagaaagcaacgcccaaaacgagccattcatcaagtcagctatgaactatgaaactatctcagttctttccagcaaagcaagcgatcataacctaccaaaggttcacccgcaagcttggccttcttctcgatatgaacagctgacatattacagtggcgatagaggatagatggtacaggtcgatgagcagatgatctgatgatgggtctaaaggacatctatccgtggatttgatggaatttgagactgggcgcatcaacttttgatccatccccaagcctgacgttaaactaaagtttgatcatgtcagtcttacgccattctcggttaaatccaacctccacttcttacggtatatttgatcttgactctctgttctacacgcagactggcatctactttcagccgtcttttctttcaactcgatcctagtttctgttgactttgtttggacaagaacaatgatagggtccatcgtagagaaaccttcatcttcgcctaaaccgccgctgtttgtgccgccttcggctcccactccgggcggcttcccccgcgcggcacaccgttccaaatccacttcactcttcgcccaagcccgttcgaagccatcgccatccaggcagatccaagctcctgttgttcaatctaccatcccaatccctccacctcctcgctctcgatatcctttggagagccatcatgaccaatcagtctccgaggaaagaagaatcatcgagagcgcacagagggagaatgaagagcgtatagcggggatgagtctcgacgagagagagcaggaagcaagagagctcgtagaaagattcggaggtggtttagccgatctcttaaggaaaagacgagaagctcgagaggctaaagagaacagcaatgccacttccgcctctttgtctgtatctcaggtctcagtggattcaaactcggacgagccaggtgcgttgagtatgacacatcatatcatttgacgtacgcttatgatcttaaattcttccttctgcagcgagttcaccgtctattacagctccgaaagagacgcaagaagaaccctctgtctccaagacgggtatgttccttctcacgtatcattatctctcacgtggttgaatcgtttcatgttgtccttacacactcgttcatcaatagttcggtttgcaaccaatcccgaatccatgccggcttcgttccaatcaacgatatcgaatcaacccatttctgatcctatatcgcccgaggatacgcccgcctcaattctcagccaatacttccctactgataccacttatgatccgtccaaacttgaatggctccaaccacttccttccaattcgaccacccttgctccctctgcgccttcttcgtcccgatacgacctatccggccagccaatctcaatatctcgatcagcctctctgcccacacatctagggctccatcatcatggagatgatcctggcctagcaggctacactttggatgaggtccttcatctttgcctgtcgaccagcgtttctcaacgagtagctatgctggacgtcctctccaagattgtcagagtatccgcccgtctggacacgaacggaatactatctcaaggcgaagaagctgcagaagctgagagtctggcagaaaaagctctggagatagctggtcgatcgttggaggaaggaagaggaggagtcaacgttatctcccgagggatagaaatcatttacgaggttcttgtcggcagcggtgcacagggagagggaaaggaggaagaagatgtcgagatacatgaggaagtgatagatggtgttctggctcctgggctagaagggaaagatagatcaatcctagtaagactgccaggacttattccgctcctggtagttcagctggggaacccaggattgatgtcaagaacaaaccatcaactactggccattctagttcgaatggcacggctgcctgatccagttggcgatcttttgctctcttcgtcctccgtcaattcggtttcctcctcatcacctttgctccagtcaatattgcgaaacctctcagaatcccacccagaccctctcaatttgatactcctccacgcactcgtcgtttcgtcaaggaaaaccgctgagcggctgacgaatcatccttcttctcctttacccgctctccttcggtttgtcgcgctcggttcgagctcaccccacctcttgatcttggctagactttcaatcgacatctattcttcgttaggacggtatgggcttttatcgttcatttgttcagatggatcggatatctggcgcaatattgaaatcactattcatcagaatcttcgaacattgcactcggctaccccgtcttggccttcagtttcccatttggcactggccaggtctttttactccttgcttacaagttggacagtctgcgcgacggatccacatcagacatcaccagagcatgatatcacttggtctcaggttcaaggaatgggttggttccctgatgcgcttgtcgtcttgtctgggcttctgtccatgccttggtcttcaaccggtgatacagctaaagcgttcttagtgagcgtgatgggatttgtgagagcttggatagaaggctcaaaggtgaacgaaccgaaaggaggagaggaagtcaggctgaaggttggtcagttggccgggctacaggtagacaaggcggaagagcttagtcgaatctgggctgggtccgtacaagcggaattacagaagtctgaagtcagttggtcgaccgtagcgaggactatccgtctgatggatggacttattcgccttgtggatccttctcaagcctccatcgaaaagctggacgagactcttggccagacgttcgatgtgcttttgacgttgtcttctcattggtcgtctaaacacgtatcattcctcgacgtccgaccaatcacctcgttcttgacggcatacctcctccacaaacgctccttccttccaaccgccgactggctgtccctcgctcttgatgtcctccgactcctggtccctggagatgaacctttggctcgttctttattggaggtcgtatttgcgctcgacctgacggaggttcctggtggaaaaacattattggatcaagttggacatcgacatgggttctggatcttggaaccatttttctactttgtgacctcaccctcagaagaatctcatatagcaccttcgttccctatgccgaggacgttgaagcagatcacttctctacgacttccttccgcccgatcttcgacctcttccccttcctcttcgtctcaccctcagtcaaagtgtggtctaccgctctccccaacatggttcttcagcccaatggatgaacttttacattcctcttcatctagagcttttgcttctgcccctccatcgtgggacgcttcagaacctgaacttgtccgagccactctcgcgtttgccaggcttgttcagaccttacctcgctcgtcattatcatcgtctaacactacagacaagaagaacagcagcatcagcaggttaaacccgagtcaagtgatgtatgaatgtatgaagatcttccttctcgagaaaggggtggtcgctccgcttgaagaaccaagcaaagacgaagaagggaaagaagtctttagggatccaggagtggaagctctcgttagagatctacttaaaccgagtttgttttggtcgagttcatacaacccacctcgttcgagtccgttcccttccggtttggagcaagcccatgctctgtcttctatttctgccccatcatcaacgatggcgacaacctcgggaggacaaggaggccagacaaaggactcttcgacacctttcttccagacatatacagacttccacgcgttgtacagctcaatctcatacgctcacccgatcttcagttcgttgctcctcccgcctctggcgatgggctacgaaaaggattacagagcgctcttctggaacggagagaacgtagggttactccctgggttcaccactcaggttgcccatgtcctttgtgaatacaacgctacccaggatgataacgaaagcagcggaaagaggatcgaaccgtacttctaccctcaagagacgcaaacagacattttaggatcatacctccgagcgctcgtccttccgttgaactctacccaagggagaccaggattggacagagaccgaacagagtttttgtactgggtagctatccatcatctgacttctgccatattttcgccagagtccgttgttcccaaggcggctggtacggaggtggtagtggaaaacaggaagagacatccatcggcccggtcgtttttactcgctctactcgagaaagccggggacgtcgttctttccgatctcgtgaaatacaaccagcccgagcgttcgatctctcaaacacaatccggacagcgatcgatgaggttccctccaggatgctatgatctctcaggattatcgtcctctgagatcaaagctcgactagacctggtgagggggtgggctggagagagaggcgtgagcaggatcaaggatgtaggctttggaagagacttttcctaaaatcaaaggcgagatcgcattcagactcgagaggaagatcaagagaggttgagtgatttactgtggatcaatttatgtcacttttccccctcggttatcgataggaccggaaagatgatgcatgtatgaagaggagaagaaatgcaaatatgaagaaaagtcatatcctcttattgctgagacatgatgtttcaaaagagtatataaaacgggttgggttgacgagtacatagctgaacagacaggggaagacgagtcaaaagagagatcgttcattgtcgctttgtatctgcgttcaaggccataccttgcggttcacaacaaatagctacggttatgcatcggataatacatcgatatccaagatacaagaacaagctagtgaacgggcaaaagtcaacggccaggcttgggatggagatagaggatgatgaggatgatgaggatgatgaaaaggaggtggtgaggggtatcatatatgtaagtatttttttgtgttttcgtatacctaatctcgttccccgtcagcccccagaataagagacaaagcggatggttaacattcggttactctcaaaggaaccggttataaccgacaagggtatcgtagaactcaagagaaacaagaaagacaggaacaacgcacgacataactgatcgacacggccggtacgacttttgccaaattgacagtcaaacctctatagagacctctccaaccttctctattgatcgtttgttgggcgacatctaggaaaccgttgtaaacctggggatgacctgtagagcctgatgcctgaagtttcgtccggagaaggttcatcgctgtggttgagcagggtagagtacaaaggttattcatgcaagatagtatgtaaacaatatgaaggacgaaggaaatgccgtacgataaacactggtagcgccgacccctccagagatcgcaccaaaagcgaggacggcatacgtctctggctcatccacattctggtgtctgcagtaatgtatttttctgaatcaaccgttcatcaatttcccgagaagagcaaacaagcagagaatcgagtgagcaagactttttcctatcttctcaagcaactactgaaagagaataaaggaaaacgtacagagtttcaaacgtgctcatatcgatggcagcataggggaacacgccaaccaagccaagctggatcaagtataaacatgaaaacaaccccggagatcaaaagagattcggccgttagtacaaaggtgcctaatgtatatcttgttttcttgatctgaaacagagtgatgcattgaaaaaagggaacgaaacgaaccgtcaaaccccgataataccttcttactcctccgttggcccacatcgttgctgccgtcttcagcaacacttttgcgctatgatcagatcctgctgtcgtcatatgtgccgttttcagtgtctccagctttgtagccaaacagaccaaacagaaagagatatcaaaaagccatgagccaaaatctgtaagaagagaaggaaggaaaactcaagatcgacgtacagggtagatggagaattgactggcgattcctccgagaccacctgccaggaacctagaagatccagagatcagagacggatcttcgacatcatcccagtatcgtgctaagagtcgtttctttgttcatcaaattatgatggatggggggagggccatggttagatagatgaatggatataacaatgttgggctaatcaaatagggagaacaaaatatattagaaacccaccgaggattcatatgagaaaaacttgatggcagattctggcatgatcttgattctgtttcgttcagttgaaggcaaagtgcgcgcgaattgttaggtgtcatgtctagatacgattaaacatatgatcagaggcaacaagaaagagacctacacgttcagtccgtttccgacccagaacgctcggagcccaccgccaccaaagtagagcctcatgatggctctcttaagattctggtacccagtatgagcgcctgtcgttgacgacggcccacctgataggccatgagagtctgtgatgaggaatactttaagtctgtcgaacggggcggtggcagtccgggagactgagaacagcgaaacgtttgttcgatgtgagcgttagtcgataatcagaatgcaaaacgaaaaagagggggcgacatactagcaccggcgacacctccggctcccaaaaacttgacggcgaccaacgcgctcaaatggtttgcgtcttcttcctcttcctcctcttcttcttcctcatccgtatcatggtctccatcaaggattgtttccgaacctgaggtttgacctgctgatgttgatggagaagtagactgaggtgactgaagatcagatgttagggtaggttttgatctggatgctgaagatattgttccggtagacaaggtaggactcgaggacgacggtgaggaggcggatgtagatgaggaggatgaagaggaggcagaagaagacgaagtagatggcaaacttgggaaggacggggtgatgtccccgtcagaattcaatctggctgcacctctaccatcagtgatttgctttctgtattgataaaactgtgtacagaaggcgcagacggggcaaagagacgcgcaagtgggtaggataggtgaaggcgaaagcgagaagcgtatgcgttcgttgtcagcttctccagttgaatgaatagtcctgatacataggaagaaaaagaaacaggaaggtttcgtaccctatagaactctggaacgctagcctttctagggaggagcaagaacatgtctctaaattcgatccaccggataccttccggtgtgttttcacctctggcttgtctagactgctcgccatgggttaggtaagatacaaagtcctgaatcgtagctggcgtgagggagatgtctatgaaggaagggtaccagagtatgaatcgatcagcaatttaggctgatgatcgtcatccgctggtgacaaagctctgcacagaggttaaggcaagagagggcctcaccagcacgagcagaagcagcctggatctcttgaacatcgaggaccccgtcttgatttctgtcgagatcctggaacgcatgccatagttctggatgacagaagagaaaaaagtagggaaaatgatgcacgtttcagccggagcatccttatcaaggaaacagatttgatgctaacaaactaaccagcctctctttcccaaagatacgtcctaaactctttccagtccaacatacgttcccgctgtttcccttcggatgtcggtgtctctgatggttcgtcatcttccggtttgagtccctctccagcaaactctcttgcctgtgggtttgtcggaccgagggagcacctccgaacgagctcctcttggtacattgcctggagaaactctgctcgttctggcgaaagcgaggcagaaaagccgggtgaaggagatgtggtcggagatgacggtgcggatgaggaggaggaggaagaagaggaagagaaagagaacgttgagctaagaggattgagccagctggagctggcgtttgagtatctggacgatggacctccggacggtggtgcactctgggttgaacctgttggtgttatcactgctgttgctgctgctccagctgctcctgctgctgtcgatttcgaggtcgacttgctggcctgctccttgtacgggatgtttgcccatagttccctcagctttttctcccttgcatgtttaccttctctggctcggaaggcggtcagctcggcgggcacgcccgctcgcttctctgcgttcgcacacggtagagccggtgtcggaccgtttcctggagacgacgaagatgaaatagaggaagacggtgttgatgacgatgacgatgaagacgatgatgatttgaacatggcaagacaaagagggctatgggtgtgtgtgtgtgtgagatagatgaaagaccggggggagatctcacaagggagcagggcgaagcaaagaaatgggatggccaacggaatgaatcaaccgagcacagaccgggaatcatcgggccaagagtttattacgaaaatttgtagtccgcattctagtcgggcggtgcagattttgtagtgtttagcgggtgcggcgtgcattagaattcagactacggagcgactacaggacgagtaaggattgggtaatgagcgagcgaactatgattttgtctcgagtggactacagaatgtactaggatggtttgtagtgttgccaagaggcgtgtgtgttcacgtgttttgtgtgaggctgtgctgccctctctagctctctcgctacagattcctagtacacttgcctaatgaacttttttgttgtctaatagaatatttgtaatgcttttctggtggattctcgtagtacattggactatccagcttttccaatacaaagttggtgtcttttgtagtctccagtgtagtcattttgcagcctttttttgtagtcttttttgtagtcttttttgtagtctgtcttgtagtcatatcccacttactttgtaaccttctcgctgcgttcttcattccgcccattccgatttctctcctctccgctttccctccaacatcctcaccgatctttgctcaaatggtgtttgctcaaaggacactcggtctctcacacaggtcagtgttttgctctctgctttcccttgctctgtctcgacctgtcctcatcagatctttttcctcctgtgttgcccgttggaccggttcaggctactcgccaaaagggctttcaacgttagatctcgtctttctttctctcttctctttatgtcttgatcctcctttctatctgttctgcttcttcgttccttcctgttctctatatgtcgctctcgctctccttccttcggcttctctcaaaccatcttataaatcctgcagtccggctaagatagtctatcttctacctttttctttcccaaatccttaggcaagccgaaccccactcgtcctccgatcagcccccattcttgcagctcatgccagaccgttctctctatggccttccagttccaagcctgccgagccgctcgctcctgcagacatagaatctagtgtggccactccggtcaacttgccccaacctccatctattcctacctcctccgtcagttcagtcgcttcgaccccttcatccggtctgatcactcccgacgcgtcccccctgggtttggagtccggtgtggtggacccgctcatggaccttgctaagctacccctccactacggagatctcaaggctatgggtctcggtagctggtggccaaccggttggatccaaagtgctttcgaggccattcaagtctcaactggacttccttggtgagcttgttctatgtccttccgcttagaccccctagcacgtactgtggtagactcaacttgtcttcctgttctgcctcctcaggtgggccacgattgtctctctcacgttcgccacccggctggccctcttcccgactttcatcggctctatccggacggccgctggcatggtccgaatccagcctgaaatggcgtcccttcaggaggccatgtctcgagccaagagcaatggggataccacatccatgcagtccctggcgatcgagatgagagacctcttcaaacgacacaacgttaaccctttgaacgcgctcaaacagccgttggtcactatgcccgtcttcatcagcatgttcctcgccctcaaatggatggccgagttgccagttccccagttgaaacttggaggaattcccggttggtgtaccgatctcaccgtcgccgatccgacgtacatcctgccagtcacctcggcagctgccacctggcttgtcgctcatgtcggtctctttttattttctttttttcttggcaacccctcctcttttcaaggtcatcctgctatcagatcatttgctgacacacgcgcgcactcgtctctgctcgtttccgtcttgcttttcttctctagtttggagcgaacggagcgcctcacagtaagcagccagatacccagattgccatgtccggtatcatcaagacgatctcgatcatgggtatccccttcttcggagggtttaccatccccgcggccatccccttgatcggtggcatgagcaacgctggtttccctgctgtgcgttctgcttcttcattgtcaaatctcagcggaattcgtcggttgactgaccttgtcttaataccgtcgacgtttgcaggccatcctgctctactggacatgctccaactctttcactttctttcaatccatcatcctccgaagcgatgccgtcagaaaggtactcaagttggagcccgtcccggagaagcagccgaacgatgaaaagccgttgacttcgattcaggccatcagaaagatgatgaagcctacgatcgaaaagtgtgtttgacatcattgttctggattctatcccttattttgtttcaaaaaaccgacatcaaatctgactttcaattgattcgctcatttcttgtgttttctttaactcaggttcgagcaacagaaaaaggcgttggacgaggctcagagtaggcaagccaggtattctaccaccgccaggttgagcgagaagaaatccgtctcggacgcactgagagaacggaagttagcagaggaagccaagcgagcttccggctcctcctcatcttcttccgcctcgccttctccttctaccgtctcggccgcggctgcggctgcgggccgggcgaatccgttcgagtctccagataaggaaggatgggatactgcttctgtcaatctttccagaccatccatccagaccatcactcctatttctaccgctacccctgcccctacccctagcgctgcttcgacaagtggcaagagtgaaaagatgattgagttggagaggcagagaaaggagattcaggagagaatcgataagcttcagaaagctctgaggaagtaagacgagtcggtcggtcggtcggtcggtcggtcggtcggtcggtcggtcggtcggtcggtcggnnnnnnnnnngtaggcaggggtgcttttaaccagaagaataagttctctttgcatcttttctcccaagagatagagaactatggattttgttggtggggattttatacaaaaattacgaatgtctgatgttctctcttgatccacaataaatatgagagctgaaaagatttcctaagatttcttttctgactggcgggccgagcagacaactcgtctcctgataaacaagataagcaaacaagtcgtgccgacagagacaagagagcgaaatctgaaagaatccaatatcatcatttcatccgttcataacaccccctctttcttcatctccagttggtgttggactcgactgcacaaactcgacccgcatcccttcgaccgatccgccatccgataccgaatctcgactctcggtctcggtctcggtctcgtctccgtcaacgctcatctcgacttcgactggaagacccatctcggcagcctcgatttcgtccatcgagctgagctcgtcctcttctccctcgagctcctctccctcctcctcgtcatcgtcatcgtcatcgttccactcaaaggactcacctccaaattcatctctgaaacccccggggatgttctccctcagacccgcagctattccattgacgaactcatcaaactcgatgacatcctcttcacctacttctcttactgtctcgtcaaaatactcgatcgttcgccagtcagggtacattcgccggaactcggcttgagagaacatctgagcattggcttctaccaatgggttcgatctagtcagactagaggtcgatatgagtgccgacgtcgatacgagtggtacagaggtgtcggaggtagaagaagtaggtgatggacgggcaggtcgggatggaaagagtggcgagaacggtactcgagaaggcggggttttaaccggtggctgatcgctcgataacgggaacggcgaatgaattagaatagactgggaacgcggtttttgtttgtttttttgtttgattaatagatagatacaaaagaaataggaatctcagccacagatgctagatctcgaggagggaaacggaggtcgcatcttatgaggagaaagtgaaacgtacgcattctacacctgcgctgatgaccatctgagcgttcaccggatgaagaatgcagctgttggtcaccgacgcatgacctaaattttcaaatgaccccgaatagatgaaccattcatttgggtgtgaggaaagcttgaagagtcagtgtcatatcctagacgcaaagatccagatctcgatgcaagtcatgcgcggccggatcatgagaactaacctccgactctgaatgccggccgatcgagttcaacaggaaaatacacattcgatttggtatcatcctttgtgtaaccttccagcaaaggaaatgaagaaccgcgttcgtgatgatgatgaatacaaggagcaacttgaacatcaaaagcaaaaacagagaccaaccaatctttttagagcttctcccaccttgatcaacgatcagcggtcgggtctggcgttctctacgttcgatcagttcttctaccgatgggattttccctatgtccgttgacgcgcgcaaccaggccatacgatgagtctccaagttgaaacaagctcttgagactgttcgaatgatatagactactcacatccgtatccctggtttgttccctcacgcatacgaatcttccgtcagttttccaagtggtaaacatataaggaaagaacagatatggctcacgtggaaatcgtctgagccagtcgagtagatcaaatctcctcctgcacctagatatccaaaagaaccatgctatgtcccatgttatcaacgaccaagatgccccatcagcctagaatctcacaaagcaacacaaataagacatgaaacaaaactcatccaaaccttgacggtacatctattcaagtaagatctttctccgttctcgaacctcaccggctttccatcgggttgcttctttcccgacaaggtagcaatcggcatttcgtcccctatcgagtaaagtgtgggcaaatgcctctactcgccccacagaccaaatgaatacgtgttatgatgcccatttcgaagcaggaaactcgtcatgtaagcaagaaaagagcgtacgttcatatttgtggccaagatatcacctttgggcgagaaccaaacgccggaaaggtccggtttgaccatgttctttgttcttgcagtcgtcaatgtcgtcacgtactaaatcgaacaaacagacatgcgaagaaacacagatgagatgtctcctcatggtaggcttatctattttcagatcgtaacgatcacacatacctccatcacacaattcgaacgatcgttataccttggtctttgaccgaacgaccaacgaccacccattggcctcacggtcgagcttgacggacccccagaaaaactagaccttagatcgaacaacctgcagatttaccctcggccatgtcagtaatcgtgcgcaaagtaagagcagactgaatcatgaaagggagagtaaggaatggagaccaaccgtaacccaccgctttcgtcacacgcagcaaatgaattctcgacgacaggactccaatcaacaccagagaagcttcctcggttgcctaaagaatggaccaatgtcgtggatagtctaaaatcatgaagcgacacgttcttgtcctcacttttgaacgaaaaatattgtatatcagcctgtaagtaatcagacaagatttcgaaatagtgaacggtcgttacctggcagagagtaggagatccggtctcgaagggtgacaagccaatgctctgacagctttcgtattgacatttactctcctacaaggcagctcaggctcgacatctctctttcctccttcagcaaatggagtcgagaatcgagtgagatcatactgaaggatgaggccatcgatacctgaggagaatagatgtgtattatccgacgagaaagagagcgtgaatatgtttgcctggatgatgacgatggtatgatgagagggtttggttcagacgacgaatacaatcaccacaggataggccagaagaggagaaggaggctcactcggtgtcctttgaagatagcagacggtaaaccagtttcaggtgttgataaatccgaatgtaaatcccatagtagaacatccagatctaattttcagaacctccagcaatcaggatcaagtagttcagcccaagacctgttctcgttcacttctagtccatgtgataaatcgataagctagaagaaagaggaggaaacttaccgtcacctccagaagctaaccaccttccttgtcctctcgagatcgagattgcattcacacatgaggtatgacctttcaatttcctatgaatgcatatcgggggtttaaatcatcctcagtccgacgcaggaccattcttgtacatagatagaccgaagcgtacacagagtatccaaacccagaccgatcgaacgctcgttcaaggacacccaatttagctctttcaagacgattgtgcgaaggtgggaaagatgatagatttgctaataaatccattcttctcttccctctctatccctttattatctgacgagtgtttgacttagataggcaattgctggtgatcagtgtatcctatgaaggataagacaaagagtagcaaaggaagtatgtgagaggatgcgaaatatgccctaggatgagatggtttaattcttaaccgctttaaagatctaatctctctttgcttacgtcacccgcggcatttatccactcttctcccttccttctcttttctcttgcggcctgttgtgagagccttgaccagtcagttcataagattgcctcatctttgaaactcagacagaaaggattcttatacgtctgacaagaccatgtactaatcaagaaccctgtatatagagataataagaattggaaacctgctaagcaagggtttacggtcacacccgaagtggatcttctttctcaacccatctcgtgagtttcatcaccttacaaaaggagctccatcagttcagaagattatagaacgtcacacactacagatactattgggtaagaaacaaaaacccagttaggcgacctaaaaactaccaaggagaggaaagaggcagacacaaagaacccggaaaacgatttgcgtcacgttgcaatgcaagatcgtgaaagtaggaataaatctgatgtaatgcctggcgacattcaaggaacgcgcttgcaagtaaattacaggtcaagagtgacagattgagaagatcgatcatgaaccacacggacggatggaagaagatgggcccgtagacgtataaggatgagcatcccagcaaagagaccaaccgtatcctctggcccgtaaagaaagagatttgctaagaggaaggggcaagcccgatatcgaatgtattgaaatcggaacaccaaaagtacccagaaaggcgcgaacacgcgtggctcaaccgtgttttagcccattgatccggaaagatagaaagcccaagaggaacgaatggcaaaagagagtggaccagaagaggcggaaatgttcacgcgtcaaccaagacactctcgccaacggcagattcttcaagttcgtctggaggcgacgccggcacggaagacagcctggaggaatatgaaccgaatgaaagaggccgactagaactctttttgacattcgatgatactttctctcctcctttggtatctttctcttgcgaatccaacgcaggtccgagttccatactgaaagaaatcgactcaaccgaggcaatcataaaatcctggtcctcggcttcggaggaagtgactgaactggcgagcgatggggtagaactattggctgatggggagaggctgtcgatagatgaatccgagctactgctgacaatactcgagaaggaggaacttctggaccgtctcgatgactgatgactggttgggccggtagtaatattgaaatagcttccggaatggccggacggttgagagacaggtactcgtgcagaaggcgattgaacagaagtatgtcgagagtgcatcgctctctgatagaacggagatgagctcgattgaaggtacagcgagttctgaagtcgaacaggaattggaccgggaggcaaagatcggtggagaagcgctgttgggcctaggggcaatgtcaaagacttgttacgccggactatggaattcattttggggggtgaacggaacaaatcgagagattaaatcagctgctgtaggatgatgaaataaagggctgtattgacggaagtaatgggcaaaggaatagggagaggcgaagagatcatgcaagccacgcgaggtggctgatgtgtaagggcaaagtaaatatacacgtatattatttcgggatagccatagaccgaagacgcttgccgcgcctgctttgactcccatccatgaatagaatttgaaagaccaggtctggtcctatccagtcctgtccctcctcttctcagcagacctggactgatacgtagaacctgagagcaaaggccatggaggcatgataccagcatagagatgaatgcaaaactcacggataggtgctttgttggtaacagtgtggcccatagggaaagtcgtttcctgggatacagacagaccttcggattcggccggtggtaggagactcggcctatgggttgacgagatggagaacgaattattcgatcttagtactggtcgagaggatggtagagagttagatgttggaggtacagcggttggcataatcggttgtttggttgagtgagtgtgaacgcgagtgtaagtagatgtggcggaactagccgaaatacggtttgagcgtttcaccaaggagaaatgccaaaagctagtccaacacggatgatcaggttgcaaacgaagaatcaaggagatgatctctgaaaatacgatgatgaagaagataaacaggtatgatctgtcgaaaggtagatgaatgaatgaatgaacgaagaagagcaaggtttgtctcctccatcttgaagagaaaaagaggaggaaaatgaagctgaaggaactcaagagtttagaccaagatggataaacatacgcagcatccgcttgagatcggccgcctcgaccggatcggacttcctgtctacaagctccggccaggctttcttctccggggctgggcagtgagatgccgaacggatcatgccgaccgaatgcgccggcaaataaatagccccggggctggtttgtaacttctcttagttcttgtaaaagaatctgccgcccagtcatctgttctctgtgcctgttgccgctctactctctctgcttgagaagtcaagtgaaacagtcggccatgtggtaaagcgctagtcttccttaagggatgtgatatgattggttgaccagaacaaatcaaaacgagataaaggtggattgaacagtgtagatcattcgtcattcgattagtggcggcatgtcttttccatacggtaatgtggacagtaaaacagctgcggcatcgtgtgcacttgacgttctgaggtctgtgcatcgattggaaggggtttcgggcgagtttctcctgtctgaacgtttggactcgatcgagattgactatacacacggtcttcgagcacaactgaattagttgacatcgtgaatgacatcagaaacctcagagtcaaatgcgcatgcaacacaagtgatccagctgtgctcgaagaccgtgtgtatagtcaatctcgatcgagtccaaacgttcagacaggagaaactcgcccgaaaccccttccaatcgatgcacagacctcagaacgtcaagtgcacacggccgatgtcttgcagggcttcagccgcttggcctccacgatgtcgatcttcgtatggatccagcccatggctgtatcgtcgtcttggtcccatgcttcctgcgctttcggatggctggcagatggccgtggcctctcaccaataatgaccgtccagagcttcatgtttcaagagcaaaacggagccggctctcccagacaccatagtcgttggcaggatggttcggagggtgaagattctcgaagttggcaaacgacgactcggacagctttgtgtatagcggcacactcgatggctctgggtcagtgggctcggctggcttgacatcggaggacacatctctggtagtagagtaagtcagactcttaatctaacagcaaatacagttttgtagagctgtagaatagaacaaaacacaattccaaattcagcgtcaacgaaacgttgttggtaaatgctgaggaaggagaaaagaaaaggacagagaaagagagaaggagggagaagaaaagaagtcgaccagctggcagagtgcgctagctaggtcctaggtacatagatgataagcagaaaccaatgcatcatattcaagcattctcgacagttacaagcatgttacatgctgttctatcacgcttcgaaaggagagcatattcactcgcatgttccactactcacaccaacgagaatcagctgcggtcccaaccctaattagccaaactcacaagacagagctcaaaccaaagatgaaggtcttcagtgcatcgagctccaagcatcgccatttctctctgagagatccggaaccagagctgattagccgtgaacagtcagtggtagtcaagaacatcatgtatcattattgattcactttgtcttgagactgcaaactctagttctatgaggtctttcagatcattgtttttctcagatgtatgtcaagtgggcagcgagagatacaacactcgctcgaataagtagatctgtggttaggcaggacagagcatgagacagaaaagcagaaatgagcggagtaaattaagatcatcttgccttatcagcacgagcattggtcagatgcggacctcaacacagtcttgatggaggcacgatatggatgaatcagtttcaagaattgaataagtatacacaacgttgaacgctcttttctgtagatcatgtggttgtagtagagcggagactgagaagaactggagaagagatagctggtcttgttggttgtgtcatcggagagagcgggtcatggtatcaatatcaggtcaccctaaatgctcggaagggctttgtagtaaacatccgttggggcgcaatctgatcttctaatctcaaaacaaacaccgtcggtagcaaagaacagcagtaccgttcaaacgtcgtcaccgacgaagaaccgccttaccacttaatatgatatacactacttgggtgataagcctaatttgagtcgccgcttagatcaagaaagatagtttctctgatggtacagctcgggacatcgagcttgctgatcaacatgaggtaacaaatagaccttagttaaacccggtcttgtaatgtacatccctacaggtaggtgatggcttttagaggtatctgcagctcacatcgctgtattacgctccctcagagatgtgtcacacaaaccatgtcttgtcctgccactgagacttggaaaacgcatacctagaaatcatgaataatgttctcaaaaggacgtatctcccagatcgaatctgcctcttgacgttctatctctaggcatatctttaccgcaccggttcaaaaggaacatcgtgtcttgatggctaccagaaaagaaggatgatcgaagacgtcctacagtatcacttttaccatctcgtgcagaccctgtttctcgtcattatgaattagatccttgatctccaaaatcgatcccctttctcctatgtctctactcaatcgttgatgtagagagcaatgctgaaatgagaatgagagtgttgacaaacagaagagagacgggtttgcatgtacaaaggcaactacccatccgtatccgaacaaaggaggcttgggaagatgctgattcagctgtagatttcatattgcttcattttctagtctaaagttcgagattttgtgaattaaaagaccggcaaggtcaactgaacatcttccatcggtaagagattctccggtcggtgtattttatcggcaaggattttaaagtctttccctgaactccgtcccaaaccagtgaataatctgggcgatagtaccccttgcaagtgttcgattgatttatgctgaccaaatagacatgacctgttcttgtttaacatccactctcggtctctgtttctttccctctcttaacatcggttgagtgctcggtttcatccaatcaaagcatgtccatcttctagcgactgctttgtctctatatccgctgaaccggttccgccggtccgaataccagagatggtaaggaaagatacggataataggaggaacagaagcaaaaaaaagacgaaaaggccatctgatgaatggggtttagtgaagtccacttggaaagatggtcttcttctctctgtgaactcgtataaaagggatcgaaccatgaggttcagaaatgaggttcttcacttttctcacataatacatcctcctcaagacatttcatcgcttcgtcatgaagttctcgccattgttgatcgttgcgaccgcgacatatctagcttctgcatctccgttacttcatgctcggtttgatctaacccagagagcggacggaacggtcgatcctcatgatccacctgaagttcctgcgaaccacaccttccctgccgcgaccggaggtgccggttggaaggacgcgttcgaaaaggcaaagtctatcgtcgaccaaatgaccattcaagaaaaggtcaacgtcacttctgggtaagaacgtttcccagtttctttccagatcgcaaggctctagtgactgactcaatcatacctgccttcgactagtatcgtcgggccttgtgtcggaaacaccgctccggttcctcggtttggaattcctagcatgtgtcttgaggagtgagtgaagccttattacatgtttcgcatatgatgatatcattctgacagctcgatctggaccaattaatcgtaatctagtggaccattgggtgtgagacctgttgacttcgtctctcaatttcctgctggagtcacggtcgcggccacttgggatcacgatttgtgagcattttctctgtctctccatacaatatatcttgtccagttccttctgaccagtttattcttgcatactaggttctggaaacgtgccaactcgattggagaagagttcaagggcaaaggagtacacgtcgctctaggtcctgtgacgtaagttcgggattcgatttttgactctccttatcttatctccggtgattaactcgtcggtgttttccggaaatcttttagcggtgggcctctcggacgatctccactggctggtcgaaactgggaggtaagtatttttaccttgtacgtctctaaactggtcgatgtcggttctgaccaaagtctcttcattttggatccacctcctttagggattctctccggacaactacttgaatggaattggttctaaactttccgtagacggcatgcaggccgctggagtagtcgcttgcagcaagcactttatcgtccgtgtttttatcaccagccatctgatttcagtgctatcgcgacgactaatcgcctagcttgttcaccacagggttatgaacaggaaacttatcgagacctgaacattgttaccgagaccaacctcaccaagaggtatcaacagatcgattcaattattgatgataagaccgtgagtgatcccacacctagcgttgatctgtcaatcttatgtaccgacgtgtcgagattttgtaacaaaaacagatgcacgagctctacttgacctccttcgccgaggctgtccgagctggtacaggtaagatccattctcgggttcttagttcatcaaccgctcgaaagctgatcgtccatctgttttgtcgatgtgtgaataggatcgatcatgtgctcttacaacagtgtcgacggtcaacatgcctgtggtaacgacaatctcttgaacggtattctgaagtctgaattggtaagatcatcgatcatgcaattggagtgtccttatatcattcaacgtctatctcatttaacatttttcatatcaatcaaaaattcctagggcttccaaggacatgttgtcagtgattggggaggaacctgggacactgtcaaggacgcatcttatggtcttgtgagtctctcttttcaacttaatgaaactcttgacaacagctcatcatttgtctaccgctacaattatcgaacttactcaaccaggacgtctctatgcctggtttaggttttggcggagtactcgggacgtacttcaacgatgagcttgtggaagccattggatccggcgcaggccaggtttctgaggccaggttgaatgacatggccatccgaacattgactccgttcttctggctcaaccaaaacgactcatcataccctgcggtatcttttgtgtctgacaacctatcgccgttgaatcaggatgtaaacgtgcaggctgatcactggaaggtcatcaggaagatcggagaggagtctgctactcttttgaagaacaaccggaatggaacgtatggtttgcctattgactcttccatcaggaagatcggtgtattcggtcaggatgccggtcctcccactgctggtcttaccggatgcggtaccgctggagattgtgtatacgacgtcaatgccaatgctcttgcatttaccgagtacccccatcacaatggtgcgttctgttctattctttctcctattccaatcatatactcttgcgcatcttgtttagatatcacatagaggctcgccaaattcaaaccttactaatctcttccgccctgtcctatggttaatttacaacaggaactcagagttctggaggtggaagtggaacggcgttgcctccctatgtcatcaaccccttggaagctattgctgctagggggcgacgacttggccttaaagttgactacgctcttggagacaatccatacaatcctactcaagagattactttcgtcgccgaaggttctgagaagtgcatcgtcttcgtctctgctttccagagtgagagttacgatcgaataagcttgttgcttgataacgaaggagatagccttatcaacctcgtcgctgcctcctgcgccgatgtaaacgtggtgatccactctggacaacaagtcgatatggaagcctggattgataacgagaacgtgacatccgtcgtgtttgcgtactaccccggtcaagagtctggtgaggcgattgcgtcggtactgtttggtgatctctcgcccagtggtaaacttcctttcacaatcgccaaggacgttaacgattaccccggaggaaccggctcgattgtgacggccaatgtcgctgcgcccgtttctaactttaccgagggtctctttgtcgactacaagtggttcgacgcccaaggcatcgagccccggttccctttcggatttggaatgagctactcctcgtttgcctactcggacgtctctgtcgctgagacctacgctgctgattccggctatgttcagaagacaaacgaggcattcgacggtgaaggtgatttgtacgatgtccgatacaccgtgagcgtcaaggtgaagaacactggaaactggaccgctgctgaggtcgctcagatgtacctgacgttccctgagtcagagtccgaccagcctgttcgactgctccgaggattctgcaaggagacctacactgccggccaggagcagaccattactttccctgtgcgagcgaaggacatggcggtatggtcgagtgcgaaccagacttggcttgtgcccaccggagagtacacctttagtgttggtccctcttctcgagacttgcctttgaccactactgtcactatctaagaacgggaacgaatcgagcgtgtatatagctattgatttcttttcgtgaaaacgcattgtacaaatgttgtatacatattgtgatgtataatgtagtttgttcactaaactttacaacctgatttcttctttccctttttttcttctttgagaactcccaataagaagcaaccgtaacaaagaatcatttcatcgttataaacataagcctggcgtgtattaagatttttctagcaacgtctttttcaaacgtctatgtccaagaagatgcttgatggccggaccgggtagtcagattggtcatatattggtatctaatgacgagataggccagatgatgatcctgatggccggcgaggagacctatataaacgcgtgttttcattttgatccactggcgttcttatcgacccatctgctcatccttcgttccctctccttacctatatacccctctgtttaaagatgaccactgctgctctgtaagtggtcgaactagttcttttgatctctgttcttgacgtataagggctgaatttattcgaatgtacagctcgctccttcctcaagactatggcttcgtcgctttggctgccacctcaacttgtatgatcccttcctccctcatgtttttctctctctccatacagtggcagatagtagtacaaaaggagaaggtgtttctttaacttatcaccacaacttgttcattcgaaaggacagtctatctccacgtgtaccaggtcttgcaagtgagcaagtacaggaagttggccaaggtcgtttatccccagtttatggccgagaaagcccagatggatgcaaacccggacgctgtcaaattcaactgtgctcagcgagcgcatggaaacaccctggaggttcgttgctactccttctgtctaatctcttccttctcttcttccatttacgccctttcttttccgctcgtcggattgatctgtctgtaaacggttgactcttgctgcattcaatctttggttttacattctgatcttgggtacctctgctattacgcctatgggctatacttagattcttccccatatgctttttggcatcctcttcaatggactcttcttccctaagatctcagctgcccttggtgcatgctgggtaatcggtcggatcttgtttacctatggatatgtcactggtaaccctatggctcgttatcattacggtggacgtgagttttctctttttcaggtgtctctgttttcgtctttacttcttctcttttataccttctgtcggtgacctgaatgtatctgatctgcattattgttgttgcccgatcacagaattgcacattctcggcgcaatcggaacactcgtgcttgccacgtacaatagtgcaaaacttatcctccccactctttaagttgaaacgattagacttcagaaggacaaaggttgaataggtagacggatagcatacgcgctgggcgcaaaatctcggcaaaatcttaatggattgaaggataacccagcaaacatttagaattaccatgattgtattatgtcccgacagaaagaaacgcgcacagagagagaacatcttgagttatgttcagaacaaagagctcccagcggtgaaaggatatcaaacagaacaaaacaaaccaaaacgaaaaggtttgcttgcgtaccatatttttgagcaagtgaacaagagggaacttgctcactcggaataacaaatcatatccgtcatcgcgaaccgggcagagcctcggcagcatgctcggtcttccggagcatacgcgtcgttcatcctttcctttctgtcatccatatggaaataagaatgcacttgtggacgaacgcacaatcgtaagaatgacaccggtcacctcccaagactagatttgcatacaactcgtaccccaaattagaagtcgtgaaagctcatcagatgtgttacaagaaggagaggtatatatgaatgtgaacgagaagaaaatgagaaagtgtacactaaatgttgaacgaaacggatcacccggcgaccattccatcggaggatagagaaagaaagaagaaaatctatacagaagcccaaatatgagatatgaccgatgaaagtctaagaaggaacagagtattatagaaaaagtgggtagcaaagttatacaaacgaaaatagatagtatgacatatgtgtattatagaggtaaagaagacaggaactatgagaaactctcgtgaagttcgtttatcgggtcatgtttggggtttcggcgatagtagtaggaccagatataggtattggaggagccaagtgaatacagaagatacacaacagagctacacaaaaatgcgtcgaggacgtcgagttgaccgggaagagagacgttagcataattagagaggtaggagatggtgtaagactaactcacaaaaggtgatgatacccttcatcaacgtctctacaaataccatgagttcagacgtgtttagaacgatcaacttcttttcagattgctgaaaaaggcaatgtcaagactcactcaacctccagacgctttctccttctttaccttcctcatcatcgtactcgtctcttccgctacctccagcctgttggccgccgacggcctgtcctaatcgagttgtcctccatttcaatccggaacgatttcttcgggtcttgaaagtgcctaccatctgacccatccgagcgcgcatccttggccggcctgtggttagccctggcgacttcgcagaaagggcgactttctcattctgggcgagcgtgatggcttctcgatagccagatacacacatctccatagcctggatcgctcaaccaaacgacatttaagcccgattagagttgtggacaaagcgttgaaggaaggatctgaaaagtggaatgagaggaatggatgagaatgttggcttacgtcatgccatgttctgcccgtcgttccctcactggccaatctgcccatctccaatctcttttcacggttttcaatcatcgcggccaacaatcctccgtactctctagccgcttctttgaaggaatctgcgctctcagtcttcagtgcatcggcccaatctttcgtgccgaaaggaagtcggaggagaagaccggtcagatcaggttgaactagatcgcgtgttccctcggcatcaagaccgacgacaggtagaccggaagcaagtgcttccaacaccacttgacctgagtgcgttgaaagtgttgatgttcaataccaaggtcgaaaacaactaagagataagggagaaaccccggaaagaatgaacgaaccgaaagtctccgtgaaactggggaaagcaaacacatcggccgatgcgtaaatctctgccagctcgcttcctgtccggtgaccgaggaagacggcgtcgatgccacgggatgtacaaaatgtttcgaggtcaattcgagcagggccatcgcctgtgaagaccagttttggtggaataggaaggtaagcgtaggctgaaagcaaaaggagaagattcttttcccacgagctggaaatcataaagaaaatgatgtacatgattagtcggttggctgctctgaaagtcaagtggaggatggcaaatacgacgaacattcttcccacgtatagcaacgccagtttctcgttcttgcaatcctcctcgttctccttcccaacccaaaccgatccgatcgcttttgcagaaacatcctctgtgcttccgaccccccactcttttctcaatttcgtgcttcgtcggttcggattgaaatgcgtcaggtcaacgcctctagaccagagtctcgagtcaggaagagaatgacccttcaacatcgacatggtcgaaggtgacggacacaagtaaagtttgcacctgattacacgaggacaaacagaagaagccactgtcagcttccaaagttagaatgctaaaaagaagaaggacttgcttttgatagagccatcgctgccaaacccagatgatcggttctaaccacggcaaaccaaacaatgttgcgtacgttgcaagattggtatgataactcgctactacagcaccgcttactccaccacctacgcctggtccgtttggaccaacccactgttcgcctgcccaacctaattcgagtccaatgagtgtttggccacctagccaaatcttgggagcaatcgaacagataagaaaaaggattccaacgtttagcactgatgagatagaagagtagaatgggcaagcgagatatgcagcttactggatcctatagatatcgaataatgagattaccaagggataatcgaggaaagatagtcagtaagactgagaggacgatctggcaaatgaaggttcgggcataccaccatatggatgacatccggtttctatgatcaatcgatataccataagatggatagcaagacggtgtttagatgagaatccgggtttagagattatcgaccggagtatcggtcatgagtagagtaaacaaggaaggacgaacgaaatcttcgatagcatgcatcagcttaggccgaaggaaatttaacctgaggccaggatacaatacgagtgggattcccaatgtgccaactaacgggtgggaagcataatgcgactggcaaggaattttccggtatcacccaggtgatataacggaaaacagtcaggtcctcctcttgataagctacacttggatgcgcgaggagagcataccattcctgattctggtccacacaacagcgcttcgtggccttccttgtgaagatgttcgaggagcctggccaacgttcgggtgacgccgtctactttgggcaaaaagttctctgttatatgcgggtgtgtagaggttcatggaaaagacagggagaagaagatttagagccagaaatgaacggaaagaacggtaatccgtcgagaccagcgatagacctgtatagaatagacaaaccggtgacgataacgattctgagctttgcagtccccccggttcccttttcttctaaaggaactttgtggtccaatatcggttctgccttctcaatctctattggcactttgtcgtccaaatctcctgcctcgagcatcggtaatctgtcaaacaacggatcggtctcgaccgccgcgaacgttcgacgaggcgaagaggaggaggaggaggaggaggaggaggaggacgcggaggacctggatgggtccatcttgctgattcagaaggatgtttatggtgtcttataatcgaatattgctgtgattgctggtgattgttctatgtttgacggagaaaggaagcgaagaaaagagaagagagaagaagatgaggacgaggccggtgtgttgatataggagaactaaggaccgacgagatctggtgaagaatggagaaacgttcgatgacgagtgagtgtgttctgtatgctgtgtgtgtgtaggctcaaaggaacggacctttggacagatgaagagatagcgagtttatctttcagccgatctttataactttcgttcctgaaggaacaagcagtctgtctgttgttgttgtttaggagacctctctctcctgctacaggatgtggtggtcgagagaacgttcgtttttggtccttcctatccggacgatgcggataatcctagagaaggtgagctatagagtatttgagtgagaatctggtctactcactacccaagagaggaacagcgacgaacgtggaaggtttttcctcctcacaacgcgcgcgcgtgtccaaaaagtccgacgacgcgaatgatcgcgacgtgacgcgtcatgaattaaccctaacagccccaacggaagagggtcgtgcgtataaattttgagcgttcttgtctttctccttccctcgcccacattcgcttcgccttctcagcatactcaatcggacgtaagtgtcttgttctttccatgtttccttctgcctggctctggtgtgcttctttcttcccctttccattggtcatgatgctcttgactcgctttacctttccaaatccttcggattttgcggatacacttttttatgtcaacctgaactacaaatacctctatcattccattctccattttgcttcaacgtttgctaacaccaaacatttatgaaagtaaaagttgtaacgatcgctgaccgtcgttttatgtgctctctttttgactggtggcacggttacccgaatcttaggtcttgtcagacgttggcggtgggcttggcatatatgaatgtattcctgtctcaaacattctgttttattttattttcttactcttacacgtgatgcgtatacccctcggatccaaatcaatgattgccttgatcaccaaacgacagaccttgcagttttcctcaagtaaaggaaaaaaaagagaggaaagaaaacgggactacaacagacatctcttccttgtttatatgttttgacaacgtaacaactcgacaaaatactcttctctatattcaattttgaggaggaaaagataaacaaagatcaaactggacgtcattcgagaaataagatgtggtatacgaaacgagagttgtctactgggcaagagtgaaacgccaagcgagataaccaacaaagacagcgagcggaaggaagtacgcaagcgagctttttcaaagaggtggaatgaggtaaagagagttccgagcagaatatcagtctcaacatctaggacagatgactagaacagacaaggaaaattaggaaagaacactcacgcgccctgtcgcgaaggggaaacaggcttggttccgggtatcgacttcttttgaaccttcttgttcacctatagttcacacgtacacgagatcagtgaaatcgtgagtttaagaaaagacaaaatcggtatcgagaggagaaaagagatgctcaccactccatcgaaatctccaacatacatatctttcaacaactttcttgcctcctcggaatgtcccacatcctcaaaaggctcagtcgcatccttacctgtttgattcaaaccagtgtgtgagtgaaatgatttaggaacgaccttataaccttttgatctcgatcttgaccatgaaaacatgggtagggtataagcaagaagtggacataccagcttcactgatgacaacctcatcacctggttaaacaacgacaatcatcatggaaacacaagaaatcatcaaatctcaatacatctgtaggagaggttgatccaactgaagagaaggaaaaaaaaacatacctccagggtgctcgtcgaggaaacttgtcacatcgtaaactatggttgacgtgtcacaaacgattccgaacaacagcaaccgatgaagcaaacaaaagtacaaaaatcacgatcagccttatttttcacaattttatcagtaagccaacgatatcggtcgatacatattcaaaacagagagaaaagacagaagaaaaacaatgcgaaagtagaaaaagaggaaggacaagcttgcgggaaggaaagagaagaatcgaaccacctacctttgccgctgatgaccatccagatatccttgggatccgagtgagcctcaagctgctcctgggtaatctttccagaatcggacgactctgccggggctggctccgacttaacggccgggacggactcatcagggttcgtggacattatcgacaaagtgattgagatgaaacagtatctagaaagttgggtggtggaaagagttgggcgaatggggcgaccgttgattgggggatgatccagggttgtttgattgaaatttgattgccttagatagcgttacatagtcttctctgttagcggtcagccattctagcggctcacatccaaatgagccaacggcatccatccatcaatctccattgacatcacctgttgaactctgtcctttctatctagtatacgaaagaaggagaagtccaaaagaagagaaaagaagaaatcgaatagtttccacataaaagaagaagatgagcccacctttggctcttgtctcaagtctgatccctccatccgggatctcgcacgctctctttcttcccttcacccactccgtcaatcatccactgccgacgcctcccagaacggtatactcttactctccagcagttattccaggcagagtcattaccaatttaattctggctagagggcgtagaatcaacctgtttgaggttagagaagaacaagttgactctgagcttggcggaggcgttcaggccagtacgtctgttaatgggtcgaacactcaggtaagttcatgttcgggcttctacgttgtgaaagaatgctctactggcttcattttgtatcatgatatccatgtctatttctttccttcatacaagagaaaaagttcatccgatatagtttcgcaagacatcttccatctttgcgaatactggcgctaatcagtttctttctctcttcatacatctctacatttatctattctctcctttcctaaatgtgatagccacgaacaacgctccgtctgcgacatgtagcttctcatactgcttacggtcatgttaccgggctcggcgcgctccaaacactctcaacaaaggaggatgggctaagcagattggttctcagttttgcagaggccaaggttcgtttttatatatctctcgttgacctgccaggagtttctaggccatgaaacatcggtttctatccttcctgatctcgttactcttggactaatcattccttcctcggaataacacagatggcgattctagaatggtcggacgccacctattcattctccaccgtctctttgcatacatatgaacgaacaccacaagtggtcagtagagattgcctgcattctaggccatttcagacagattaatctgatatcaacgactgacctgccgagttcctatcagtcgggtgccgatccagatacagaacacaaccctcttcttcgaacggatcctgactcacgatgtgctgtacttctacttcctggcgatgcgctagccgtgcttcccattatgggtggcatgttgcacgatgaagacctcggatttgagatcgaaggaggaaagaatcgaagagagatcccatacttgccaagttatgtgatggaatttatggagctagatcctcagatccgacacgtcaaggacatcgtcttcttgcccggtttccattcacccactttagccgtgttgtacgagattcttccgagttggtcaaagtaagtttgaatcgatggaaatcattctgacaagacagtgaacgatctaacaattactggttgtttccctcctaatatttcgtatagtcgacttcttcaggacaagccaacgacgacactttctatgcattctctttcgctctcctcaacttcctcatcctccacatctattgcgatgataccaaacctcccttcatcgtgcagcgcgctcttcgcctgcccaccttcaatccctggtgttcttattttatcacccaacatgttgatccacgtcgatccatctggaaataccatcgaatggacggccaaccggtttgcaggctacgaaggactacgaggagccgaaggtcaaggatgggaaggtctctaccgagtctggggaacaataggagaggataacggctcagaagagaaggaaggccatgagggtgaagctagtgggctccggttggaaggtagcagagtcgtctggttagaacaagcggatggctccactgccacaggagacgttgaagctctgctaatctccaaggagggagaggttcggaagattgtctttgagaaagagggcaggatgctcgccagaatgaaagttctcaaggatgtgttaggtgtgggcccaattcctgctgaggcactttgtgtgtcgttgggatcaggatcaagctcatccggtaagccggacagtggggagagcgcactatttgtaggcggtcttcaaggagattctgtactttatcggctaggaaaggaatctgctgtcggtaacaatcctactcaacctgagatagaatcttctataaacagcgtcaagacagagaacgggcaagaggaaatagagggggagaaggaggaggagggagaggaagaagacggcgacgatatggatgttactgaaggtcagtatctgtcttggtttaatttgtcacgctgaataggatttgcatgggtctcacgatcgaaaatcattctttgactctaaatcacaaccaattttcgagatagatttatacggaccctcctctccaaaaaagccgcgaaacgctcatctgacgacagcaacgacagcctcactcgacacaaatctactttcgtctctttacacgtccgctttcggagattcagctggatctggaggaaagaacgaaagactccgttttgaggtttgtgacactttgaagaaccacggaactatactgggaatgacgtttgggactgaagttggagaagtaagctcttttagaaggaatatatgtacctgttcttctgtgcaccttcgagatgtttttacatggctgacgctgtcattgcatctggttgcgcgccctgctcgactctagcatgcaccgaatgaccctcagttacttgctttgggagggtctggccacaccgcatcattcaacaccttttacgtaagtagtcaattggatggttcatctatgttctatgttgaatgtgttgtgagacagccaaccaacgaaatagaaccatgagctaactagcgttcttcatcccaaacaacctatagaaagacatgccggccatgttgagaagaaagccgaacgcaatctccggtgcgcgagggatctggtcgataaatgtaactgtacctgttcctgcagctacgcgcggaaagggcgcagcttctgcgatcaaggacactgtgttggtagtcgatgaagatcacaagagcggacataccaaagtgtgtttcttttttccttaagaaagcacagacggtcacaccactcattgcgagagacgagtgacggatgttctattgaacataagctgatgccaaacaatttgttcgattgacctttcttctgctagatcttcaattcattccctctgaaaggagatcctgtcacggctcgacgaattccatctgcaaccttggctgttggggaatttttcaaccgagctcgttttgtacacgttaccaacagttccctcagcgtcttagaaggaggtcagtttttgctcttgtttttgtcacagcacacctagatgttggagactaacagaagttttccctctacttgaatttgactaacaggtggcagagaacgatactctgttagagctccggacgacacttctttcctctcagcaacagtggccgatccatatgttttggtacatctagaaaatggatctgttcatttatacgcaggggatcctaccacggaaactctaaatcgcattcaagcggatttcaaaggggtgagtccgcggatctcttcatcaacacgatccatcaccaaattggtttgatatcctatcttgatattcacataattcatgaaatcgtattttttcatcaggaggactgcgttgcatccagcgtgttcacagactcaacaggtatattttcttatagactacgcgtgaaaagcagtccgacagccgaatcagccgatcagatggatgatgacgatgagaacctctacgcagaggtggaagaggccaaaccagcggctgttgtggcagcacccgaagctgctaaacgacctactcagtgggctcttctttgctttgcagacggaaccattcaagtaagtctagtatcgtcacagatagaaaattaaccactacaatgaagaatggcaaatcaagctaatcaagactgtttgacctttgtgtgggttgtcattaaaggttcgaagtctccctgagttcaacgtggtattcagttcaggcgatctagcaaatttccctctcatcctaaataataaagctggtaaaccaagaactggagaagaagtttctttgacttcttcccctccagcaattcaacaagtccttgttgctccagtgggaactttttcacctcaaccgtatctccttgttagtttaccattccatttcgtcaaatcttttgtgcttaagctgatcaatccctgctcgtatttcctttttcagttccttacaactaccggtcaacttatcatctaccacatagttctagcctatacccttccgccgtccaatacttcggctgatcccctccccattcgattttctaaagtcatttctcgtgccttactcccacctaacatcaattctctagctccttggtctcttgttccttttgcgcgcctttccggtcgaacaggtgtcttcttgactggcgagttccccctttggattgtagcaggtgaacacgcctcgattgtgttacacacagtcgatgaaaaggtcgttcacgcgtttgctgcctcgcccgccttcggagggcatggagaccgattcttattatcgactggagaggttagtctttagccatttgttgtgactccactaattcggtttcatttcagatgtgctgacttaccctcctttccttatttgaaaaccactctatctcacagggccctaaagtactagagtttcctaaaaatattgatatctcccaacctctgccgacaaaaagggtgtctccaggcagaacatactcgcatgtagtgtttgaccctacgtcatgccatgccgtcgccgctggtctcttctcggtcaaatacgttctcttcgatgaggatgatcaaaaagtccgatccaagacgggtgtgtcatttctttgcttcaacgctctcgcttatgtcgagatttactgagcatgtggtttcgacatggcgcgttctcggccgggtgcttacaaatggaagtggacgcaaggctcatgcctatgactgaacggtcgtctttggagctcctcaaattctcttccggagaagtcatggacgggtgagtcgtttctttctttacaaggtccttatacatctgaggacgactattgaatggctcatcaaaacatgaatgcatcccggttaaattctctcgcttagatatgagtttgcggacaacgaaaccgtactctctctatcctctgtaaacctagaaacaaagtcctgtccttctggtcgaaaagattacatcgctgtgggtacgggtatttcgagaggtgaagacctagcggagcggggagctgtatgtcctttctgtatactccattcgagcatgagaacggggaactgatcgtcgacgagctcttcaatagacttacatctttgaggtagcagagattgtagccgaccctgctcgaccgcaacatcaacatcggctcaaacttctgtgtcgggacgactccaagggggctgtcacggccgttgcagagataaacggctatcttgtttcatctatggctcagaaagtaagcattttgattgcacttatatcaagcgcattaagtctatatttacaaattatgtcttgttttccactatagctgtttgtgaaggcgtttgattttgaggacagactgttgggtttggcgttcttggacgtcagtatctacgtgaccataatttcgaccttcaaaaacatcatcatgatcggagatgccgttcgaagtatctctttgctcgctttccaggtcagtattaattcaactattcctcttccttcctgatgtctagcccgacacaatatccagctgtgtgcttctgtgccgttgggaatctatttcctgaacttgtgtacgactatttctgtaggaggagcctttcaagcttgcgttgatctctagagacttcaagcgacggcagatcatctcagcggacttcttcactgcccacggtgaactcgggttcataatctcagatcctaagggtgatcttcggacacttgagttcgatcctaatggttcgtagctttccttccaatcttaccaaaaatcatttgtgcattatcagcattatgcttaacacttttgacatgatatttgatagatgccgaagcggagggaggccagaagttgatcttgcgatcggagtatcatcatggttcagaactatcgtctgtcttgactgttgcgcgacggacgaacgagcaggagcttatcgcccctcaaacccagcttctccttggtatgttttgacgtcattcccatttgatatatacttgcactttcgacttggctcatcagaaagcataacttccacggtattgtcatcaggctgccacgatggatcaatcagcacgatgattccgatagatgatgacgtttataagcgaatccagcttttgcagagctcgatgctcagaaacattcaacactttggagggctcaaccctcgtgctttccagtgcgtgcacacaccctcttgtttttcaccatctcgttcagttaagtttcaggctgatttcggattttgtttcgtctttgcttaaatactcgaatataacagtacggtccggaacgactcaatctcacgaccgttgttgaaaggaattctcgatggcgatctcatttttaacgtgttctctcttctccccaggaatcaacaagagaagatcacacagcagattggaacctcggtcgaggttgtgttggaagatctagaggagcttcgggcagtctggtgatcatatagatacatgtatagaaagatagttctctcgacgcgtaacatggacatgtacacgtccagccgcgggcgcgctcgcgcgttgaaccaacatctttcaatcacctgcttatcgatctgcgtaagaacgatatgatgaatccctaagatcatcaaccgattattcttagtcaaattgtacaagtatgcaaatgtgctgaagtgtgcgtcgcgaattagaaggatgtagaagagaagataattctgaagtgtgtttgatgaggcaagagcgaaaaagatcgttcaacattttccgttttgtcaacgcttgcccatcaatcatcaacctctgaccgtcttcctcacagccacctcactaccttcccatctccgcaccgtcactcgcacccgtattgattttcttatctcgatctttggttcctatgctgctttcctctaaacgactaaggtcgtcgtctcccggccacgtgccctcctcgcccctggatcatatctctaaacgaaggaaaccaagcgcttatccgaccaacaatgacacatatcaggcgaacacctctccggcttcgcattcgatagttgttgattcccctcaaacagctgactgcactatacttcacaactcgtcagcatcacatcctaatacgtatccacaagaccgttctcgttcacagtcttttcaatcgagccagcaggctctaccatgtacgccctatcaacccgtcgcctcgtcttcctcaacaatgatgacaaccaagaccttcgcaacgaattcaatggacgcgagtgtcccagtaaacccagcagacgcaacatctcaatcatctcgatcaaaagaacactggcagactccgattggcgattcttggaaacaacgacaacggagaatccgtcctcggccatctcgacacgcggcttcggttaatcatccaccggacgacttcaggactccactaccctctcaacatggactaaaattacaactgaatgatacggaggaagaggaagagaaagaagatgaagaagaaatgagcgtgtcttcagtcagtcatcgattgcctgcttatcgaccagagcttggggtaacacaatacctggaagaaccgaggcgcttgtcaagttcaagcagaatagactgggtggatcaggaacctccggacgaactcaacgaaaatgacgaggaggaagaggaagaggaagaggaagaggaagaggaagaggaagaggaagaggaagaggaagaggaagaggaatctgagattaagggcgattcaccttacgctcctatgaaccgattgttgtataccttggttagtgatagatatctccccattaccacacgaagcagcacacatagcttatttcaacatttccttgacggaacttcggacggcatctagcaccaacaacgatatccacagacgccttcaacatctccaacagccgcaatcactgtgccaacctccccatgttcttctcccttgtttgccccacctacaccgaatctccgaccaacataccgaccacacccgctctccaaacaaaccagctcggtttcttcgcttcaaccaacgatacgggcaaactcctcatctgaggttgagcttatagtaggcgcaggtagtctcagccgacagaaagtggccgatcaagaagtcatcgaaggacgaacaatcaaagataatggagaaagagagcgagaagaagttgagaggagatatgaggtggctaaccgactgttgggtggcttagttctaggaaggagaagaggtcgagaagaagttgaatagcgtgccgcatcaactcttcttccatgtttcccatttggtcttgtcgcatcctcgcatctgcatctacatatgaaaaaatctgcagctcctgtcatattgtacgtcttgttcttgtctacatcttccaaaacacactcttcgttaacgcagtccttctctctacgtgcgccaaacaggaaacaatgcgtgccgcttcttctcatctcaagtgtccgcaaagcttgtttgttcctatcttgttcaatttattattcagttctcatttgtatgtatctcactatatgtctccaacatttgacttattgtctaacttgacaatccattgaacgcctcttctgttgtgcaccgccttttcactcgtcaggcttgagcttctattcctggaaatccggagagcttctcttaaatggatcttctctgcaccatgtttattttctctctacttctactatttttctctcttttctccatctttgtcttcaatccactgcattgcgggttcaactgtatacctttaagaagtaaccctacattttcatttcctctgtgttcttcatcgatcgtttaacttttcttaaatcatcacactgtctattactctcttctcgcatcgcccacttgctctgtcatctcttgaatgtccgtttctctctttcttccgactcccaatcctattcaattgcatctcctgtgatttcgtttgctagagttgacactctgtggatgcttatgtgattccccgctcttcaactcgctaacagatgtcaactcgcggtgttccttgcaatgcacattatcattaacgattcgtaacaacttccctataagaccgtcgtcggagagaaaatacacaagatgaggttaatttcttaggttcgacgtctcgacctggaacgagtaccgcgtctcgacttttgagaattactagcaccggacgatctgtttggcgcagttgaagtttcgccgtcccattgttctaaaatggcccagtcttcttcgaccgttcgtggtcgtccctatagggcatgatgtgaaaaaagtattagcgattgctgcttactggaaaagaagaaaaaaaggacacaaatgggaaatacaaaccaggtcaggcacctggattcctagggctttgaatgttgtcatccgatctttggcagcaactctctttgcagccgctgaaatctcagccgtatggtcctccatccagcctggtccaagtccagacagattgacttttgagtcggccgctatggagtagtcagatgtgtcatccatcgctgtgtctcctttgaacgaatctctggcgaatgaaggaggaagttgttctggaggagtttctgagtcgtagtatcccggcgtgtcttctggttcagccgttcgagaaaggttagattgagacggagaggtaaaaggattagaggggcttggttttcgaatatctgatcgagggaggtaatcagcgtatgttgctgggtcgatctctagtgcgccttcgagttgggttggtttgaactccacatgggcgccgtctacgatctcttctccatcgaggtattcaccgtccatcgaccaagcctctttcagtcgaacctttctttctggtacggccgaccttccttcatcgtcaggatcgatctcgcccgctttctctaggtgacccaatgcttgttgactctctggactccatccatcatgctcttgaaggaggctctccagatcaactggttcctccgtattgaaccccatgatcgatctcttatcccgctttcgactcgtcctgccgggatatgccggaatatctactccaagcgtcctcatcagcttttcgacatccctatactctatcggagtcattttgtccaacccctggactttcccgttgttgatgataattttattgactgtatggacgggcttaagtcgactaattccccggtctcgcttgacggatgtcttaggagtatgcgggaatgcgtctccttcgttggcgtgccgggcatcgtagaagacttgtctgccgagcgattttgagaagacacgtcgttgtatctcacctaagaagcgcaaatttatggaggtttggtttaatcgaaatatgttaggaaggtagaaggagaagaaaggagaaaggaaaacgaaccttcgggagtacatgtgtccatctcaatatatcctttatgatggactggcttctttataaccctaccccattccaaaatctctttccttaatatttcctcattcaccttattctcctctccagagctactcagaccttcgccctcctgaagagtctcgtaaacaccatccggacccaatatcgctctacccgcctgagattccctcagcttttccgattcctctctatcaacgggtccgtgtctaccatgacctctagtctctggctcaacgactggccgcggaccacgtcgaatgacagtatagacgtattttgtaggaacaacggctcgtttggagttcttcgtcagccgttgaaacgtcggctgggaaacgttttggccaaagtaacaggtgtcgggggttgctaggagaggacatgtcaagtcgtgtgagcactgcatattcaagagggaaagaaaatcacatcaagcgttaacgtctgttatataagccaactcaacaagaaaacgaagaacaggaaatattgacaaaccggtgctattacatgcgcgcccaatactctctcttcttctttcacgagcgcgccgttgttctcttccaccttaacagccgcctttgacagctcttcctccaacttttgtttctcctccgtctgaagcccaaagtccatgtcttcttcgaattcgatcccatcaatcatgatcttctcccttttccttgattcgagcctcttcttctctcttttccgaagttctcttcgttgaatctcggctttatcctcccacccggttggtccccattcgagctgttcagtcaccgacgatgatgttgataattctgtcgagtcggctgttgaagacggtacctctctcatctctgacgaatcctttgctttcttgacctcctcctctccgagtctcagtagaaacttccttgcctcttgaacgacttcgaaactatccctcgtcgcgtgttccaccaggacgattgtctctacccctgagttccacatctgccttaaaattcttcttctgtccccgacatatctcactccagtcaggtgaaaagcgcaaagtccgatcgatttggttggtcggatggtcaaaccaggaggtcgcgatttcaagtatgaaacccatgatcggtaatacagatttacccaagaggccaccggtccaggcgtgtttggctcaagaagatgtttagagagatcggcctgggttcgggaaggttcgagttgaatgtacatatttttattctgaagtgatgagggaaaggtcgcgatggatgaccatgcaccggaaccatgtttggcggcaaaatcgatgatctgaattcctccttcgccttttgaatgtctagcagttgtggcttgatcagatgtagagggcgcggatgaagaatcggcgttcttggagttccagcccattcgagattggacctcgcgcatgacgttcctcaagatcgcgtactctgtcggtaactgaccagccgcgaaagctaacaccagttcctttgtggtctccgatggcatcggttttaacggcaaggttgccaagtcaagggtcttacctttctttggcttaagaagatgtttgtttataggtttgatgtctgctcgagcttttttaccggttttaggaggttcggatagtaagttgtatggggtgttcactttaggtgagtttagaaagagtttatacgtctgcttgaacacctttgcgctttgctctgatggccgaaacagagaccagcgatcagtactttctgagcaatcaacacgcatgaagaacagaaatgtaattgaacctaccagcaaacagaacgtcgagtttgttttccaactcgctaggcaactccaccgttggcattttctttgttccaaaaactgctgccggacttcttctgtcctctcttctctccacatcctgctctggcacatcatatgccatgagcttagattcgtaggcttcatcaatgaatccatatccctgtttgctgaatccagatatcgacccgtctgaaggtatcgaaactgaaacagaaccatcggaagggttcgaagcgtccgaaactggttgagtgtcgaaggtccggcgttgagctagcagtagttgacccggatagtgatggacgtttcgattgaaacggaaggtcgagcacgatcgaggtagacgaagcattataacaagaacccgtctgcaaacccgacgtccaagctagatagatgcaatcaggccgaggtgagtgagcgtgtatgtgtgtatgggtgtgtaatgtgtgtgtgcgctagagtgattcaaaaagctttcttgccgactttcgagatattgcaccgctttctcctcagtaatacaaacttgccacaacgtgatccttttcaaatacggatagctcccattcgattaacttgcatacagtgttcattagatgtatagatcaccgaggtgatgtatgcgcgttgaaaacaaacggcgtttcatattagaagattttatggtattgaatcccgtttctaccccaattgtcagttccttgggacctcttatgactacggcttgtgcacactcagacgtctccttccctctctcctctctccttctacgatgattcccgtaggtgaccctgaagagacaaccgacggcacatagcctgtcgagatcttgcttaatgatggtttcccatgccccaagctcgaactagggttgatgtggttgatcggagagaacatgttggtagggactggcggcggcggcggcggcggtgagattccgtaaagaagcgtactgccgacaacgagagtgctaccgagaacaaacccgaatgtcacgtggttgttgaacaagacggttgaggctacaaacgcaagaaggatggaaagcgaggttgcgaagcctttgagaatgttgtctgagtacttgatcacgattgcctgcaagagaggaaagcaggatgacgtgcaggacaatatggaggagacgtattgagaggcagctcgatcagagtccatacaataacatggataaaatgagtaggtacaacaacagaagaaaatgcactaacagtgagcaatcctcccagaacctgaatccagattgttgtccatgcccagaaagtgaacccgtcgaacagacccctaccatttaggagtaacttgatgactggcaagccggcaggaatgagcgagaatgccgagagctgtatgtttctgatccaaagatctgctttggatcccttaagaacaaactcgaagtagacccctgcgagaccggaggtaaaacaggcggcgaggacagcaaagaatcctttgaacgcgtctccaccttgagttgtattacttgacctggacgagccggacgcagaggaggacgaggtaagactctgaacttgaacgactcctacacccagggcgagaacgaccagtgaaatccattgtttagatgacagctttttcttgaggattaaagcagagaacccggcggttgtcagaatcttcatctggtagagcacagagaacgtggcaacattcaagtttgacgctgcagtatactgtagtgtgttctgaaggacgtaaactgagaagagttaaagttttgagacaatgttaacccagattggcgcgcatatagtctagtcgaaggaagaggataaagacatacgaattgcaggaatcgacaatttccatgcatcgtccgagatcaatgccgccctcagcctgccaacccttgcccgccaaaacttcacctgtctgatgccaccttcgaggctaactccatttagcctaaactcctcgacaagtgagccctccttgccaggttttgccctacccagtgagccggcgagcgctgggagatgatcagaagatgtagaggacgagagcgggagatgaggcgaactcgatgaagcagggattggtgtttggtgaaaagcaacagcgagggagatgagaagcttgagaagctcattcaggaacacagctgtcgaggctgagtatggtccagatgaggatgcgtgcgtccgggagtatgacatcgttatgcttagcgacgcattctgcaaagcgagcgagaccagtctgtattcatcagggtttggggcgtgagatcagcaggaccgtccatccacgtctgatcgtattctgatgtacagcgactcaattcaagggcgtagaagatgtaagatacgcacgatatatatttgaggggaaagccaaagagctctggtgaaggggcatggccgtgcatacaagagaatacagctaagttcgttttatgtcaaggagaggagagacacgttgagagagaggcaggacccttcctataagactagaatgagaggtatgtcgaagcgagaagttcagtatcgatcgatgttattctatcctctgaagggagaatgtaaaaaaagaaaagaggaaagagaatgaagagtgaatagaccgtgtctggtttatcttgtagaatggacctggactattaaccgcgtgatggtttctgaccgcatcgtctccaagcagccatggaaacaaacgcaatccaaggtgtttaccaatcatcacaagaagaaagactcacggtgttttaattagatgcaagactgctgataggacttgactggtatgtgaggttatgaaggtatgctgaggacgaaggggtatgaggaaaaacgttgagccaaccagagaggatgaagttgaggaagatgttgacaatgaagatataggggaaagataaatcaagagacccgacaggatggatgatacctggactcaaaaaaggacgacacgacaatgatcaactgagataaggagagaagaagggaaagatcaatcgaagggagagggctgtagagaaaagaggatgggctggactaaagaaagcgaggaggttagattgttttagattgccatgtaattctctaaccgctcgagtctgggctttcggcctaaacgctggaatgatcatctcagatccttttttctcactaccatggtcttctttgttccaacctggcgtgcagcacaaagcagtttgattcatatgttattttagatagctgcatatattcatcatccaaatatggagatacctcaggacaatccatggcatgtctagtttgtcagactgaattgtaggacaaaagccgatcccgtagagcccgagtctgaatgtcctctgatctaccaaatcgattggtcttgttcagttgtccaccgtttcgactctctacttcctcttctccttctcttctctcttcatcttcttttcctgtctacgttttccacatgtacaataaaatgtccgagataacaagcggcacactgccgcgatatagatctgtaggaatgcatgagttgcgtcaaagtattgacgtgatatattagacaccatgcaatacggtataaaacaatacatatcgccatcactctgaatcaaaacgtgacgtgtgtgttcgcgcgccagacacccatgatcgagcagtgtacgcgtttcccgatcccgtctttagctcaactctcgaacaaacggatatagtaaccaatgtcgagagtgttatgatgctgatgatgatgatgctgataccgatgatgatgctgttatcgatgatcacctgagagatagtaaacctctccatgaagtttccctataaagctggccttggtctaaccgtctcacctattttctctatcgtttccatcgttcattcactactctaaaccgtcagcgtcagatactcgatctccccgatccctacaatgaatatttcgcgaaccgttcttttcaccactggaaaacaactttccttcatcccctcttcttcccgcgctcccgctctcgctaaacgatcatacgccgggtccgatcatgccaacaccagcaaacctacccctccggatcaggaatccaaggaacctcagtcgagctcccaggcaaaagcctggactgttgcggctgttggtagtgtctgtgtacgtcccgctctaaccctcgatccttccctttgttgccttctctttttcttctgacaagaagatttcctcttctctatataccacccatagggcatcatcttttacaacttcaatccgttccgaacattaagcccgccaatcaatatgactggcaaagagacctctgccgcatacgaatctcaagatcactcccaaggtgtcaaggggggaggggggatcggtaaagtcgtcggtggatccgacacacagaatagggagagtagcgcttggaaaagtactgctgcaacgtttgagaacaagaagtaatgggtcttgagctggaagcatatgaactgtatctttagacatgactctgattctctgttgatctgtgcaaaacacattgtacaaaaaggtctaacggaaagatacacgttgctgagagatacctcgtttagacgttcttatgtatatcctcataaacaccaaacattcctccttcctgctccgcctgataatcagccgttgtggccgatgaggaaggaatctcgaacggaagaggcggcgcctcgaaaccagcagggacagggttgatcttgttctcgatctgaagcatcgtgcagaacgcgagagtctgtgggttcgtgtaccacgcggctgaggtggccgatttggatcaacataaaggggaaatgaagatgagaagaaccagatgcaaagtcaatcagatggtttaagaagccggaaaagaaaagatagaacaaaccaggtccacccccaggctcgtccaccgctggcgccgtcttccagaacttttgccaactgcccacctctgctttccctctgacatttttctcctcttcatccttaacccagccaagcccatttgattcgacccagcgtgcctccttctcgactaaaagtcgaagatcactttcggagggtatgcgaaccgatggatggggctgaagggagaggaacggatgcatagctcgggtgatagcaagccagtctggatcaaacgtgaagctcaatggtgtgtcaggcctggccgaggcagtggggatttccagaatcttgaagcaaagagaaaagacaaatggagacgtaaatacaagagtcttgaaaagaagaacaggagaggaaagggagaaggctttcacctggaggaaatccttgttaggcagacacttgtctagagccaaaaatttggtcacataatctttactagatcctgtctgggctaccaggtcgggtctctcatccagacggacgacctcaacctctctctcctcgctctccttcggtgaccgatagttcacatgtccttgcccctgttctggctcttcatcatcatcatctccatcatctagaagaatctcatccggattcgctgatagtcccggttggccttccgatacttcggccaattccgctagagttgatttggtagatgcttcatcgatatcggaaagcggtacatgtattggtgtaggtgctgaaggaggggtcacatagggagtctgaccgtcccgaagatcatcatcgtcgtcatcatcaagaaggatctcgtctggattgatcgtcgtacttgaagaaggaaggagaagcaggatgtttacattcgcttcttcttttgcgtcaacatcatcctcatcctcatccagaaggatttcatctgggtttccttccactcccgccgctgattgaatagaaatttcggttggtagctctgctctcaattgctccgacacagccgactccagatgtttccataccgctgcaaacttgacatgcaagtgtgcgctaaaccaataggccggtcgaagtctctgcaaaagttctaatagcggaggcgagcctaaggtgttttcctcgatctcttgctggaagaacggtttccgacggagaagcgtcggtaaatctccgtgttttgagatcgtgagcggccaatcatgagagagaaaaatgtgtggaatttgagaggaagaggaggaagaaggagaaggtgtaggaggtaggaggaggagtttggaaacgctgtgatgacgaatgtggtatactgatcgaagagtcgagcgatcaaatggtaccgtttcaaaaaagcttggtttggttcaagatgtacaaatgataggcatgaagagagggagaagttagttggacagagcacactgtaacaagaacgagcggaccgcacctttacggtaatcatgagacttgaagatcccggacgctcctgatattctaatcccattgacgaggaccgatccggatgtaccaaggtaatatatattcggagccagccaccctccgtgatatctgtagaccattcaagatagacttttgagctctttctccatactcttactttgaaacgactacgttcaagaaggtctgaagaggaagagcaagagaaaggcagtaggtgcgtggatagatgggtcaggctaaacttacagctcccacatataattacttgcttcatggttcccaccgatcacgatcgttaaaagaggagcaaccttctggccagagtaatacgagtggaatgatcccagattgcgaaatttttgaggaacagctagggattcgaaatcgtgtgggtttctgagtgcctacagacaaagattacgaccaggtcggccaagggtccagcacaactacatgagcatggcaaacactgataaaaagaaagtgagaaatatgctgagaagtttattgctcacttgaaaatcaccacaaatcaacaagagatcgactttgatccctttctcccgttcggctttgtggatggacgcgtaaatggcatcaagctcgccatggcagcaaccttctatggcgatctaattttcagttgtaaacgtctcagcagagttgataggcttggagaaagaagcagaatcagtgatatgaatggacagacgtgcatcgtggcttgtagttaggatgagctgtatctgaactgggaggatcaactgattgttggacgcggtcgacgtattccagatctacgaacaatcataggggttttctcttccgtcttatatatttcaggatcttcacttctatggaatcaatgtttcatgtcattatagtcggcatttcaggctgccatctcgtcgaccgannnnnnnnnngccggcagtgcagtggcaaggtcatcgtgtccggccgtcgtgcaagcagaggatggccggacgggcaaggcaaaaagaagtaaaccagatgggtccggtggacccatataagtggttaaacttataagaacagatactacacatgatctaagccaaaaggccagagaggatgaggaaaaagaagaaagcggccatagaccggacgaccgcccgttcttataccttttcccatctcgactttcaccctcgcgttttcaccgtcacgcttgtcacgctgccggcagatatgtcagggatgtgacctgagtgttacaccccggtaaccttccgttgattctagttctcctcctgtctcgttactcctcatgcttcctcactgcatcaacatgcaggtacatagtctggtagcgcaggtgcttgtagcacattctatgatctgttctcttatgcataactgttggagtctgaggacgaaatataatacgagactacttcgccactcatagcttagtctcccaagtttggatcttttattaatcttgatccttgtccttgtccttgtccttacccttgttcttcgtgatcctatccatcctattttccagtcctgagggcctgaatttcccctttgaatcctaagagtctggtgtggttacaactcctgtaacctcgtcgtcatctgtaaggctcggttgttaagaaggtaaccaagtgtaatcacttggttcgcggggtgacacttaggctctggcgattaatatatctgaagcagaccaaactattaacaatatactttggataagaggtttcaacaagaatctcagcttgaggaaaactcttatccaagaaggcgcgagggcgtccccgttttatatcaggacccctcgcgcatttggtctgccactaaagatatacatatgacgagcctagagaggctcgagatcacgagaactaaaaagatgaagcatgaaccatgcaaactagagcatgatggaaaatgggcgaagaggcataagggatggagggaacgaatagcctgtaggggtaacccacgtaagagaacacgtgatacttaacccgtattcctgacattaccctccaaacctgaatcataacaagatatgagtcatccagtcacgtgggcgccatcaaccctaatgcacgcttaccatctcttcttggcactatgtccatcccaaatgatttatcacttttgttttctcatctcatagttatttgtccgaccctttgctcatcatccgtcaacatctcgagtctatcataccgcatcttcatcatcatatgagctccaacgcttttcatatcagtcctgctacggaggctgacatcgtacgtctcacactttgtcagacttgatcgtatgctgtttccctatttttcacacttccgattcgacgtcttttttttatggaaaccaaaacagcctgacattttgcgattgatcttggagttggttcgttggcatatgtaaaatcactgactataattccttcaaggtccttttcatatgtttatcctctgacgtattgattgtcttttcacgcatgcgtgcacatgctgtgtttccctcctacctaggcgatatacgagaaatcagccgaatccgccaaagcaacgcccgaacaaatcaggcgaaacctctttccaaaagaatctgatggagagatctatgctaggtgtctgatcgctcggcttgataacgaccaggatgggaacgaaggaaccggtaaaggactggtgattggaatggctctggtacgaatctcttttccgaatgtggcatcatcgtataatatagaccccaatttttttcttcattccggcgttgctttttgccatcgaactctgactcatttgccgcttttcactttggtcatagttctttttcaatttcaggttcgtccatccaatctctttctacctttgtccaagctcaggtggacgtctcatttccaaagctcggactgattcagaccatcgtcgatttaatcactttctgcagcacatggactggttttccaggtctctacctcgaagacctcttcgtcagtgaaccttaccgcgcgttgggtgtaggaaagtcgttcttcaaggaactcgcaaaagtcgcgctcgagagaggatgtggaaggatggattggagcgtgctcgatgtaagccgtcttctttcttttattgatctatctggggatctagatgcgtgcgcgctgagaccaatttatctttcttttctcaacaaaacccagtggaacgagccagccatcaacttttacgaaaagaaagtaggagcaacaatcatgaatgaatggcgctcggttcgattggaaggtgaagatgccattagaggtttgttgacaatgtcctgaacaaaaggagaatcgaccaaagggtgttttcttgtatcctcttttacgatgcactgggtcctcccacgaccctccatctgatgatcgaatttacatacaactgaaatttacaatcgaggagaatgtagtagaaaaaattcaaggaacaaaagccatgtacagctattcaagaaagcttctaggcgacaccaagccagctgatcatctactgttcccaacctccgagctcaacggcaaagccaatggcgagcttactgaactcgaccgcatgctcgaacgagaactctttgttgggcaaatcaattctgtctcccgtagtctgttatgtttttcgagatcgataagcagagtgaatcgcgagatcaaagcagtttgtgagaagatacccaaaagccagggagagaacagtccacaaatcgtcagatcgagctagaagaaagcatatgtcgatgtttttttcggagaccagacacgtacgtggacataaggatcaaatgcgacgaacggatcagcctctgtcgcaaagcacgaagggaatccagcttggtagtacgacatgtggtccgaccctgctcccgggctgatcaataattcggcgaaagccgaagctctcaagagcgttagttcaaggtatctttttttttctggttaaagaaataggaacaaacaccaaaactcgcgcacaaggcaagagaggtactcacaagagagaagctagttggaccttgatagaagagtatgttttggcaaccttaaccgtccattgagtcaaactagttgtgacatccgtatcgatcaaggtgaccgtaggtgtcatgttcgctttcgtgaatgcggtcatgtcctttatgaaagagaaagaaaaagagaagaagacaggaaggatcccattagtccgacagagaggacaaaaaattattagttttctagtggagggtgcttcctgtacataattgagggtctagacttgcgaattggatcattcctttgacgtcaacattggaagcgatgatatccttgacgatgtctttagatccgaggagacctccttcctcagcagcgtaccagtgaaattcgaccggaacctttggtgtgaagccagactcgacgagcgctttgaaagctaatggatgcagagaaagagtgggttgttgatcagtatcaggagcccctaacgcatgatgaatggcatatgcacaggcgatcaaccaaccttccaagatggtcaccgttccgctgccatcatcatccgctccaggagcaggtagcaacggaagtctgtagttcgcagagtcctgatgagcgccgatgatgacgaccttgtctttgtgattggtctgctttgcttcaaatcgagcgatcacactactctgggcaaacggatgggtaaactttcggacagagagcggcacatgagctggagcgtccgccacgatcttcagcacttggaggtagacccagtgagatgattcggcaccatggggcgatttgtaaaatcgattgaagaacgatgtaagatgaacgaggtttgagtgcatgttggatgtagaaagccggggtaggatcgctttaacgagatcctgatacttgaggtctggccaggtatctgatcaatcgtttatttatttgttctcgtcattagatgccgatgttatgatcaaggcaaacttctcaagagaaataagaggagcatcttcattacacatacagttgtctgccttgccctcgatcaaggacaatccttcggtctcgtcggacaaaccggtgagatccataaacccaaggccttccctccgcaacctcatcttgtctccttctgttccccagaatgcctgcctgccgaacacccttagcagccgaggctcatcctcctcttcagccgtctcgggagagagaagtttcatgagttcgactggatcaggatggatcttgagtaggcggtcgacatcgccaagggtgaagtccgggttagacgggagcagttgggaagcatctggaggagacgcgacaaactgaagagggattgagagggccactggtaagatggtcagggtaggtacaacgaagagaggaatcttcatgatgacgatgttgtgtcggataaagcttgtagaagaaaaaggtggatggaaaaaggtgaaacaagaacggtcgagtactcttcccgtccatcatgggatgccgtctccatgtgggtctgcctcgacggagttacccgaaatttctagtagcgacatcgtaccaatgccatcagaccgttactttcatcccatacgcctactctgggcaatcattgccgatctatcgatgagtcaagccctagttgagttgtacatgagatatcagtatttcatttatttatttatcattgttctctcatgttcgagccacccatataatataagaaaaccatgtatatttataacgaagcaaagtggaccatttaagagcaatcagttctataaattgttttacattatgtgttattaagcctagatatgagcgtgagtaagattatatagataataagcccaagtgggtagatgcaagtgtagatagattagggtactgtcgggagggaaacataagaataacagatgagataagcgtcttgtccaaattgtcctatttcatcaatgtgcacaaaagaacatacctttaaaaggtaggagcatacgagtcagacgacgatctcctagactccacattggatgggcttgtgcctttagacgcccaaggcttggttgtgttgtgcacggcattgccgaatgagtccatcgagggacgaggagagactgtgctcgatgactgagaaaacaagaaggcaagatgagaagagaaggatgtcagccaaatgaatcaacacggaaaggaatgcataaccattgaaagggacgaacagagaaagatgggcgagattcgtaagactggagctccaccactgcgggtttggaggcatacacaggctcaaccaggggaacgaaaaagaggctaagggtagtgttgataaatcccatgttgtcgtgtgtatatacgagaatgcgtatgtatgagcaagtgatagaacagatgtgttgtaatgcgaagagcagggttgatggttgattcgagtgggaaagtgatcgaggaaagaggacgaagaagaaaaattaagagagtttttccgatccttataaattcatccgtctcggcctgcggacagaattctgatgagtcatccgaagcgaacaatgacgtagttcgggatcgtcactgcttgtgttggtgccactatgactattcctatcacttccacaattgttatactcctttgattgtagcgtcggctaccttgttgtagggtatatggagtggagaaatagttcatgggctaacgatatcttgtcatcttgatggacggatgaataagtggaagagaaaggaaaaaaagaagccggctgttgagatcgtcgtgtatgtgtgtattactctttgtctgggtaactcttgtagagcaaacatgataactacatgatcattcccaaagcttccaatcttgtcttgatcaagcttctgcttatttcttatgacatgtcatgtcaaacgtatcatcagctatggtgtcttctgagcctggcttgtctttcatagcccttcatccctatgagctcctacataccgcaagtgtttcacgccaagaccttgattcacaactgcgtccaaggatcctcagtgtgaggtattgagcagacagaggcactcgacctctaccttactcacatctaacctgctattgctcgctcaattactatatacttggagcgccttatgtaaagcggcaggagagtatgaaaaagtcattggacgatgtcatacatggacggtcagtcggctgatcagttcgtcataatcttggtcggtctaccttttcagacacaagattcaaaactcttatcaccactcatctctaattttctctcgtcatctcgtacatctatcagcctatggagtatacggactgctgtttatagatataaatataaaacgtatgtaccagtgcactgtcaaaacgtgatcagcgtctttcttccgctatgtacagtcgagtcggcatattcacttcacctcttacgttttagtatagcttctcacgaatttccaaataataataataaaagactagattcaatcaaaccctccaggagtacttgaagactatctgaagaccgatgctcgaccaattgttcgtctcattcattcccataagatctacttaggtctgcgtttctgtcagcgctcactcgaacgcaatcatacactgatgtatgcctctgtaacagctacacccacgtgaaggtttacaagcgcacggcgacgaatatgacccaaacgcacatagagtgatgagctacattgaccaatgccgtgagatatacatgtggactgttcgatatgtcaatatacgtttcagaaaagttctggaatcatcaaatgtgtatgttgttcaaatgtcttctgaacataaggctaatcacgatagcgcatattctccatctacacctgcgattgatgtttgtatctgagaaaaaaggtcctgattgcccttccatcaacatatccctctatcttgcttgagacgtgtacagcagaagcgggcgattcttaatccgctgatgagcatggaagaatggcggatcaatgtgctgaaacagaggatggaatgcgctgttaacagaggcgatgtcaaggctcggcgcgtgatgacggatctggcggacggtctgtactggttggtagatctccttctttcctcttgaacggtaacttgctgaatactacgcgaccgttgcgtgtttgactacatggtctgctttgtaggtgttgctatgaactatgatcatggaacccataccgatctttttgctcttgtacgcgtcagagctactctgacgttcggaatcatcgagccggtcatggaaataccctgtgtgggtgaacgctgtacattctcggacctggttgcctcactttattctactgtctcatactcaacctctctcccagtgatctatatcgttatcggatcgtacccctgaaatgtatgcagaagaagatgagtgagcaaattgtgagatacagacacttcacctgacggcaaatatcgattagatgagtacgtgatttatttttccgagctattgtttactactcatggtttctgataactcaagattcctttttctgaatacttggcgaggactcaaccagattatcgatatacgtgtccaggtatcgtccttttgtccagaaaggccagtaaactggccatggacaagtgattcgtcgtcatctactgtgcttgctgcccatctgagcaaatactggcatcgacgcctcaactggggtcgattgtatcaaatatcacagatctgaagagttgtatcctcacaactcttcagactgttttgattcagaaaattctccttcttatatagaaggatagatgctaaagcagagagtatgcttatccgacaaggagcgaggcgcttcatagtcctgccatttgaatttatagagctgataattaagattaagaaaatataatgaatgctaatcatataaataactccgttgaaacactggcgaaccatcctcaactgggtggaccagcgagtggtatatcgaactgagatgacttgtccttagaactgccatccaacatcctccgtctttgtctttgtgcgtcagaagagatgtgagagggccaggagcgcgcgttgtagtcaaagcagagagaagagaaagaccttttaaatcacgtgacccattttcaactcttcagccttaattcatcctgttctatccttaagtctccttgcctccgtccatccggttcacatcgaccatctctctcccctttgtcctcaagaaacaaacttaaagagacgcgtctgccaggtgcctctatctagttctgcacagatttgactaagttatctggtcgtttttgaactagcccaagccatcctgcctgttgctttatatctacgtccatcaattcacaatgtatcaatcctcagtccttccttcgactcacaccgacttgatcactaccgcagcctacgactggtttggcaaacggcttgttactgctagtagtgatcaacagatcaaagtttggagcaaagcagctgatgccagttggaatcttgaagaggaatggaaggtatgtcatcaagatagaacattgtcagaaccgtgtgaggttggatggctagccgagcgtcagtttgttgagtttttgggttcagccaaacaaaaaaggcgtgttcaacccagagaaatcaagaagcatgacgtactctctatgaggatgaaaaacaccagggtcagaatcaggagagactgacctctacaaaacatgttgttgttttggctctataggctcacgacgctccgatagcacgagttgcatggttcgcatatcccatcttgttccctttcacgttctcgtatggtttgactgaaaagcttcttctatgctcaggtctcatcccgaacacggatctctgatagcctcgtgctcgtttgatcgaactgtgcggatcttcgaagaaaacagtgatggtaggtcaactttctcatttccgaaatggcattggtaaaaatggactgaacatcagtctcgtcataattttcttcagagctgaagagttccaataataaacggtggtccatggttgccaagctctctgaagcccgaggaagcgtccgagacttggcttttggcccttccgaacttggccttcgtcttgtaagtctcgacatgttcctcttcgctccgctctctcatacacaaagtgttgattttccttgtccaattaatttggtcttctgatgaacaaggctacgatatcatccgattcatatctccgactgtactcgccagccttgccctcagtcgaagattggtaccctctgttcaatgttcatctaccttcgttgacatcctctcaaccgaccggctcttctccatccgttcacaacccgagcgaaggtgggatctcaagaacaaagaccaacaacgacaaatcacttggtctgagtgtcagtacggccgctggaggagaagcagttggtggtgggagatgtttgagttggtgcaaggagaaatggtggggaatgatcttagctgtcggagagggaaccgaaggagagatcaagatcatctctcttcctcatccatcccctgcgcaacatctgctcacgctcacccctccttcaagccagactccttcggccccttcttctaaaacaatcacctctctctcatgggccccctcttgcggaagagatcaccacttgatcgcctctggatctagggatggtatcgtccggatctggaaggtcaccccgactgaagatgaaaacggagatgaacatggttcggatggcgttcaaggtggagagaacggatggaaggccgcttgcctagcggaattgggagatcacggaaggagtgtgagta

SEQ ID NO: 1426 - DNA, 25891 bp, Xanthophyllomyces dendrorhous
cgcccgttcttataccttttcccatctcgactttcaccctcgcgttttcaccgtcacgcttgtcacgctgccaggagtgataggctgacatcgggagtcgttcaggtagatgacgcgtatacatgcgaataaaagaagttctcagaggttagctagttgcagaaccgacatgaactgtgtgtatagctgatgttgtctgagcggctataaaatcatatgttcctcctcttatcgaatgaagaggagggaaaacaagtaaggccctatagggacaagatgggaaagatcgtgatcgcactcattggagcagccatctcattgataacatgaagcaatacgctgaacgaacaccaggttcattagctactctgtttcatcatgaatcacgttctgtatctcgaattcatgtacatcttcacaaagtgaattttggtcgtgtaacagttcttaacaaagcagctcgagaatttcaaaatgccgagacttactgggacttgacatcaaatatctcctgttcagctgctcgtttactgcttctactatacggagaaacatcgaattcatatgaaagcgcacgcatgtaagattcgatggaactctttccaaagtttctgatgagaagtgagttccctaagatctgatcgaaggtgagagtattgatgttaagaggaaagatattcaagtattaagatgacttaggtagcgccaggacgacagcaagcacgctaagccatctagacactcatctcctcttcaacttcccatcctttttctatacatcactctcaacagctctttcttactaatctcaatatggactacgacgagcttgaagagcgagacggtacgtgaagcttttattatctaaatctgtcgttgagtagatttgccacatatttggattctgctcataatttacgattcgtcgttttgctcttgtgtccgaacgaactctgacttttccatctctttcaatgatgccctctgcgatcgttttttcttggttcttctccctactccttttccgctcttctcatgaaaccaattttcgattaaataggagtcaggttctcttggaacacctggccttccagtagactggaggccacccgaacggtcgtccctgtttctgctctgtacactccattaaaggagagagaagatctgcctgaggtcaagtacgagccggtgacctgcaagaattgcagggctattcttaatccttactggtccgttcttctactcctgaatgcttgaaaatgattcccctgtgagattagacatccgtcttctctgaacaaggaagtttgagtcgtgtcgtgtgaagatcatgctgatagctcatctatatatttgcacgtgcctccctatcctctcttcctgcttgactttcgttagcactctcgacattcgaagcaagttgtggatctgtccgttctgcttgcaacgaaaccccttccctgctcactacaaggacattgctcccaacaacctgcctcccgagcttcttcctgcctattcgaccattgaatacaccctatctcgaccagctcaaatacctcccgtgttcctctatgttgtggacacttgccttgacgcggatgacctcaaggcacttcgagacgtgttggttgtcagcttgagcatgctacctcctcatgcgctggtcgggttgattacttacggaacgatggtgtgttaccgtgcctttattctgtcttctgttcagtttacttggaatgccataggactacaagaaagacagttctcactcacttgatgtctgaactttatatccgtcccgattggcggattaactgttactttccagaccaacgttcacgagctttcatacaccacctgtcctaaatcctacgtcttccgggggtcgaaagagtatgctccaaaacaaatccaggacatgcttggcctgaacccgtcttctcggccgactccccgacctgggcagtctatgccgcctggtgtggccgggttcgctgctagcagattcttgatgcctgttcaacaatgcgagttccagctgacaagcatcttggagaacctccagcgagatgcgtgggctgtcgctagtgataagaggccgttgagaagtacgggtgttgcgctgagtgtagctgtcggcctgttggaggtttgtgtgctttcaaatacgcgttcttttagacacagatatgtctgactgattgatttcgatctcccttctctttttttctctctcaaagacctgcttccccaacaccggagctagagtaatgctctttgctggaggccctgccaccgagggtcctggaatggttgtcggacccgagctcaaagagcctatccgatctcatcacgatatcgaacgagactctgtcaagcacttcaaacgagctgtcaaggtatgctcctgtgtctactttgaagctgtattcattcaatcatgttgttcttcgtgttcatttgaccttctggttctttccttcttgttgtcgttcgaatatcaagttttacgacgctcttgccaagcgagcttccaccaacgggcacgctatcgacatttacgctggttgtctcgatcagattggtctactcgagatgaagtctctttgcaacgccaccaacgggttcatgattctcgctgatagtttctcgatggctatctttaagcagtcgttcttgagaacgctcacaccggatgccaacggagatctgagaatgggtttcaatgcgacatttgatgttcaggtatgtcctctgaattgtttgggaagagtttaggtgaaaaagggatgcgttcattcgctgaaccatatcttccatttctttttcatttctctccggtggcattcagaccactaaagacctcaagatctccggagtcatcggtcatgttatctctgctgccaaaaaagggtcgtgcgtgggtgagactgagatcggaattggtcagacgaccgcgtggaaggtgtgctcgctgacgccaaagacatcgctcggcgtgtactttgaggtcaccgcgccccagggccaaccaacttcaactcaggtagggctcgtccagtttgtgacgcactaccagcactcgtcgggcacgttccgtttgcgagtgacgacgtgcgctcgaaactttgctgagccaggcggtcaaacaatcgcccagtcattcgatcaggaggcctcggcggtgctcatgtccaggatcgccgttttcaaggcggagattgatgatccagcggacgtccttcgttggttggacaggatgcttatcaggctttgtcagaagtttgcagactatcgaaaggaggaccagagtagcttcactttagcgcctaacttctcaatctacccgcaattcatgttccacctaaggcgtagtcagttcctccaagtgttcaacaacagtccggacgagacggcctactatcggttcgtctttatcgttttatcgggttttttttcctgttttttttctgtcaagtcaaagttgaccccgtacgttctacgcgcgtcaattcagtcatatcttgaatgcggaagatgtgaacaactcgttgattatgatccagccgacactgatgtcgtacacattcgacaaggagcctcacccggtgttgttggactctgtgtcgatcaagccggatgtcatccttcttctcgatacgttcttccacatcctaatttttcacggagagacaatggctcagtggaggaaggctggataccacgagcaggagggctacgaaaacttcgccgagttgctcaccgctcctgtgacggacgctcaggtacgaaaatttcgagttctattctcgtgaagttgtatttcagcccgactaagagtcgattcgctgtgtaattttcattgtcttttgctgtatatgtctatcaggatcttttgggagaccgacttccaatcccccgatacgttacttgcgaccagggaggatcgcaagcacgattcttgctttccaagttgaacccgtcgacgaaccacatgacgacagggacttatggcggtggcggtggaggatccggtcaggctattttcaccgacgacgtcaacttgcaggtcttcatggagcaccttaagagattggtacgtttttgtcctttatttcttctttttggtcgtgcattactccacggttgatctggggatgttgtaggggtgttgatgctgacaatgttatttgtggtttctttttcctcaggcggtcggcccttcaactagctagttgagtagtgatcaagatagattccgtgtttttatcggtcgacgcagctgtttcttttcgatcttatactttatgtgctcaggcttgtcggttggttggttttggccacaccttaaacagagaaataagaaaggtctgaggaagatggaaacaagtgagagatgcgtgaaagtcacgcagtatgaatgatctgtcttattgatatatatttaaaagccggggcgaatagcaaagtaccgacatagcgaagcccgggcgactacgaatgccgaagatgggaagaacgcggagggtatgaagaatggctgttgtcttagagataaaacgcaagatccgagaacctatccgcgatgatttcagaaacaaaggcttatttcatccctgtgatgaaatgaatgtgggaagggatgagcgtggtataaaaacgccggatgatctgtctgagctgcccggggttggaatatggattatatgaatacccactgcgttctgcacctctcgctcaattagcaaatcggttacgtcactaaatctgttcaagccaatactcccgtcagctggacgcttcccatgtcggatcttggtcgcgtccatgcatgcctgcctttctccgccgttgttctgatctgtaactccgagaagtcgaccgagtctgggaatgtttattttttgacgtttcttctggggcacagggagtcgccaaaatatctcgtcaccccttgcttgcctcgttgtcgttgtcactctgctttgtctgcatgcacatgtatgtaattaactaacctttgtcctcttcggaagtggcgaggatcaaacaaaagagatgcattgtccattctaacagtctgtatgttgaactaatctgtacatttgtgtgatgcatacaacgctttatttttgaatgaactcatcgtcccgttacttagatttcgttatggatcatcgttagcagtatcatactgtcgatcgactaggtgactctacactttattctataattaacagatcaaataacaaattaacatcctacccgttcgaaggccaagaagtgtcgtctacccgagtagtagtagctattctttaaccgggcaacggtcagtctgaccttgggatccatgggacttggcgtattcgcctcctggcttatattccgtgatatctcgttctccctgctctcctgtagatcgcctgtcttctcctaacaattttgccgtgtcagtctcggaaaagaaccctttccccaggttttttaaggatcagatcaatgaagggtatgaaaggttgagctcctggaaaatgaatgcatgtatgcatgcacatcctcttaccccagacaactcgcgtgccatccgcttcacctgtgtgatgctttcatatgttgtactcaccccttacctctttgctgttgctccttgcctcatgtttctctttgcccgtcggccaatctgctaacccttttaaaggatgacggctcattgaataacatcttctccatttttgtatatctcttccatcttcatcctgttttgttcatttgcttgccaaacattcttccgttcagctctgttcttcttcgtcgtcgtcgccgtcgtatccagctcttcgccgctcatctcggtttccctatttgcatcgctgctctgtatctgttatcgtcacacaatctctccttattctccccggtatcttaatctgtgttcatcatgcctgttgcaaagtccgctgaatcgctcgccatgtcatatgagaccaccgatgccgtgtcgagagctctgagctcgaatgaactttcttactatcttcccagcagagctaccggtgttaatgacatgtgggtcaattgagtctcctgtttgtatcttgacagtcaagatacttctggttactgacttaggttgtcgttgcgcggacatgattcgtataggtacctgcaccatcgcttggctaccttcgagcctcaccgtttcgattaccaaagaatcgttgtcatttgggctatcctgactggcagacatcctttgttggattcggctgtccgaaagacctctcaagagacctacagtttctggtgcgtccatattgatcggctcgcatgtcgtttttctggcgagcgcacaagctccaaagctgataggtatttcttttctctgctgcttgatggccactgcgcgcttgaacacagctacgatgcaccttccactgttgacgaggctatcgttagagcttcccaaaaggtatctttcttcgagaaatcgaacattggtgagtctattgccttccattgatctcatcagcctataatggactgacctcggaatccttctctcatcttcccgtgtaacagatcttgtcgctacttatcttaatggtcccaggcagctctcggcctcccgactggctcaactcaccgtcgcctctgacaattctggacttgctcctggtcaaccgagccaatttgaagttatcctctgtaccactcattatgtaggagacggcatggcccttcacaccttcatgaacgaattttactgtgtcatcggtggtgcccttagcacggaggagttgataaacttgttgaacacagagatgcaagaccgaagaatggtgagccctggaatccatctcgtcgtatatgcgcttaggggcggccatttagataactttattgaaacaactgccttatcactcgaatagcaaactcctttccccgtctcagcagaagaacgcctaatccctgcagaggtagactcacaagccaaacaaacactcaaaaaagtcgttgacaaagtcgccttccgaaactctgtgtctcgctctatcggcagccaagtccttcctcgagctcctttcccgaagaatgccccaccagaagaggaggcgatcaaaaccatcgtttccacccttgcgttctccaaggaagacaccgatcgaatcgtgaagatctcgaaagcacagggtggactaggtgtcgctcatttcttgtttgcagctgtcaacattgcctggattcgatcgaaacagggattgaacgagaaggaaccgatgctcttctactctgcgctttccttgagaaactcacttcgaccgactgtaactcctgggtcgtactttcacctcgctctcggttactacaacatcacccttccgtccttcctcttggcctcggacgtcaaccggacgttctggcaccgctcaaagtcagtcaaagcgcagacactccaagcagtcaagagcaagttccttgtcgggaagagcttggtcgaatcggacgagagacgggaccgagctatccactgggcgaagatcgacgacgccgaggctgccgtggccactgccgcgatcaaaaggtcaactgcgctcgcatcgacatcgtcagcagcagcagagtgggctatggaagaagaggctgccgagaaggatatcgattcggattcggattcggattcctcgatggccggctcgccggctcgaccggctgtggcgcttccgttgacagcacctcctacacccgaacagaccgttaaacccgtgatcgctgccgctcctgccaccccaagcaacagcccgttccttgggttgtctctgttaggcaaccttgactttatgtatcagcatgctcaattcccgtcgattgacctccaagcgttgacgaccgggtcgagacaacgtcgaggggcgagtttgttgttcgggtacacccttaaagggaaactctcgatcagtctgagttgggaaagtaaaggactcgagaccgagcagatcgaaaagatctggaagggagtcagagaagtcctcggcgaagtcttcttccaggaccctatcagaggagagggtgagggtgaagttagacgttgtgaatgtcgagtttgagaactggaccctttctacttgttatcgttgttgctaccaccttcggggacgtaggtgtgctgtccaatcattgtttagaccttctctaggttcatctttcgcccttgttcataatctcttcattcatatcttggttttctggtcttcactttgtcttgcttttgagtcgctcaattttactttgcttgtctgtatctatacgttccaaaccttgttcgtctcacgttgacactcctcgcttccaatttttattttcgttttaatatacctcttgtttcgctttagttgtcctctcttctgcttccgcaaacggacaagcacttttcggcctatcatctgttcccctcttgttatgaactttcattcaacacaaagaaaaacattttgtgattcttgctgtctatatcatcaaggtttttatgaaataaataaaataaaaacctcttctcgttccgttctatctagttttcatcattcccttctcagacattctcctttctcgatcatgtgtttaaattgcttcatgcttcataattcgtgcttctcgtctctcgttatttgttgtttgttctgatattttggtaatgaaaagcaaacgagatgaatggcgttcagacaatcaagagggttctcaaggtctcttgttctctttttcttgtagaccgcacgggttgtgtgtgggaggttgtttcaaaagaaaagaaaggagggaaaaaaaagaggagaggaagataagatagaccaagatgaaagaaagaacgaaggggcgattgaatgaacgatcatatagcacaaggtgaggataacaaaccagaaaagatatcatgagcgaaagatgcaaaagaaaatagaccagaacgagcacaatcacaagcacattcgagagtgagacaagaaaaaaagagatcatctaatccttctttgccttcttcttgacaggtccgtcatcgcccgactttttctttttcggttcatccatttctacatcgctctccgcttcttcctttcctccaccagcttcagcatccgagtctgattcatcagatgaggacgtagcggatcctccatcagaagaagatgcttggaagtcttcgtcttctataaaattgaacacgggttcccaaacagacaggtcagcccgaaatcgatacttggagatgcactctcatgaaggcttgagaattaaaaaaggaaccgagaataagaacgaaccggactcatcctcgtcgtcgtcccctccaactggcgcctttgctaaagcgaccggcttctttctcttggcctgtccatccttcggctgcttcttccttcctccattctcctcttcactgtcctcactgtcctcgtcactctccatgtcttcatcttcatcgctcagctgaacagtcaacacgtcatcttctgtcttgtctttgactttaactttacgttccatcaggaacgctttgatcggttcggcgtcatcttttgagagcgaggtgaatgagtagtcagatccaccgtccgttcggttcttgagtgagatagacatgtcgaatgtcttcgatgatgccatgtttccgccaactctgtaagaagcaaaaaaaaaaaatgagaaaggagaggtttggcatcgcatgaggtgaaaggaaaaacaaactaggaatgaacacaaagaaggaaagaggacacaccgagagaaactgagggtctggatattggcaaattcgacgaggagaggttgtttggcaatgaatatcatgctcttctccaagaaatagagttctccctgattcgccttcagattgcacttgacgacgttttgaccggatgtgctgttgatcagaacaaacggaaatcgaaagaaaaaaagtcagagatagagctccgaagaaaagatcagaaaaagaggacacttgcctgacgaaagatgaaggggggatgatcttcttgccagtcaacgctttgaagacttgactaacgaccgagaacgcaggtgcctcgtacttcctcatcaagttgttctccttcaattcctctctacattcggtcagatcaagagccggatcaaatcagatgagaaacaagaaaggacaagagtcagtgtacgctcattcacagggatgcgcaaaggagacataagactggatggtggagattatcaattgaaagtaacttactcggtcaagttgagctcagcatccatctcctcatccttggtgaattgcatgactaagtatgggtatcgagtttgaccttgcctgatagcagggtccaaaccaacctaagtgaatcaaacggaaacagagcgcaggaatcagatttctactgaagagggtttccaccacatcggtaaggtaaaaaaacgagaacaagagggggacttacgacaagctgtacatggatctcatctgctttaggtaggagaaagagcctggtgacactggagtgcataattttgtagtcgtaagtctttcctcgaagtcggaaatgagtgaggaacatgtcgatgtcgtatcgaccactatttagcggttcgagtcaagatgaagacggaaataaatatctatgagtggagaacgagcagaacgcaagaaagaaggggacagcgacaagaagaaaggtctgtacgaaccgaggagtgagaacgagaacctcgttgaacacgaccacgccctctccaccaccctcggtaatctcggctcgttccttgatcatatcatggaacgcctgagctttactgatttcctcattctcaccttcgctctcgcttccactctcttcagcctggccggggatatggaatctaagttcgaccagttcgtcaattgggcgaacccgactcttgccaccaccactagcctgaggaggctggactggcggagtaatctctaaagaaacttctgtcttgcctgcaatgttggagttggcgatggaggagagaggaatggtgaaagatggtttgtccgagactagaaatgcgaggttgggacctgttcaaagataaatcgatcataagaagtcgagtgagctaaagaagccaactaggcggtaactgaagtctagataaaaaattgacatgattagaaaaacggaccttggacatcgacttgaccccagttccatcctttgagcgaagtttctttgtgttcgagattaatgtcccagtgctgcttgatgtactttgcgattcggtcatgatcctctcgattgatgccctcaaacaccaatcgttcatcggatgtttttcgacctatcgaaatttggaagtctcgggcgacactgaaaagaaggtgaagcgtaagtttcgaaaatgacactaacggcatacatatatatgagtgctcaccgggtccagctaatccaactgatctctgcagcggtcaaggtgaccaggctctctttgtcatcttcgatagatttccagccaagacctgtaggagcgattcgaagttctaaatagacatggattggtgataaacgcgatgagttctgttggtaatgataacaaaaaaggctgagagagtgcaagaagaataccaacttcctaactttgaggttgagccaaggaaaactgaatcgagagagagagatcagttgaatgtaggatcgtgacgaaaagagagtatacagcggtaagaacatggtaaaacgaaacaaggcagcttaccctcatcaatctgtgtggtcgaggacatggtgtcagggtatgtgtgtgtgagtggttgccagtgtatatgtatgatagatggaatagaaagaggaaaaagagaatgatgagactgatgagaacgaattgttgggttacacgtcctcgacgcgtcagttgcgtaggacgcgtcgaaggctacaagcacagctgcgctccctgttactgctcacgtgtgcgacgcatatactactaacccccccggcgtgtgtactatctgccgtctagtcgattactcttgtggcgttgtcgcctgcagccctacgttctctagttgttttatccacactgcagcctcagcaggtaggacgatagacttacgatgatcttgccaatgcgtctgattgttcctccaaagcagctggaactcgagaacagtcttaacggaacagagagaacacggagaacacgggagaaagacacaagaaacccgttgagcacgttcagcatgtgttcgtttggccctggaatgtccattaggtttgtggtggatttgtaatagaatttttcctaatgacttttagtaactccgtattcttaagtttcctttccggctcatctcgtttgctgccttcgctagttctacagttggttcttacccaccacccaccgtcaacatccatctgagttctcatccagctagacacttgaatggcaatccaggaagggtccctcccgatcaccatcccttgctctacatctagttcaaacaatcaatacgacttttctccttcttccgccagacaggagtcatattcttccgttctgagcacaggtctactcggtcctcaagctgccaccaacgttccttccgctgccctttgcgatcaagcatccaaacgacgtgttcctttggcatccactgggtctcactcgagcatagcatcctcgtcctcgtcctcgtcttcttcggctgtgccttacagaccaaggtcatacagctcgtttggtccgggagaacatgttcatcctcctgacagcccgaatgatcatcaacgtcacagtccatcagccgacctgtcctcgttgacaaccccgaccggtgagattcagttggaacccgtagcgatctccaccagagcttcctttcttgccgccttttcttcctttggccttccccctctccctacattgaccattccagatggaaactctcggccagcgcccgagcccacctcggtcgaaccctctccggcatcttccttcctgagctcattttcctctcctaccatctcttctcaggtcacatcctcctcctcatccctctcctcgttcagcgcactgcttccatcaatctcatccctcgatgatttccctgtgtttgatgacaagttcatcggcagaatcctcggtaaaggctcaaccggctccgttcgcgaggtcctgtcgtttcctgctaaggaacgactgtcaccccctcaggcagtcaagatcgtccttcttcccaaaccaaagctaaagagcgctcgcaactcaacgggcgtacaagacgatgagctggcaacagagctagaaacagaaattagcctctgggcttccctgccttcccatccaaatatcctccctctcctttcttcggaacgaacacaagacgcaatctttctctttatgccctacatggtctctggatcgctctttgatctcgtccgtcgacatcgagagcacgaccgtggtcgtgggagacgactggtctctagtttccgatcattcagtcatgcttcggccacggacaggtcgaacggtcagtcaaatcagacagagtgtgcaggcttagtcggagttggtcggtcggctacccttagggagtcaggtgttggtggtggacttcggttcttcccagaggatgacgctagaaagctgttcagagatatcgtggctggtttgcaggtccttcatagggagggaatcgttcacggcgatctcaaatctgaaaacgtcttggtcgatgaagaagtaagttcataatattgttattcctctttcgatgaatgaaacaccaaatctaaagcaaatgcgtctctacatttttccttcttagggccactgcaaactgtctgactttggattttcccaccgattggaagtcaaccagtctccacaacctattagcatcaccggccatacaaatgccaataccgttctagccagtcttcaacctcatgggtttccatctggaaaaacttctcagaaccgacaggcttcttcacctctccctcggtcggccgctctgttgaggatggcacaatcgaccgcccctcccttcattcctccttccggtggatccatgccttataccgccccagagcttctccaaccagtacagtcactctctggcgctcaacaaaggacaaccttgacgaccgacatgtgggctcttggagtgctcctgcacttccttctaactactggctcgtttcctttccaagacgcgtttgaacctcggttgcagatgaagattctccggggggtatggtccttgccagaagaagtcggtggcggtcggttaggcagagaagcagagagcttgttgaaaggtttgttggaggttcaggtcgacgaacgatggacagttgacgaggttgggaggagcgaatggttggctggttgggcagaagtcagaaagtctagtcggagtcgaagtcggtcgagaacagctttgggtgtgcttggtcaaactacccggagaagatcaaaaagtacccatcgatcggcccggatcgatgaaaatcctggtgggccatcgtccccttctctgccctcaacctcctatcaatcagcttctctatttggttcctctctagaatccttctccagcgttgacggccatcaaacccaggccaacagttggtcggatcagacctatctccctccaacaccacatcaatcgctttctcctcccgcaccacaccaatcgctttctcctccattccatcactctacggcttcgggctcgacgatctttccatcaggcttgaaggcatcaaagagtagatctcggtcaggcagcagggatactagatggagaagacgaccatacgtcgagtcggcccacactcagaatcaacccggacagagagcagaaccaaacgaagggtggggaacattgggcggtcagatgatcgtggaggtcgaggaacctgcacgggaaagaagggaaggcactagcgagaggaggagcagatcgcgagggcgaaggagagaggccaatgtcgattgagacgtgcgagtgatacctctgttttaaacccttcctcttttcttcctcttcctcttccttttcttctttcatgccttctttgccttttttgtttctttttttgtctctcgggtatactcttttgtattttcttcgtgcctgccgatgctaatctacctactctttcccaaacgcaacaaatatttccttcttacccacttctcatcaaaaaagggaacatgtattcattctctgtctttccaattttggacactatctatccgtccatttactcatccatctgtgcctgtgcttatgctccagatcgtggtacatgtatttatatacttcgcgtattgttctccccatctactcattgtttggaaacccatttactctacatcgttttctacccagtattcttttccccttctggtctcgctttctcagtctagaacggggctttggtcttctggttgatctttatgagatatgatgaccctttgcgatcgtagcagtatggtatgtaggtggaaaaggaaaaggaagatgaaaatgaaaagaaaagcataaacatctgaattcctttttttttttttccttcccgcctcttggttcttcgatccggtggttcgaaagaaacgacaaagacagataggaacaaaagggatccgaaataaagtagagatgagtagaccgataggagtagagttgaagaaagaatgaaggacaggaggtagatgtgatatgtcaagagtgagtggtgaaatgaaataactgggttaaggaacggattgactctattgaaggaaacaaagaagaaggagaacaggcaagtcaagtgaaatggtctaaagatttgaagaaagagaaaaaatcgagcatgaatgaaaggagataaaagaagacaaatacaaaagtattaaagaaaagaagagatctaatgggtaactgagatgaaggaaagcacatggacgaacagaaagcaaagaaaaaggacagaaacgaatctataggatctggaagaatttgagatcaagaattgatagagaaagcatcacagaaacgatagtgacaagcgtgatagacgctcgaggagagaatgacccagcaccgctgcttgccggcctgtttcgttccgacattgaaggccaaagatatcaaatggtgcgaaagaaaatgtagagaagaagaagaattgaaggttcagcaacagcaacaagaaaagcgtcaaacggaagaggacgacttacggataaccagtgatcttgacggtcataacagcaacgaggccgtcgatagccggatatccatcctcctcgacagtgtacatatggtcttgaaaatcagagacaaaatagcaaagatcagcaagttgaccgttgtggtccgaaattgccaaacaaacacagaaagtactcactaatgccctctgaagaattctgaagaaggcctgaaacatattggacggttgtcgtgtatgtatagctagcgacgatagaaagattccgcaaacatcagttttcagccagctctaggccagatatttgataggagatcaagatgggatgataggtagatagaggtactcacttgttgtaagatgtgctgccctggaggacggttgagttggtgacatttctcgagacaaccgtttcagtcgttccaccagtggttgcgtacccgacaataccatctcgacccaggttgtagccgtttgagacgatgtcgtgtccctctttagattataagagtatgaatattagctcaaactcgagaatgtggtcaaggagaactaaagagaaaatgtaggacgaacgggcaagatccatctcttcggaagcactatttagatcaaagtatatatcaggatctcgtcaagagcaaatgatgagaaaatttaaagcttgaaacacgaaaggacttacgccataaagatagctccagtagtggcctgtgtccaatacctgaaatggttaccaccctggaaagtttctctgcatgtgccgaagatagcatcgccgaagttgtaacgaatctcggccgtttgaataactttcgtatcgagaaacagagaaacacgaagatgagttctgagtcacccataacaaaagcgagatcgtacacaataaagcgagcatgatagagaatacggaggaaaacaagagaaattgaaggtgcgaagaagatacataccaacatccttcccatcgcctaggtttgcatactgtccgcccgttgatataatgttcaagcaatttcctgagaagttcagactcctattatgaggggtttttttgtccagtgcgagttaatggaaggatacagaggatgcgtcagatatatgtttgtttcttaatgagaaaaaagactaaatatgaaacgaacagataatagttccttagtcccccattatctgctgaatccaccctattgaacaccaaatcaaaagggcggaaatttgttagcgatgcatccagcgcgcagacaggagaacccgatttaaatacatgatatccttgacgttagaaaagacatgtaaggaactttcttacaagacggcagcatcagagttggcagagataatcatgttcaacggctctcccagacctgctggatatgtttcattgacgatctggagaaaggaaatgtccagagaccggttgcccagtcgtgcacaaaaaaatgacattcccaaaataggcgatgacgacaataagcaggcatgtaagtttcaaaatagatgggttcagagaaaagcagtatagggagtgagtagttagtgttagtgttcgaatctacaatgcaaaagatgttctatagagaacaccaggagaatactagaagaaatcaagacaagactagaacgaaccgttaacatttgacctccggtcagagacgggtttgtgtaacctagagatgatgactccctcctgtccatgctattcattgtcatatccactaccggaccacttggtggtttggccgaatatccgaccatgtaagatgatgaagcctgggagacgctcggcggtagttgatttgatgaccagccagaggaaggcgaacgagggaaggatgctggtggaggagaggaaggaggttgctgcgtgctccgccctaagcaagggctaaaagcgtggagagcgaggcagacaaatgccaggatcttccaatgggaaatgtagaaggtcatctttataggtgacattttgattcaagaggagggagattggagatcaagaaactgccagtttctttgagagggcaagagggaagaaaaggctgtgaacgtatgctgatcgatacgaggcgaaataagcaggcaagagggtgattctaacccggagaggagagtagccgaagggagagaaagttagttgagcttgctgtactgaataaattcgagagatgcacgaagagcatgaagagagaaaaagggagacccaacgaaatggtgggtggcttaccagacgatagtcttctcaaagcacgattactcgctccgaagaaagaggagtaggaagaggactatttgaaatgctggatttcaacgccgagacggtcgattctttgcactctgtgttgtttttgaatgaataggaccacctgccttgttgctttccttctcctattcgttatttctcttcaggcgttgatcaagtgaagggtggaatgagcgaagctttgtcttgagttgttctcgttgtttaagtgacgaaacgagtggaattggccaggatccgattacgtaatttcccgcagccaagctttacattacgtgactgaatccggcgaagttctttttctcatcgatctgatcgtgtttctgtgtggagtcttgctttggattatgtgtttactcttctggttgttctctacacacttcatcatatcgtaactctgggctacatctaagcggactcagcctccttctcctcttcctctttggcaagcttaggggtatcgtattcctacagagaccacacacagcatcgtttcagcactcattcgatatttgagacggataaaaagaaagggaaaatcaatcacttacaagagctttctcctcagactcagagacctccttctcgctgacttcttcggtagactgcttctcctcctcctcagcggtctccttttcgggagcctcgtgtcctccggcttcatccttggcctgttctcgagcccgggcagtgctcttgtcctgttgacgtcatcaagtgagaatataggcgtcagttagaaagacgagacaagacgcattagggaagagtcaaaaacgtaatcataacatccttacctcagcgctctacatggtcatcgttgtcatcgttaaatcaaaagtttacgtgagcaaaagggctctcaagcagaaaatcggtaaccgaatcggatacgaacaatgggggtaatttctccagactgcttaatcgagctgggctcgtcggtgtcctcaccctgagccttgacatcgctgtcttcggtgacgtcgttcgccgggtgctcgtcgaacttgtgctccttctcttctgaagcggcgtgctcgtggtggccgtgggagtcgtggtgctcaccgtgagcagacgagtttcggactaagttcacagcccatccaatctttttaccagagatgcagaaagagaagatgaaggaagatgagctgatgagataccagaacgtgcacgcgacatatagtaatgcgaatactcaccatgggaccgaaaatagcagcggatccgacctacatttcataagtgagcatggttcagatgaaaatttagttgatgaaaccaaagagaaaaggaagagaagatagtttagatcagtaaaagctttctttgcatctccttcgttcaatgcggtgagatgggattttaagactcgaaggaaactagctgagagaaaagcacggtgtaaaaaacacctgtgtaaatttgaagaaagaaagagacgagagaactcacaacccaagggatatcatccctcaagctccaagacttggatccgtagtcgacgttgccatgtccagaggcgaaccgcttaccagcaaaggaagcgttgcttcctcgggcagctcgggcagccggccgggcagctgttcgaagagatcgaaagacggtagacatgtttgaatacgtgtttttatcttcttcttttttttcttttacaacggaaagtctgtaagcgagctgcttatacgatgagccttgtcgaatgatgatggaggttggcaaagagagaaatccctaaggaaaaaaaggatacggcaagcgtcggagagacagacttagatgatttctgaatctaagttacgacttagacaacattttcggctatactcgaaacccgactgttcatcattcgcgtcatctaacatgatcgcttggttggcactctcgacctctacaacatgtctagattgcctttctctgcgtccactgatgcctcgtctacaacagtttcggacttaggtctcaagttatcatcaacaacctcaacaccctcgcccgcttcgacgaacaaagcggccaccggcgctttcttaacgatgccttcttctagtttcaatcacccgttccccagtctgtcgagtgtttcatcgtggacatcctttgggagcagtagaatccatgctacttcgtcaagctctgactaccaggagatcaaggagtctatagaaccacggttgagaaggcttgtgtggcaagctgggttggacgaattgtacgttgtctgggatccttatctatcaccgagcatccaaaatgataacgtctcaagagaatctatagcggaagacccatcatctgcttctcaatagcatccataccagacccgcgctcagttgatcttgagaaaatattcagaagactggtatcaacccttcaaccgctaggtaggcagaatgcttcgtttccttcttagagttcactcttatgtatcatgcgcgctgcagaaatgcttatttcactaccatgtatgcgcaaacacatgcatacatcggtcataacgtccttatagtcgagaacgattacaatctcgtcatattcgctgccggtggaagttattatccttcgttctcttggatatggaaagtatgggctcagcttggtcggccgttcagaaagaatctaaaacaacttgttcgttccgcttggttgtatgtgctgagaattgtctgcggattattacatgctttggctgacacaagtcgcgtgtacaactgttccatgcagttcatcgtgcatcctaatttcaagacaaaaggtatgattcattcagacgagagtctcggagatgcgagaacgaaatttctgatgacaggtttctaatttcctcttccgactgatgaataacagctatattgacattagcaactccactaatctcggcgaaagtcttccggaagatcatctatatccaaaagctatccttgttgttctcccatctacctattggcaacatcttgattcccccagagacagtcaggtaaggaaaacgttccttcttccgcttaaaaaatggttacataacattgagaattgtttgtcgatttccagagagaacctcgcgcgcgaacctagctacttgccctctccgcttcccccccgtacactcaacacacaaatctcgcaagaattccctctctccactcaatatgttctcccatctgttattcaagactctgtccaatatcttcgttggggatatagcgaagatgttgactactatggtctccgatctgtatcctcacctccaagcgaggcactcaccacttcaggcatctttcgcaaaaacccttcctcaggtgttcaacgctgcgtggaagaagcgtaccttgtcgaacagccggtgtcactcactctgttcgatgatccacatcttgctgccggtctaatcaagttgttcttcagaaagttgaaggagccattatttggaaagaacatctgggacctcgtgacaaactgtccggattgtttggacagtcagcctggagagcgatacttgaatgacattatcttggggtaagtagttaactttgtaacgtgtgttttgtttgatcggaacgagcatctgggcatttatactgatgttccttgcccatgtgttcttggttaggtcgttgaatccctacaacaggcttctgctaggctatgtgatctgtgagtaagaacccctgatacctatattcattcgccagcctaactgtgtcctctgtgatttcaataacagatctacttcacgagacaatgttatgtaactcattgatgacgtctcgaaacttatcgattgtcttcactccaaagtaggcaggtttctttgtgaagtatatggtctctgcagttcatcggtcctgaattgtcacatctgactcgttctcaatcatacaccgcttgctaccagtctgatcaggtcgaattctcctactagggatatgcttcttgcttctgtcgaaccatcggcatcccttgctcatctagcagcgttagaaggatcagggtcgaacgctcccttgaaggaagtcacgctcggattgattgttgcgcattggattgagaggccgcaagtattttgggaagacgaagtcagaaattatggacggggctcgagagtaactatctaatatacacgtaagattcctcttgagtgattttggtgagatccattacttggtcaagtgatgaggaggaacaaggctcaagtgaggggaagactggtaccgctaacatacagataaaatggataagataagaatatatgccgaaagagtccctcgtagccgcagtcctgctgtttgtgacatatggttacgttcgatgtcaaccctgtaaccgcggaactaacagttgaacttcgttttctcttcgctccgtacaaactctcgacttgccacccatacaatcttcttttgctctcacttccactctccttgcaccttttatcaatacttttacatcatgcttgaacaagtccgaaagaagctcgtcattggtatgtactttgtttcactctctattcgctgtcttttcgtcagagagtggtctttgttggcaggggagggaaagaaacgctagcaggccggatgaaaggtaacccagagcgatgggacatctttcattcatcctgcccgtatttgttcttcctttgcactcgtgtgtttgtcagtctgcaaggacgacagatagcgaacaagatatgctttctcttagaggatgcctttcctaatccttcagagtcttaacgagccgagttgactgactttgttttgttcttgctttccttcttctcctcttccttcccatctatctcgcaatcacccctctcttcacgtgcacagtcggttcgtaacggttcctttagagtcatcttcctccctgctatcccgattgttccttctctgctcgcttgtctaccctgcgggttccttctctctcttttttggtcactcgaagattctttgatcatccgagaaaagccggagaaaggctgttcggtgtttcactcaactatcttgtcgcctcaaccctttcgtctttgttttcaattccctacacatactactacgtgtcactcgatctcagagtctcgacatcatcgcatcatgacaatactaagattctgcaatcggatgctgatcttttccctctttcctcccggacatatctgtttattctgtgtatcgtggcatttctatgaataggtgacggagcctgtggaaaaacctgtttgcttatcgtcttctcgtgggtctttcttgcttttcacatcttcatacttctatccaattcgcgggcaggagaacttcatgtcgttcatatgaatgaagtctccgtgtccaaatcaccttgagtgtgcgagtgactaatgcatcattgatcgtatttgtctttgtcttcttgatgattttcatacatgtagaaaaggcaccttccctgaggtaagtttgttgatacgatcagccaaccgacgtacatacaagtcaaaggtgacggaatgacccggccgagagaccggggttagagaaatgtttctgttaggaagctttgcttagccgcaagtcttctgggctagaatgccggatgcacgtggagagggcaattctatataggatgacagagctctgggtattgatgctcttcgggaggttggaggttgaacggcgaagatactgtggaactgtcggttgtatataccattgttcatcacactcgaatctaactttgttgcttctggtttattcaaggtttacgtccctactgtcttcgaaaactagtgggtatctttctgctcttctatcaaacttcagtgcagattcttttgaatatactgggaacagacctttgaccatgtatgctgttctcattgctcaatcaaacagtgtggctgatgtcgaggtcgatggtaagaaggtcgagctcgccctctgggataccgctggacaggaggattacgatcgattgcgaccattgtcgtaccccgactcgcatgtcattctcatctgcttctccgttgattcgccggattcattggacaacgttcaggagaaggttcgatcatctttccacgctacatcgcatctgtctagaaagtaacagatggagctagacagggccaatactgattacggttttctttttttgttttgtgaataaatctgtacctgaatattgattaatcattctttccaccgccttgaccgtatcaaccttccatccgacagtggatctctgaggtccttcacttctgctccaaccttcccattattcttgtcggttgcaagaaggatcttcgacaggaccctcgtacgatcgaggagctcaagaagacgagccagcgacctgtctcccaggccgaggttcgtttttccgtttcacccttagtcttgttccattgtttttcaacggtgcatcaccggcacgatggtcagttaagacttacactcgatctatgtttttgttttattttctcgatcctctttgtagggtcaagccgtcgctcaaaagatcggagccaggcgatacatagagtgctccgcccgaactggtgaaggtgttcgagatgtcttccagactgctacccgagaggcccttgtcgtacgtgtagtctttcgtgttcatgttatgtacagactgttgatcttcgattttttgtcatctcaggccaagggtggtcgaggaaagagcggaaagggaggaaaggacaagaagactggctgcatcgtgctttaagaagaggggcgggccccttgctcgatctcttttctttcatcgttctctacatgcactttcttttctccctctggattttctgattttcgatcaggcgtaacggttctttccttctctcctctttgctatccgtcggttcttttaccttcagtttcgcttcttccgagttgctcgaccacgttcaactctttgacttttctttcccgtccttttcttcatatcatgattcctctccgtttttcttacccctcgttcctcgccgtctttcgcttgattcttgtctttatataatcttgagatcctcgcttcctccgccttccctccgtcccttcctgttatcttcttctttcctcttcttgctgtcttgcttccttatcgtttatggttttgatgagctcaattcaccctcctcttctttctatcggtcttccctttcaccttttttaggcttaatcttttctcttgttcggaaaacaccgggccggcgaaggaggcttggcaaagacagttgtgacgccgacagttacaccatagatgagacagtggctgagaagaaagacatattcatcatggaagttaaagacaaggatatgaaatattgagatgtgggtgacagctttcgtctggcagagaagggagggggcggagtaaagataaggagggaggg

SEQ ID NO: 1427 - DNA, 13629 bp, Xanthophyllomyces dendrorhous
ggagggaggaagggagggagaagttgaagaagggaggagggagggaaagctaaaagggaaagaagagaaataacactatggcacacgaataatcactcgaagagcaaagagaagaaacgaaagaaaatcaaagaacaagggaaggaggcaagagtagaactaaacaaacagagtagactataacggtctttgtaagaagagacattaatctgtagaaagagagaggagattatcgtacaaaatgggtcaaacaaactacgggttgaattcctcaaaggaagaagagaagaagagagaatatgaaatccaagggggggaagacaaagagaagaggtagtaagaatgcatatatgcgttcctaataaaaaaacaaagacgtgagaatgttcccttaagcgaggatctgcttatggttctgctggactctgaatccagcattcaatctgatgtcctctgctcgcctctcgacattctcaaaccagccgatcgcctgctctgccttcttctttccggcctctgcccttctgacctcctccgctcgttcttccatggcaccggcgaatgtcgatcgaaggttccaagcggcagctctgagcactcgcttggtctcgagcgaaacccgaccagccgtttgatcgtcccatcgttcgttctcctcgttttgagcaagcagggcctgtcggatgtttgatccgattcttcgaggaatcgttcgaggaagctccgaaaggatgtaataacctaatccaacggtagcggcagcgacgatcggtcctgcccattggcgagcgacagggcttcggaggatatcggccagacggaagaaacattcgaccaagcttcgagtcgccaaggtctttcctccaatcaaagagacgacgccgacagcagtcaatccgtaggggacgagggcctggctctctttggcggaatcctctgaggtgaaggacgagtcggcgtcagcgaagaatggtcggtagatccgggcgagttgctggtgaacgtcaaatacgtccccaagggtgatgttagagagatctcgcctggcagccagaccgaggccaacgtttccaatggaaccgctcattcggcggttaagtctaccacccttgggggcaaacatggcctccggtctgaacaccttctttggtcggtcaactccctgaggaagatgcttctcgccgagcgtcgagacctggttgactccaatcgaagtgatctgcctggcgtcatgctcggccaaaacaacggcggcgtcgagcgaggcaagcaaagcaagcttgacatcatgggcataatcccagagatcgagcaagccagggtaggtaggcaactcgatgcctacggcttccggagcaatctctcctctaacgactgagtcgagagccttggtaagtctggccttggctcgttcaccagacagagcgaccgtctcgtcctcgatagattcaagctttcgctcgaagccgtcctggcctcgtttcatctcatccaatataggcttcgttcgctcaagctcagcctgggcctggacaatctcgtcgttggcggcaaggatgttggcggaagcaagaatgtcaaggtccgagagcagatgagaaacaaaggtctgtacaggaaggagtttggatttagctcgcttgtcgaggacgaaagatcgaagggcggattcgaggtgttcgaaagcttctgagttagtctcagcaggagggggtccttccatctgagcaagctaattggccaggaaatagacgagaaacaatcaaacaataaggagaagagaagtgagtacacctgtagacatcgagctgacggcaaaaggaggacaaggatgaacgtacctccatgattcggctagaatcaacaaagtgaacaagctcctcagcatcttcccaagtcctggggctaagctgcctgatttgctcgaggatgactctcttgcacctttccttatccctaatctggtcgaacttgttaactacgatgaataaataggccttctcattgctggccgtccagataaactctttagcactcaaggtgaagtgattggctgccgagacacagaacacgacgacatcgatctcgtcttgtctggcaaatacggccgtagtcttgagagaatctcggttcaacccgggagcatcgataagggagatgtcgacaacgccattgtgaataagagattcggatgaagtcctggtatccgacacatagacccggatcggaggacgcgtatcgtcctcgacatccacaaccatctcttccaactcggcgagcgagtgaacagaataggtggccttgtcagacaggttgtacgtctttccgggaagttgaacgtgggcttcctctcgatcgccgttgtctctggcatcatggacggtgcaaaagatggttgtgcagggctgttgatcgacgggcatgacatctcttcggaggagagcattaacgaacgtggatttcccagagttcaaatctccagtgatgaggaccttagacgaggtgtcgaggattcgatccttaagcgactcaaggtgcttggtctgagtgctgattcgtccgtcaagaagtttggagatggacgatcgctcaagcgacataacgagtgacttggaagatcggttgggacctagcttgagatccaagttgaggaccttgaatccagtcgcatgagtagagtcggcgatgtcaacatcgtccgtgtgagtctcctcttttgaatcctcagaagccgggaggagagaaagagatcgtcgaggggctgccattcgttgaacagacgaagtgtgggttttgttaaatacaacatttcggatctgggaaggttcatcggcaaaggatagacttcttcgaagagatcggttaatgtggggggtgctgctcgcggaggaaacgggaggacgagtggccagaggttgaatatcagggtatcgaatctgccagttggacgaattaaaggtcatgaaatccttcaaaaggtcgttcgtagagtcgatagcggtcgaaagcctacgaatcagaaagagagcaaagacgattcaaggggatgagttcttttccttcatcatgtcttcttcctcttcaatcaagacacaggacccgcgtctgttgcacgatcaattccatccttgcatccctgtatccatccgtttgatcttctatcacctaagcaccatggaagttaaagaactcaccgatccctttgagcttcataagcggccactgagttttccaatccagtgggagtaggttgctcattgaacgatccgaaaggaaaagaagttcctccttcggttaccttctgaggagaagccggggtgaaaggcgactgaatagtattcttataaatttgagacatctcgaatttggaacgtgtgttgtatcgtactccactgctgaagtactacgaccgatagatatacgaatcaatcagggtgtagagcaaggaggatagagtggatatgggcagggtgtagtgaatgtgagtggtggacgaatcggacgactaaaagtctagttgattcttacataagttttatatgaatctccatcttctataaatgattagggttataataacttgaagaatcagtcaacatctccgtccactcttatgggaaaagcagcaactaagtttcagtttgatgacaacatattttgatgacggcgaagattggtctcagccgtccataacgagggagacagcgaagttgtctttctaaaatattgcgcttaggatagatctctgtataaacaggtctcttgtatgacagaaacatttagatcaaacatatgcattgtattttgtgaactttaagcttggtgaaaacaatctcaatcgcgagtgaccgatatatggcccttttaaactcgagcatcctcagaccacaaactaccaagatcatatgggccatggtttcagttttcacacgtagataggacaaattcaatgtcagtatcagcaaccagagcaccggcggcagcgtttaacaccagcattctcatcccctcgttctcttccttatgaagggctaggtgcagaatgttgcgcaacatgttgacattcctattccactgagtgtgagagaacgatgagtactcgagacgctgttttgagatatactagatacgcgactttttcgacagacacttcaacactttttgatcacccacactttggctcttcctgaaaactcgccatggcacttgagacacgctttggatgtccggaatttccggattttacaccttggaccaggcaggaagctctcagcttggagagaagcgtattcatcgagctagaagcatgctcatgagaagacgatgagaaggcgcggtccccgaaggccagcaaggcacgtggacgtccgtctgatagacgaaacgctaccttgtagtacacttgcttgcggctgatgtgcgcaccccagtggagacgtctccactttcgggcggcgaagaatgtcaagagccttgagtaggaccgagaacgtggggcgagagtggtgtggagatcatcgagattgatagctctgaatgaacgacgatccgaagcaagatgacgaggccagcaagacaatctaaacagtcagcatgggcctgagaaagcattcatcacggagaattgatgtcattgatgcatcatcctccatccacagccaccatctccgaaagtctcgattgacccctgcaagatgcttccatgactcgcgagagagagtgaccactgggtgccctatatagccagaccgccgttgtccagagacatggccagccctcttgagctcgtcgagagaagcgtccggcgacctggatcgagacccaaaacctcgttctctggctgtagatctcagggaacgtgctctgatcggcgtcgactgtagttagaagcgacatgggtatcagaactctggcagacactccaatggcgcctgtactgagcgagcgggcgagacagcgccgttgggcctccatcttggcgatgtagaaagactgccttcaccaagtgtccgagtcagctcggaaagatatctctgtcacaccgcgcatgccccagatccatatctgccaatctgagataagcccaaaggtcatgaagaaccggggtatccacaaaaacataggaggtttgatagaatgagagggacaggagcgagaacaaaaccaaaccgaagatcaacgagaattgatccagacccagcgaaatctagctgtctgatagaacatcatcaaacgatcagtcatcgttatcggtcttgtcagcaacgaccatggcgctgacctttcgctaacatgtacaacagcagctgctgactattacgtgcagtctttgctcatctattttgttgaaaacaatctacttcctactctttgtgttggatattgtccaagcatgtcatcttgttcaacttcccttcaccaccgagagtccgtcaggttggaagggatgtaaacgttgatttgtttgactttcaggttcatccgcttagacacacatccctacttatgatcctctgatcctctcaccgataatcttttaacactactttcattcgatatactatcctcgattaatctctttttacactgtctcttaacagttcggccttctagacttctccataggtctttcctctttcttgaagattgcgtttgagcacactctttgggagatgatttaaaacaaaaggagccaaagtcaatgaacagtttccagacaagaaaaacttactcatctcctaagaagagagagaaactaaagatattaccagactcggacaactttctccacccttgacaccagctttgtcaccttctctgcctctttccgcttgtgccagatatagactctcacaacaagtatatagagccatgatctcttgaggacacttggatgaatccgagttgttggccgacagacatgtctggatcgcacacgcaagtggatggcaattaggaactggctagaaaatgagaccggaagtattgtaagcgtttcactatttttcagcagtaaaaaaggtctatatgcaatgagataatcatctatcttacagaagacatgtagagcagagaaaagcctcgagagaatttgagagtcaacaccgtttggttcaaagcgaacgcacgatcggagacaccgaggtgacgtcacgaatattggcaagattcgtcttcctgatagaacaacatcatataaatcaggcatcactaaccatctagcatcccattgccaacacctacccgtaaacgtaccgatcggctgcttactatgcaacaatccaattcagctgcatcccaagaattctcggtaggtatttctttcggttacgattcatccagcgtcttgacatacacatccctctgacaaatacgtgtgtgtttcaacaactataaacatacactgaatcatttaggagagtcgaaacaagccagtttccgctcctgtaactagcagactaaacccacagcccggtacaactaatgtgcaccaccttggtttgtcctcttcgactaacaatccgatgttcaacggtctaattttagcttgactatgggtgaaacaggcgacgctttgcctggatcttctactgttccagagattcgttagtacactctctcaagtcttgttcaaacccattatttcggcatatcagcaggcctgacagcttgtgtacattgggcggtttctcgcagccgaccgaccgagaggagtagatgccactggagagaaagttccgttcatggaccgagcgaaaggatacgctaaggtgcaggcaggtactgtgcgtgctactcctccgatgacttctataaccgctggatctatctgagaaacctaaacgtacatgaatctgacgatctctgctcgccttctgcgacctatagttcttcggtaatgagaaagagaaggcactgggagaggcagctctccgaggagaagatgttgggcagaggcactgaactgttgggtgtcattctcgtcgtaccggcgtatgtattctttgattatatttgtttgttattcataaaaagctcccggttgtctccgcctcacgaagccagatgttgtcgccgtaattgtctctcttcagcctggcttcagactgacgactggaattgatcggcagccacgtaacgcgaattttccaatttccttttggttcttgtcttttatttatttattcaaatcaatacgcgtccgtttgctcctttttctgatgatttcgatcgagataaacgatgacaataaatcaacaaagttctccctgtagacgacggagaatataccaggtgtaacgtgaaagagagtagcggagagaaaaagatgatttgtaacatcctgattgtcatcctatgaaacatcttctcctttgttctgtccgattgataccgcgttggcgttgaactttgttcggacccggatgtgtcttgtaccgggtccgtagggacttggtccgttctattcgagtgaaggagctggatggtcgatctcgttagtccaaacatccatcatcgaatccgttttcaacaatacccaacacgtgggcaaatacaaccgaaagctttgtctttaaactcgcctaacgcttccttcctcggccagcttagtgcgatacacaaacttggacaggaataccaagtcgctcagagagtctcaattagaaaaaatcaaggaaggacagagaagagaagagaaagagaaacttcctcttatagccatttgtgtacaatgcgttcgaccgtagataccctcaatcccgagcagtcaacagaatacatatctcttcctgttcttaccgcttcagaatcgtccccgtacccgcttggacaagaacttgaatcgccgtctttccccgcagctggcttgtcgtcaataggagatttatctaaagacatcgaaaacgaaacgtttaacttggatggggccaacaaaccgttgggtcttgctcaggtatacgaaggagatcaacctggggaatatgcttcaacagaacgggtccaacagttcaagctttacaaaagacgttgggctggattatcaatcattgcgagtctaccaatatatcttgtgctagcggagaatatgaaaggctaattcttatattcaacagcttatgttagatgtcataaatagtatgaacgcattgtaagtttaatttgaaaggactcagccggactgtgatcagccagcgttgaaatgatattgttccgtttttagctggttcaccgcgatcgcttccgaaagtgcagagaggttcaacgtgacccaaaccaagatcaactggttcgttcattgtcgatacttcccgcttctgatagaacatgtcttgatcgttatctctttacacttttcttcgtccaaacaggtttgtcaacatctgcagtctttgtagtttggtcaccttcccccttgttcctgtagcctgccataaataccttcctcgaaaactctgcgtcgttgccgcaattgtcaccatcgtcgccagttggattcgatatgccgcctgcgtcgcccctgctttcactgctgaggctgaccgacataaaggatggggtctggtgttattttcacaaatgttgtacggactggttgggccgttatcgctagcgataggaagcaagtattcggagctctggttcgacgtgaaggagagaacggcggcaaccatgctgctgtccattggcgcaccgtgagtaaacgatacagcctgtcccggcaagtcaggaaaaatggaagcgctgatagtaaatgaggcttgaaattgtacagacttggaacggctattgctcagattatcgctcctatcgtttgtactacagcagatgatatcccattctccgttctcgtcatgggagctattagttgtatgttgagcttcttgacctactcgtaactagcccatgttgatagattgtttttataccgtaaatagctctcaccgttctgtccttcatcattccctcccaaccccccatacctcctactttctccgcgtctgttccaccaatctcctttgtggaaacctctcgactatactttgcggacgtcaaggttccattcttacctctctccgacaagccgagtacaatcaccaagagagaacgaatcgatctatggttgttaacgtttgtcttcggtactctcacggcaacaatcactgccgtgacgagcgaagtcaactcaatctttgtgcgtgccgtattgactcgacgttgtgataagtaactattctgaacctttctcacgataactcccaacacaggtgccatatggatactcgtcttctgttagtctgtcctccgctctatcccttacctatgcgccaaagaagaaagacatactaaagcatcttcatgtttacaggctgctggaaatatgtatgagaatgcggttcttttgtatctcccctaaacgactactaatcacctttctggttatctcatcgccctttcataccataatttaggaggtgagggcttttcgtctctcaattccgttgtaccattgctgttgcctgattgtcgcgtatcgaacctattcgcagtgccgccattgtcgccgctggtttagtcggagctttcatctctgcacctataattgatagatacctcatgggatggatgtgtacaatcgcaaaggtgtttaccaccattatcgctttcgcgaatttgggattcctgtaagtactaataacattcttcatttgatccttgattttacgagcatatgaaagaaaccttccttatgatctttggtatttgaacactatatcttagtttcgctgtcaaacccgacaatgtaatcggtattgtagcattgttctgtttgatgggaggtggtgctttcaggtcggtcttctatatttggtattgtcgaactacccgtgtcttgaatggtttagactggggccgagaactcatgcttcttgcggacgacgtcttgttttgggtgggaattcagtcttctcgccatcggacttgaattaggagcagaagtgacacggcagcccgatacatcctctagcgcgttctactgggtgagcagtctgttcacatttgtctgcatcaacagtgagttcactatcaatttgattggttggactgtgacgctcgtcttgactttcctctcatctatatttggacatttatccttctcctccctactgaaaaacttgttttctcaagtcatggacgcgcttcgagcgggtccggaggccaatccaccgtataacatgaagaactcgcttattgtaagtcaccaattgaatcaggtcgattgactgttgcatcctgatcaaaaacacttactaacctcttctatcttcaacttgctcctcgaacgattagttcgaagtcgtgatgacctttgtcgctgttagtttttttttctcttgcgatgttcgatgttcgctatttcatgctcaaactgctgactcgtattcttctataatttctcttcaaatccagatgggtctcgtctatttcatccgaggtaatcagtcgagatcagcagccgataacgaaaaactacttgcttctaagagacccaatatagatagtgctgtcgtagctgcatcagctcgtcctgaagacgaggagaaaggtagaaagggacccagcttcttaagattgaggtctttgttcaaaggcaaggcgtgataattagatatcaccgcgttcgcttttcgttttgtcatcttggtctttcttattcttgccccttgtgaggacctcttatgttcgagcttgttcctttcctcttctcctcctctttctgcttcttctattgatctgtggaaatacatatattgcgtcagcttgaccatgaaatctcgtcaactcgttcatctctctcgagttctggtatttctttttgtagggaattatctatataatctaagagtagtcgatgtcacctcacctaatcattctttgctcttacaatgtttctatcttatgtgttctattcaagcacttccttctgaaaaagaaaaaaataacttgatatgggtatatacatcgtatccaaaacgcttatgtatgcttgtgtgataacatgaaagctacatgcgcacccctttctgactcgttcgcacagaatggtcgacagcatgaaagaggatatatataggtgccggctagatgaatcactcatcagtagcttcttcttcgtcatcttcgaagatgtcggcgagaaatccctagataacgaaaacaggagataaagaaggaaggacgagggtcagacagaagcaacaggtcatcatgtgctaactagctggcaggtagcacaaggaacttacatcatctatgcgtagcaaaggcgatcgaaccgttcatatacatagcggttcagtcttgcaaatcaagctctctatctcataatgagaacaaatcaactgaaactcacaatcataagcaatcttctcacgatcatctactccttcgtggccgtgcgtgtccaactcctgcgaagggatgaccgttctaatcaaacattatagagccgatcagatacgttctagagtaaagaagctgtgacgactgttgaccacggggtgattttatatgtgaactcacttgaggaagtcgatagaagaagcaggtaaaagagcaagttctagatcgagttctgtgatatagggctggttcaattagaccatcaagagcaggattcagcttagccgatatttgcgctatatcgacttcaggacgaagacagctaatggagattatgtggaggccaaccttttctctagcaatctctctgaaggcttcgctgagttgctcaggactctcggtatcctgagtgatctctaccaggagtgaggtgaaggctctataatcaaccgctccaaattcttcgaccagtgtagcatggattcgatcaatctcttgatcctaggtaacaataaatatagccataccagatgttgatgtacatggaaacgtcagtacacagatgatcaacctgatgactcaaaattcaaaagggatgtaaacaccaggatgatgggacttactgaatagcttatactcaaactggcaagagctgctgtgaactcttgtatcgtaagtgtgttggtctcatcagaatcaaagtgccggaaggtcgactcaaactcttccagttgagcaggcgtaagctgtagttgcggcaaggagaaggcagagtagattagagacctgaataacctcaataaaatgagaaagcagatagtactcacgttagtcgttcctctagaaacaatctatgagtgctcagaaaaattgtaattcagcttacgccgggcaatttttttctcacaacgatgatgaagaacattacgaacctgattttcgatgaatccaattcttctactgagactgcctcggaacagctccagctcccaactaaggtcctcccatgtcagaacagtgtagtcgttatcctctacgttcgcagccatgcaatttgcctccgctattctgagatcttctagcaagtcttgtagagaagctagtcgggtcgcttgaatagacgaggcttgagatttttggttctgaaatcgaaaataattccaagcatcgtaagagaacaaggatgatatagaaatagaacatggttcttgggatattcgaacctcgagttctcctgagagcgcgccaagttcacgctctagatcatgtagtctagcttgcagatcctgcgctattcgagcagcttctctcatcaatgtatccttaattctagttcatttttgagagtgcagaacatagatcaagtttagtgtacgctcaatagagatgtctaaagaatggaaaagagaaatcaactaactgcctgattcgagagttgatagacttcgaataaatgacttctgcgccaaggagctggttccaactctcgtccacaaactatttccgtacatggtgataagaagaaacgtcagagtgttcaggaaatgacggacgtgggaacaacaagatcaagaacaaaactctcacctgtaatcccaatccctcttctggctcccatgctctcattctatacgtcttcaactttgtcctcacattgcccaacaagtccctcaactctcccctttctctaacccactccctctttgcggtcttcttccagtccgttaactcagttgaaagccctcggacagcaggataagtggatgtgttggattgtagtgaagtcgcggtagatgaccagacggatcgttgagttgaaagatgctgaagcagtaggcgcgcccggcgttcatagtcattcttgctagacctatgtaagccgcagtcattcgtgtggatgtcagtatcgaagtgagatgcttagataaaaggttaggacaaaccagactccctccattgtagtgatgaatttttcgactctgcgcacaacagtttctgctttgtctgatatttcacagcaccaggattgcgcagatgacacgcaagaaagagtcaaggaaggtaggtagatactcagcaaaaggatgaggggggaggtttgcgcatagatgcaaagaaaatggaagaaaaatgctcactcatattggaaaacgcgtgaaagaacccggcgacataagtcatgatacttcgctcatctggaggcctagcatcacacagatcggcaac

SEQ ID NO: 1428 - DNA, 9676 bp, Xanthophyllomyces dendrorhous
gtgtatatctgagatatctcacaagactactcgcttggtataaagcagcgcgcaccttgttcagcctatgatagtctaataaatccggccgatggtgatgaatcagcgcacaaagtgctaatccatctgtccaactccaggtgaagtcctgaacgtctacctctggagcatatccagccgtcttacgttgaacccacagtaatagaccatcttttgctgaaagaccctcttcagagatgtcggcgatcgtaaaacgaagaataagtgtccagatctgttgaagggtacgacaaaacgcgatatagaaatgtatcagatgcaaacgagtagtttgaagcgcatcgggattgtaagaagattacgataggaacgtactagccccaaaatgagcttcaaattagggtcgatgatatctggtaaagtttttcaaaggcacaatgttagctttaaggagatttgaatgagtatggcaagtgttttgttgactaaccctcggccgcaatattcgtcagctgtattcctcgcgctcggatatagtttaatgcttttgtgacattctgaatcataaaaaaacgaaagagtaaactctggttgtttattttggtgatacagaaggtagactgtccttccatacctcagcgcattgaattcgatgagccggtctgacgacatagcgacctaaggatgtatctcccataatttcctacaaaaccatgtagctgaattcagccatctctgataatttccacaccaaacaaacacaagaagatctgaagcgcataccataagctgtttgagtttgttccagacggtcaagaaagtcaatatataggtcagtttttgaaatcaaagggacggataagcagttgatgtttgagtatcgccagtaaatgttacaacttacttgaatgagacgaactccgtcggataagtctctaccaagcttctccatcggctcaattcctcgagtagctagcttcgaattaagcctttaaggttcacaatcaagatcaaaagtcaggttcgtgcaaccacagcagaaggtaatatgtatcaaacatatgatcgaaggagttcgctgaagatagataatcactgtccagcatgacgccgctcgcacgaaggtagaatgacaagctagcactgaccatttgcagaatgttctgaaaaaaagcacaacgaccaagaagcagtaaagttttgaagagttagtacggtctgactaaatatgttaatcaatagcccgttttggcagaccctatgatgcatttctatcgttgaggtatgaatggacgaaatcttgatgccaaggagatgtattcgaatccagacacctctaagaatttcatgacagcacaaacctttcttgaatcgcttctagtgatgttcttggagagtccatgttgttgaaagtatgatgaaccagagatggtagctcgttagaaagaatagaaaatcagagaatgatcaacaaacatttctcgtgatcggtgactaaccggatgactgtcatcctcatcacgtcctatgacggttgctaccaaccatcgacccagagccaccatggattcctccctagagacagtgcttcttcaagtgaacgagaatctggagagagagtctgttctgcgcgaggtctgtctgtctgttcaatctgttcagtgctttaggccacagagactgatggttccgatccgtccattagcaaatcaaagactcggtcaagctacttgatagacaggttcgaatcgtcctctctctcgtcaataaggtacatgctaccacccaggaaaactgttcgtcctcaaatcaaacttgttgtatatggaggccagcttgttgttcgatcagttgaaaatctaatcttggagactctcatagtgtcgaccctagccgatcaggtcaatcagacgctggtcgagactcaaccgctcctttccggcctcgcccagctcattcctgcccacgagttcttcaagttggtcaacttccgtccggattatatctggctcctcatcctgttcgatgatgcgtctactaacaactagtttgcttattctatacagatggcaatctctgatcacgagacctctgcaatcactcgtgttcgctgccgctcttgcacatttcatcttgcatgaaagattgatcgagatcgatcaggttggacttatcctgggtgtacgtttcgctctcgccataaccttcctattcatctgatagactgatgattcattcgtcaactcactgcggctttcggatttatgaaattatgaatctgaatgtcatagatcgatccatcgtggtcagatagactggccctacttcctgaagaatatctgcatggagttatctctttggtcaatgagctagttcgtatcggtcacagcaacccagtacccttcatgttgtaaagcccttccgttttgattcttacaccaaactctttatttggacaaaatctcgtcgatttattttcatgctctcaagtcccgcttggctgtaaattcggtcacgatgggcaattatgcgtatccgctcaagatttcaacttttgttggtgaattgtttgcaggctaccaactcgtatgtatttaatcgatgttcagattctcactggatatagcacgaaaggtatctatcctactgcgctgacttttgcacgcatgccttccttacgatgcatgttcgtctttaaatatcaaagttgaacctgaagaatgactctctccgaaggagattcgattcgcttaagtatgatttgaagaagatcgaagaggtcgtgtacgtccattgtttcttattctatctgttcgttgggctgtccctcttctgtagagaacaggtattaaccgtcccgtgcttcttcaattcgggctgacaaatcatcagatatgatatctctcttcgaggtttgacaaagaaagctactacaccttctacaacagagttatgatgtagaatctgacaataggatacatgaatggatctagacctttccttgtctttcgagctatgatcaactgcgagtttcttgatcatgaagttgatttcaatattcaactcaaggtatagcatgtttcattcgatacgaactcttctcattcatttcatgctaaatttcaaggactaaggataaccacctgagtgcgcgagcggtaaatcctatggcttgggcagccttttccttttggacgcatatctgggtacgaatgcccaacaaatgagcaggccagccaacatcgcaactactacaggctgcattacgccaaccctatttaatttgatggagaaaacatatgtgaacaagaagaaacgacagtagtgagacgagatgaattgtggataagtagaataaactcacccatactgcagttcgccatcggggatgaaataagagaaaggaaaggaaatcagcttatttattattccagaaaagggccgactacttgaaacaaaaagaacgaagaattcttcattgagcaagataaatcgaaccttagtggatagagcacctgtgatgaaagggaaacaggctgaaccaccttgtccaaaactagcctcaaaaagacattgagatatcggcccaagaaataatcggatgtacttattgatcaagtttactgtgtatgcataaatggccgactgggcaatacatatcgtttctcttcttacctggcaatccaaccgatagcacctccttggcgcgttctaggtatcaatttggtgcatgcggacatgataatgctgttggcatatcgaatccaatatcgtgtaagtcaaggtccaccaaaaatgaaggactgagaggaatgagatatatatagagacttgcacataatgtgggccgatgaacaagccttccaagcacaccgcaattgctcctcctattagagatggtccaaaccaaacggcgaattccagaccgaggatgattgaagtgtacagataaattgcggcctgttcaccaatgcgatctgttatcgacatgaaagccacccgaccaacggtgagaccagcatagtaaccagtagagatataaccagagttgggaccacctgacatgttgatatgaataggcagattgcacatgtgtgtcatcagagacaaacccataagaagcgtcgataagcatcgttcttggcagcatatatgagttcaaagacaaaccatgtcgaactttgatcagatatgtcgtcgtccatccacctatgcgttatgacaagaccattattgagatgaattgggtcagacatgcgcggcaatgggcgattgatgtgatacgtatgtaaaggcttaccaatggtgatttctattccaacatagatgagactgcatatagtaatcaatttttccaaaattcaaaacggtcataggcatctagcaccagagagacgactgtattggaatatagctgactcacgtgaaaatagctaggatatgcacattccttagcctcaaaacatccatcagagtaatctcttttttacgacctccgctcgatctagccggctcgccaacctcctgagctcctgtcgtcgaagggaaagcaacagtatcatctttttcaactttacctccctcattaagtttacccaagagtgatttctctgttcggagtcgaaatacgtatagcaacccagcaagattctagaacgagggtagcgagcgatttcagtagagcagttgacacagtgaggaggagggaactgctgcaaaggcacgtactatcacagcaaccgccacagagcagaggtaaaagtaatgccatttgggaatttgagagaattgggtagataccaatggagatactagcgcgccaatccctgagaatcgcaaccattcatttgagatatcacgaccgaaacaagcagagaagggaagtccgggagactaggacaaaccatacaaggcgtgtaagacagacatcttccacatcatgttcggtagttgggcaataaagttgttacattgggcatcctgaaatccaataccgactccagtgatgtagaacgtgatgcagtagaccgggaaaggaggcgctatggcctgaatggcgtaagcgacgcacggcaaagctgctcctattgtgataacctaaagaagcaggatacgtttgattgttcagtatgcaatagagttgcgcataacaactctctgatgaaacactcatgcgaccgacaaaagtgatttacccagccaaatccgagcttgttggtcaggtagacattcacaagggcggccgataggaagcccaaaaagttgaagacgaaagtgagactgaggatggtgtatgtgatctaggatataagagcgagaaaaaaagtcagcatttgaaagcgccgagagcggacagacagaaaagatttgttagacattatattgttcttgaactcgaagaagcaagggccccatagtagcatcgttccatcctgccacaactaccgttcgaaagtttgaagaagagaaaagccatctcgtatcagcacatcctctcgatggtatgagcaagatcggctcactatgatcctgaaataaacagaagacatacacagaacgaagaacaatgaagcgagcgcagagtgctcctccctttctcccatcttcaagggtcgtctacccttttcgtccagctggatatcctcctctacctgttcgaattcctccatccggcttccatccggtccagaatctaggacctcgaacagaccgacctctcgagaacgcttgtcctgatctttatcgcccccatcgccctgcgatacaaactgttcgacgttcccgttattgctgcttagaacgttcatctggatctcatcagacggtgccatcgaggtatgtatgctgatagaacgacggataaaaaccgaagtcgatcttcattaatatcattatctggccctgatagcttatggcggactgcggatcgcttaagtaatcttttgccggtctagtccgaacccggaccgctggccccgggaaattatcgtcggagatccttaaagtctcaactttgtctatttgtcttgcaggtttttttcctccgttcttcttctctttcgctttattatcattcctcgttcgtctttcatatcttaatcatcatgtcctccggtcgagatatgtccatcgagctcgcagaggctcagagtcatcgacataaccacagcgacgacgacaaggacgtcgactccaataaaattccatcagagaccaacagctaccgtgcaccctcgttctcagtcggtagtttggccaacgttcaactggatggaaagggaaggaggccgttgaatttgggtggatgggaagaacgcgttgcgctgggagtcttgttttggtaccagtgtgagtatgactttggttggatttgatggagaagaggaagaacaccgcaaagcggccatgccgaacgttccgtgatatgatgcagggtttctggatgctaagcatttctttgtatttaattattctctggggctggcggaaacggatctaaacagtcatggctggctggaacgattcgtccatcggtccgctgatcccacggctgcaagagcactatggtatttcttatgtgatcatgtcgctgacattcgtctgcaactttcttgggtaggtcaactctccctcagaaatacgttcttttcttttcttttccgctatggattgatccaaccgacagaaaaaggcttataaaacttctctggtagcttcgttgtcgccgctctggtcaacgtctggctcacgacaaagcttggttttggcaaggtgagatatatatgtgatacgtcacagaacatatcgttctcagcactgacttggtgtatcaacttactatacgccaaggtcatcgtcctaggggcgctcttctccatcgcagcatacgtcattcagtccaccggaccaccattcccgttgttctgcatatcgtacactctcagcggatttggaatgggattacaggtatgtcatggtttacttgaaagcctctaaccggagaagctgacaacgttggttgtgccttttgtagaacgcgcaagctagcacattcatagctcatcttcctagaatgatgctcaaagtatcttttttccacgctgcatatggtaagctcattgtagcgcgggctaatcaacttttttcccttctttttcctagtgctcttgaggcgaggcgagctatgtgattgatggatgtaattgtaattgtaatttcggatgggttgaaatactaggcacaggcgccttggtctctcctttggtgtcgactcagttctccacaattgagcactggaattactactatctagccagtcttggcctctccatcattgtttgtttttttcctatatttgcttgtatgctcattgctgctttcccaattgaccttatctgagagatccgttttttgaccttgtcagaacttttcgttgctcatatcggtcttccgactacgatctgaggaatccttattgggtcttcaccacgagacatcgggagaaggagctgaggaaggtatcatcaacagagaagttactttgcacgacgtactaaagattaagatggtgcatatgtatgcgctcttcacgtacgtacactcaattctcgatctttcgctcctgttgtttctatttattttcgtactaatggcgctacctacggccgatgtaatactcgatagacttatctatgttggaattgaggtcactattggtggctggatcacaacgtacatcaagactatcagaggaggttcgcttcctttttttttcttttggtggataggtccaggcttgttacggaaaccttcgaacttcttacttgaaaatctctattctcacaggtggtgactcctctggctacgtatcaactgttcgcctcctttgcttgtcttatattccctatccttctagtcgatctagtttgaccggaaaacatctatttcgtactcttcataaacactttagggtttcttcctcggcttgacattgggccgggtggtcttcattccattgaacagaaagatcggagagcgactcgtcgtttttatctacattttcctcgcgatcgcacttgaatttgtcatctggtttgtgcccagtttggtgggaggcgccgtcagcgtggcatttgtaggattgttcttgggtccattttatccgtgcgcaggcatgtttgcttcttgacttacccgatgatagtcgtggttggaacgccgagtttgatagtgactaaccccattgcgctcttcttaatggttcatcatccgtggcttgacaactcaagaatcatgattcagtcggtatcgaattcactacccaggaactacttggtcggttcagtcggttggatttcgaggcaagtacagtctgacaatttctcatgtggtcgagccatgtggtgtctgacgaactatgtatggtgatctcaacagctttggacaggctggcagtgcttgtttcccgttcatgacgggcgcgcttgcctctagagtacgtattcttgttttgttttgttcttcttgacattctaaccctgaattttacaatgataaccatctctctgtctttggtgtctttagtatgggtgagttgtatcatctgttttactctcatctgacaaactcgccctcccgttgatccgatccatctgactctcctatcgttctctcatctctccttctgtacaacaacccacagcgttcaagtcatgcagcctgtaatcttagccatgcttggtgggctctctgttttctggttcttgactccgaaagtacccaaacgacgggattaagaagagatgtatatgatgccgttgaatgtaatactactgtatataatatcattgacctaactagaaaaataaaggcgcagcaaatttccaaagattcatgcactcttattttgggggggctccacccgcccggccaatccgactgccttcttttttattcgttctttccccatcaaacaaccactcgtctgttgatctcgtctgctcgctcgcccgcctttcctgaatctcatccactcaaatgacatctcccaacaataccaacatctgtcagttccaggatcgactggctgcgacgctagccaacttaccttcggcacctccgctttcatcctaccaagctagttgcaacaactctggcacctctactccggatgtcaaccatgcgctctcccatgcccatgatcacgctttgggtagccatgcccacgatggaacctggaccccagaggtgagtgcttaaagattttggacttcttgtgttggatcgaggcgagaggtctattaaagtatgtcccggagagacacataaaggagtcattttaaagagtaagaaagaaaagtggtaccgcaaacggctcttcttcttcccaccttctttgcacgcgcgaccgagagagtgttgaattagaagagcattagtatccaccgtccgacgtgaatttgactcgaatgagcacggacggagaacatatcgggttttcttggaacgactttgctttcttcgagcgccatttttccagaaatatcgctgactgtccaaagggggccatctcggccgaagccgtcggcaatctcttattatttctgacatcgctcgtctgaccgttgtttcattttttgttgattcgttttatcctggatcctagcacggacacact

SEQ ID NO: 1429 - DNA, 110355 bp, Xanthophyllomyces dendrorhous
ccggctgctttccacttttttggattcggtcggtcgacgagatggcagcttttttctttctgggttgttcctgtgatggtcgtgtgatacagtattttgttagttcattcaaattgtcaattcagtgcagttgagcaccttcgagattcggacgtaactgatttctcaagatgctgtagtctgaaaagcaatattgatctgaaatgttgtagcccaaaaagaaattgatcttgaagattcccttagaagagagataaagaacaagaaatagagtttatgtatgtatgcgtatgctatgtagaaagatcaagtctacccaggcaagaaaaaagatatatagaaagaagagcaagaagcaagcaaccaacaggcgaactgagatgactgtacagaaagaagggtcgactacatcttccagactttgttgtccgagagatcctccaacgatttggcatcgacctcacccttttcatttcgtctggcgagaagttgatcccaccagccaaacaggaagtctcgggcaatcaatttgaaccaaggggtaaatgagttagactcgtcctcaaacatcgcctggagctcgggcttggtgacatatcgagtgtcagagacttcgttagggtttccagtgtgttctgtaggtgtggttgagaagagaatgtagtcgactacagattcccagagagttccaaaggagcatgcgcgacaaaagcatatattttagtcgggccaaccgagagaaactatttattatcatcgtaaaagaaaaagaaggcccacttactctcgtgttctccccagagtccgtcactcggagcgaggtaatgtatcctagtgaggtaggtgaacgagtcgggcggagtcgacgatgtaggcacgccaagctcgtgctccaactttcgggacgcagctcgtcgaacaccttaccgattaagattggacataccaccaggtaagaggaaggataagaggagaaaatgaaggaaagaaaaggccatatagtgtaagcaggatatatgcacccaatctgtcttgataccaggaaagtctgggacaaaccgatctggttctcctcttcaacctcgcccttgatgctcaaaggatgactgcaacacgtgttggtccacattccagggaacgtaatcttctcgtccgctcttcgctgaagcaggagtgctccgtccgatgggcggaagagaaacacggagaatgctcggtggaggaggtccttgggcgcgttgatgttggacatcaagtggcctggttacatagcacggatatgttccagacgtatatgtatgtacatcgaaacgacgcagaaggaatcaaagccaattagtggattggctcaggttgttcacggtgtccggtaccatagaagtgaaactgggttcggagaaagggcgacagcacgtacaggtctttttcgaagcctctccataggccacatcgtccgggttaacaagaatacatcgctcctccatcagcctgaccctatgtggggtgaagagtgagaggagcattggttcagcaagcatgatcaaagtaagacctagcacccgacagtcggatttgtagccgaagcatcttgtctcatagaacagctatagaagaaatacgtactgctcctcatcgtactcttctaaactgagtccttcggttcggacctcggcggggggaacaatgttgggcatggacatctagaatatatttcttctgccttctttcttttcggttgactcagaacttgttctggaaggaggaaagtgatatatgcgagatgtggggtatgagtaaacgagtcttcaacggcctgccgaagaggtcgaggaaagagaagcaggtaaagggagaaggagtacagagggaaagagaaagaaagaaaaagcgaaaaacactggcggtcgtgtttaccgacgacgagagaaaagaatgggacgatcgaccaaaagatactacaaatgcgcagtcgactgaatacaaatgtgagtactcaatcctgtagtcgattcgcctgtcacgtatgactacaaaacagtgtatatgccaaactacgaatcgcttggaattaataaactgaatacggaaatatatcggcacaaatgactacaaaagaatacaaatatactacagactgtcagaaaagatgaccatctcttcccatacttttttacgccatctctcctctttcgcagctcggcttctttgactctcctcttcattgttcgtcccttcagtcacctacacctcgtcttctttcttctcttctcatcccaaccacctttcaatcatcgttcagttcgtctttcgccatgtcttggaaactgggaaaaagtatgtgttgtgctcttctgttttcgaaccgttctctcacatctctccctccgttgggtttctctgtcaattcggcctctgtttcagtttgttttcttgtcaacccccccgggacgatcttgactgacgattctaattccaacatgtctccttcattcttcacttccatatagagctcaaagaagtcaatccactgttctcgtcctcctctcggtcaaactcaaccgtgccctcgccggctgacatctctagatccaccacgcctacccctggaaacccacaagggcaccccaaagaggccgtgcccgttggtagcaatggtggagacacgaagccagtcgccaagactggattgctcaagatcactgttaacgccgccaagtcgttgagcttgcctagtggaggtacgtcctctcaataccttccatcagggtttagctctggtcaagagagaagagcgaacaagaacgtgccctgagcagaggcttccctggctttacagccaactatgctgacacagtcatctcttctattcatctgattctcttgacacagtcgatcttcctcctccgatattatctgccctgaagtcacacccttcctcagtgtcatcctcgtttggatctcttccgaaaaagtccaatagggactctgtccagagaaagcagtgctggtggctgccctatgtcgtgttagagttcgataagaatgaagtattgattgaggcgcttggaggagagtggaacggacccgtttggagatacaccgcaacattgtgagtatcttttctggaatcgacgatctgaatcattggatgactgaatcacgtatcgatctcgcttagcgatgtatcccgagcatcagagatctctatccagacctacctccgatcaagcccgccttcgtcatcggacgaatctggaatgggtaactcagatatcttcctaggcggtgtcaagtttatgcccgattttaccgttcgtttctgctctgtccaatgttttgtctatctccgcttgtcaatttaactcttttttctttttgtgataacactcacaggataagccccatagcgacgaatggcacgccgtcacgggtggaaccggtgatattaacattcaggtcggcttcaagccacagacgaataacgactcgctcacgatcgactcgttcgaactgctcaaagtgatcggtaagggttcatttggaaaggtgatgcaggtccgtaaacgagacacccttcgaatctacgctctcaaaacgatccgaaaggcgcacatcgtgtcccggtcggaagtcatccacacgctcgccgagcgaacggttcttgctcaggtgaacaacccgttcatcgtgcccctcaagttttcattccaatcgaccgaaaagctctacatcgtcctcgcctttgtcaatggaggagagttgttccaccatctgcagagagaaggaaagtttaacgaggttcgaagtcgattctatgcggccgagttgttgatcgcgctcgagcatcttcacgggtttaatgtggtctatcggtacgttagaatcccctcttgtttcctcatgtcatgtcatgtcatgacgttcgctcgctaatctgttcgagtcgcgttcctgtgagaaatttacagggatcttaaacccgagaacatcttgcttgattacacaggccatattgctttgtgcgatttcgggctttgcaagctcaatatgactgaatctgagaccacaaacagtgcgtctttctcataaaccttctcaatcgcttcctcagcagacttctaattcggggtttctaccacatgcgctgattttgaaccaacagccttctgcggaacaccagagtacttagctccggagctgttgtccggacacgggtacaccaaatcagttgactggtggacgttaggtgtgcttctctacgagatggttcgtctttctagcatcttcttcgtcagctcttggatggaacagctgttgaattcgactcaatgttatcttgccgatctccatcatcaccacaacccaatagctcacgggtcttcctccgttctacgatgagaacacgaacgagatgtatcgcaagatccttcaggagcctcttcggttcccggaagaagttcattccgaggctcggtcgctccttgttggcctgttaaaccgagacccagctcatcgactaggatgcaatggggctcaggacatcaagaaccatccattctttgccaggcacatcgactggaagaaacttgtggaaaagaaaattcaaccgcctttcaaacccgctgtggtaagtcgttttacagttccgtcattttgcagagtaattcgatcggttgccaactcgtttctttttatcctccacccctgcttgtgtccacctcttctttatcatccgttcgacaaacgaacaaacaggccagcgcaatcgacacatctaactttgacgaggagtttacctcggaacttccaatggactctgttgtagacgactcgcatctatcagagaccgttcaggctcagttccacggattcagttggtcggcctcgaatttcgataaccacaactgagaaaccgaggacgaaagctgaacctctcaggggcaggatagatccggggggtctagttttctagtcaacttcctcgattcacttttcttagcttggctctttgattcgagtacgtctctgttctctctcttgtgtgtgcaaaacaaggcaaatatcaaagtcctgactgagcgctctattatattgactgtactagaactcttgcataaatcctctactctctcgccttctcttcattatccatccctctagattcgctcatttctcttaaacggagaaaggaaatgaaattaaaagtaaaaacgaaaacacaggctctcttatggtctaaactattcgactctttgccctgatttttctttctcctatacaaccaaacctcccttctttgtcgtttctttctgttttcccctcttcgcgtcacggtgtactgcgatcattttcttcttcttttcgttcctctctctttcttactgaatgtatcatcatattcctttcatcccttcctcatcaccctccttcttagcctcagccacatccgcgttcttgacgtctcgcacgtgtcctttgttctacattctatatcttttccttctctcctttctcagctgttgttctcttgtggttcatctctatggtccttgttctttcccatcccctccgcccttcattcaaagatcccgtggcctgcttctctctttgttatcattgctgctgttgctgctgctttttttcccgtcttctccggatctagacttctaaatcctttccgtttctctttcaaccgatttccaacccaatcctcctctttttttattccttctcttaaacaaacatatcctgttcatgccttccttctctgggtttacaaatcccgtcgtgtgtttctgttgcagagatcgacttgtaagaagatcttgagaaaaccagtgtcatcaatgggaaaaaaacagaatagagggagcgaaattctccgcctgagagaaccaaagttgtgagagcacgtccagaagatagggaggtgaatgaagaacgagtatatatatccaagtctactaggccaggaagaaataagggggaactggtgtgagatattcaagagggaaggaaaagaaaggttggaggagaaaggaacgaatggaaagtgagagaaaagctagggaatacattggttgtggtttataagggaatggatgaggaaaaaaggtattaaagaaggaaataaatcgaaaagtgaatattaagaggggtcgtgatgcggaaggaagaacaaagaggaaagaaacaaatgtagaactgggattttgaatcgtgaataaatttgagatagtaagaagcatggagaatgataatctggaaacagcccaaagacgaagagaccaagaaacattgagggaagaataagaaggacacatggaggcggtgtcaagttttgaaacaaggagatatttagatgcgattgtctatccgaaacgaaagagacaggggagggcaaaagagaaaagaaaaggtaggaagagtgataaacaagaacgcaaggaagggagaaaaacgaagaaaaatagacaaaggaacaaaaggcctaagctctcagaacgttccatcaacataagcagtctcaattggacgcaatggacgaatcaagtacgagagcttaggcctgcttcctaatctacttctttgtctgcatccccgtcttcggttcatcttcatcatcccgaccatcctcgtcttctatccttggcatcccttccacagtcgaatcgtagaccgctcatcgcccataacgtctcctccgtctatatactcgataacatccagcagttatcctacctagaaaagcccctcgtctccctcctcgacgttggggtcaagatgatgcgccacgaataaaggaagaaggtttccgaaagaatatgaatgaggaaacggaaccatggggagggaaacaagaatatcttcaaggtatgataaagaggataaaaatcccgagtcttgatctaagatcttcgatgatcaaaataaatttagaaataagaatggataaacaaacattgttggttaatccaagccgaaaagatgacgaagcttacctgatttctcatcctgaaagaaaaataatacgagcaaaacaaaaatatgccaacaccaccgttctaaacccattgacagacgcttttcaacacggaccaatctatgtcttcgcctaacaagccgcagccgtcctgcctgctccgaagccgatcgtgccaaatgagggattcatctcgtccctcttgactaaccaagcggtgcccgaactcgagcccgagcccgagctcggcccagaaggagtcatcgagggtgaggtgggaccagtcgagtccgaagcaatccgttgccattccgggagcgtaagcaacgggtttgagtgcgtcctgcccaaccgaggctgcgggctcttggatgccggtctgctccatgggccactggacggtccggccaagggtgtcacttggccgatagctaatagagactgagggacaagatgataccgggcggacggacgaacaatctctagcttggtgttggtggacaggccagaaggaaccttgctcgttgcagggggcagcatagcttgtcctccttcgtttggcagaccggggatgaccgtgccctggagaactttggccaggaaccgggatcctctgcctaggccggatcgatgagctgacgttcgaagtcgactcatgttcaactccttggtcgatccactggaagaacttttggatcgaaccatcgggctcgcaggccggtggggctgttgtactggttgggatgccggagatccgggagtactgatgttcagcgtgatggatgggagtcgcttgagtgacggcgggagtcgacgagtggagaatgagttgagcgtcgtgatcgatgatctcggtggaggcaggatcaaaggagacgggggcattgaaggcgaggaagtcgggcaagacggcgaggtcgtcatcgatgggggaagggagattggggagattggcgaaccaggtctcaaacaaggtgttgtcttggcagaccttgtcttggtcgtcggcccagagagggaagacggcagggcaagaggagtgacaacttgggaggacggaagggaagaaggaacaatcgattcgagtgtggaaacccgctgctgggaatgccaccgtgctgatggcgtgtttccgatcgatgattgttcttccattgacgaccctccggtttccatccccttgcctaatcgtccgggcagagagtgtgtgacagtagaccgcgttcgaccggccagacaggtatccaatcctagagcagacgaaggaagcgaagccggagtactgatcgtagccgttgtcgaagaagatgggcaagcaaagtcgtctgaggcaaaggacataggtgagagatcaagaaagtcattatcgtcgaccgaagagaaggaatctcgctgacgagagagtgaagtagaaacagagaccgatgcattctgagaggacgttgaactgataggttcgatgatgggcgttccttgtgatggcggaaggtttaggaacgaggcgtaatcaggagaaagaggcctggtcggatcgagggcctctgaggacagagtcgggaagagagcgaaagcctgagaaggcgatgctgatggagagagcgacaggaacgatcgggaccgattgtccggagaaccacctggagaggacatggtcgccaatggaaaagaggagtcgaaaggggacgacggaggggagaatgaaaagtctgaaagggcaggagcagctgatgctggcggttgagaaacttgatcattgacgagctcctcctccttggaggtcaaagacacggagaaatcggcagctgaagtgccctgatcccggacaagctcaggtccgtcccaggaaaagtccaagatagggaattgatccttgtccttgttggacttgtcaacggcggaaacaggtccggcggcgggaggattccattgaagagctgaagcctgaactcctcctctctccaaaaatccgacgaggcccctgatgagaccctcgagtttgactactctagttcgaagctcaagattatcgttttcaagttcttgccgaagaagaagagagtcaggtgtaggcctagaggtagtagtgctgactgaagtaacgaccagtggggaggccgactcggaagaaagactagaagaagtcgatggctgaggggcggatttgacaggaacagaagatcccggaagggacgacgcagccaaaagggcttcgagttcttgaacccgctcttccaaagcagactgatggtttttcttggcgtcccgacttcgttgggctgaggctcgattacctgagtgatttttgacaaagagaagaaaggaaagactgatgagaaatatgcacttgagatgcttggatgacagcgatatggtcaaaagaaaggagactagatacttacgaagcactctagctcttcgtctcgattcgctcctgtaggtagaagaaaatcgagaagggacgacaatgcatcatatcagcatgccatttcgtcaacatacgcatgcccacacgactaggggacgatagaaacagctgaggtagaagaaaaaagacgacagaaggaagaaagagaaaaaataacaacttacacgctgatgccgggctcattgacttcaccaggtcctgttcccgatccgatcctttctccaggcccaccacctgccctaccagagccaatggtaagctcatcatcgtctcctccatagtcgctacccccgttcaaggaggaaggactgggtgaggactgtttgcgcttcttgtgtccgttagcgatagactcggtgtctacagaactgacagtcgaggcagaggcggatgcgacaggaacagaaggtacaatcgctgtcggattagaggctgaaggcacggtcgaaggagtagtgtgctttgtgggagcgaaagcagcagtgtttatgtgaacagacttgggaacggactgaacgactgttgacattcagtgtgtatgtgcgtgtgtgtgtacttgtgcttgtgtttgtgtgtatgagtatgtatgagtatgtatgagtatgtatatgttcgagggtgttggtctgtagatggtaggaacaagacaaacaaggaaaggacgcaggatggggaagagaaaagagactggaaacctcgatggggagaatgaaaaggataaatgacagcagaggccgatcgagggtcgtccgcttaatcaacactctcggcctgctctcactacgttgagtgtttacgacaatggttacagaatttactacttccagcgtggaagtctttgtggctgtgatgtgatttgatttaaaaaacgttctggtactttctatattcttttcatctcttacttgcatttggttgcttatttgacacgtctcgacatatatacatgcactgcatgtacattctcaatccaggtctctctttcacttcagaaactcaaaacaacctctcaatacagatccagcacgcacggcgtgaggtttcgtctaccgtttcctttacaaaccatatgatagttggggaaactaaaccgagcggaggacggcactcagcgagaaaaatgagacacaaaagagcaggacgagcaaggggggataacaaagaagcaaagacaaccagtgttcgagacgtttaatcctttgaagggaaagaggatgaacggaaagggcggtcaaagccggcatacgcagataacgaaaacacatttttgtcagtttgcgtgctctcggtctgttctattcaattcagatttgagaaaacatatgaaactcacggccttggtgacgtccttgtaggaaagagcgaactcctctccaagggcggaaacaacagtgacaacgagctccttaccagcctcgaagaggtcggtgatctccttaccaaggtttccctcgggaaccttgacatcatccttggaagctccctcatcgttcatcaagttgaggaaaccgtcgtcaatgttgacgagctggaactcgactcgggtgacgactgggtgtaaagagggagaaacggcgtgacggttagctaacaatgatccaatttcggaacgaaaagcgaaagaaacttactgggagactccatgttgtgggtggagggggagatatcctcaagcttcttgttggtgaagatctaaagagatgaggaacgaaaccacctatcagtatcgaaccaaatcacaggtcagctcacgagaatagacgtatgggcttacatcggtggcaatgagatgaactgataggaattgatatcagatgaaaagaaggaaagatgagggttttgttctttccgatcattcataaacgcaagcctggcttacccttggcgtgtccgtgctattggtgccgagaaaagacgagtaggcgagagttgtcggatgggatgcaagattaccatgataaggaacaaaagattgacctggtcagtaagccaattctgttctgagcgatgacggcccgaaggcctacttaacgaggttaaaagctaacctttccggtctgaatgaaacaaagaatgcaatgaaagatatcagtcagtctgcgtcaagcctcaaatcgatagggaagaaagcgtaccttggaagtggacatgtcaatgatcttgcagggtcgtcccttgatgacgacgtgtcctcccttcctgagggcggagcactaaacaagatgaatagtagagaattctgtctaagctttttgatcctctcggtttttcttgtactgagttcaaggcgaaaaagaaagaagctggtcgcagctagaaagagaaaaaggactgacctggatggggtaggtgagggaagctccggcggatcctccaacgaagtcgtgatcgtgctcagtgtcggacatttttactggaaaggaggggcaagcggggaacgtaacggcaagtaggtatgagagttgagggaaggaaaaaagaaggcttctgattagtatcaggtagtggaaaaaacttcctaggcaatcctaggcaaaagcttgatgaattcccccttcgttccgcaacatccgccattctcgttcaatcttccccagttaacggcaaaatagaaatgcccggtgaaactattgactgggaggacgaactgatggagaggcgagagaaagggggcctattgagaaacgttgggacctacagagttaaaaagagagaaggggaatggtctaagaaacttcaaaggattcaaagggcgagaagaaggaaaaaaaaagaaaaaaagaaaagaaaagaaaaactagagaaaaaatgaggggtccaagcgaaacgtgacacatgtaacggaaacacgtgactattcacgtgatcagacgcccgctgctcgctccatccgtcggataccgagatatattgacaaaaggcgtaaaaaatatagtgatcttctctttctcgggggcacatcaccgaacatcatgctatagacttcatttgttcgataccactatgcctcgaaacggaaagactccctgctagagcaacgtgctcattttcgtctgcattatagctacgggcaaggaggatacattcttcatatagacagaggagaagagatcagagatggcacagactgaagtctcaaatagttgacctaatggtcaaattagaaggtctgtaatactttatgtatatatgtataggtacatgcattgattacgttgagcaaatattcggattatgccgctccaatcttttggtctaatacgctctattcaagtcgatcaatcaaatttaaatcttgagcattcctcgtgcgatattatcaaggatcaaaagctgtacacattttttgagaacttgcggtttccatacttcttatccggtataccgctcgacacaaacacacacatatacttcttatacaagaatacatacaacatgcccaaaagagaccaaattgatttctcatacaagcaggaacccctcggagcgcctcggcatcgaaagcgggatgctaaaccaaaaaaggagagattaggtgcggtgagcgtcttgagagaacgttctcctgctcccaaaaattggggctagttctctggtctctggaagtctttgaatactgactacattttttcgtctggttctttctctgaatttctctctgtaattgtctcttgctcgtgaaataccacatccgtatcacactcgctactcccatgcccacagtcaagcaggaacgagtgttgaacgcgcctaccggacgacaggcagtctctgctgagcctaacggtccgagctcccgaaatgttcatatcgatccgaaaccatacctgacgatcctttccttcctcggctcgctttctgcctctacgatcagctcggaaaagtaccagactaatttacaagccgtcaagggcgcattgttcgatagagactacgaccgggcgttcggcagtcggtccaagccggattggctctgggcgtatgttgctcgatgggtccctgggcgagcgctcggctaccgagctatgctaggtgatctggatgagtacgaaggaggctgcgccgtcaaggctgttggcaaactttttgagccacttgagggagaacagaggtttgctgttacaaaggttgagagtgagcaggaggagcaggacgacgaagaggagggagatgatagcgagaacgacagtgacgtggacgaagggttggaggacgcggtagccacgttggatctatcgagtcctccttccgattcgaacggcaatgagccggttcccgaggtgatcccgacccgaacgatcaacgttctctgctacggttccgggcccggatcggagatcatcgctttggcagctaccacccgtgaacggggcacgcctgccaaggttcacgtccaggcagtcgactctggaaactggggtccgattctgtctcagatgtcatccggaatcgagaccgagtggaaccttccgaaaagtcggttcgaggtagactttattcaacacgacatcctcaagccggcggatgctactcggatcgacatcccccgagcgaatttaatcactcttctctacactactcacgagctattgacggcttccaggtcgacgaccatcgcctttttgtccaacctgacggcacaggcccaaccggggacgttgctgatgatcgttgagtcggccggctcgttctctgccatgccggtaggcaaatctgagaagacgttcccgttggagttcttactggacctcgttctggccggtggaaaggatgctggaccgggctcgagaggcgagtgggaagtcgtcaagaagagtgagagtcgatggttcagggtgccagatggagtaggcaagggttaccccgtcaagttggaaaacatgaggtacggttgatgttattttgctcaaatcctgtccttttcttcttttcttccgtgaccgatagctaacaacgatatcactctctcaatttcttatagacatatgctccgagtgtaccgacgtcgtgcacctgtagctgtttgagtgaaaacacgttgtctcttttgctggctggcttacttgctagctagctatctatcatacgattatgaaatgtcaacttatagaattccttcctgtttagggttacaattgacgcagagcgactactaagcgccagaaaagatttgcaaatcagacgattcccagtcagtgctgacgccagagttgtgcgcacctgttaatccgaatagatgataagcctctcagagtatataaacctcaagagaaagaagagaaaggaaggaaaggaaaactgttctgagaacacatacacacacatacatgcacgacatggatcttctcttcaactcatcaatgttgattgacctcctgctctgatgctctgatgctctgctctctgttttcttacataagctgaatggcaccatacgtcgcccgttgccaatattcttcttctcttatttgtcttgttctctctggttcaatacttgagctgaacgtgtgcgcttgcctcgttgccttgcttggattgtgtaacatactgttagagttgtattcgagggcttactcagacttgctggattgtattcatcgagctttctggctgactgacatttggctcgtctccccttggctttaaaattttcccctctgaaattccctcaggcttttccttctcccttcttgttgtgtccaccctctgacttgcattcaaatttcttccccttgaaccgtcacaaccaacaacacctgaagcacaaccactcacccatccacatttacttttcgccatggatactaccaacttttctaacggagtgctcgattctgcccttgatgccgtcggacagacccctcttatcatgctcaacaacctaaagaaggatcaggaactcaagtgcaacctcagtatgttttcatttcttccttgtcgacctgatccttttctccttcatccgctccttatacttctttcccttcgttttgccacacttgtcatgtgtggtcagctccactgactcaactaaaacgttctatcaaattcacacagttgctaaagccgaattcttttccgccggaggctctaccaaggatcgaatcgccagagccatggtccttcgtgccgaacaagaaggtcggctgatccctggaaaatcgatcgtcatcgagccgacgtctggaaacactggaattggtttggccatggcttgtgccatccgaggctacaaatgcgtacgttggctcttgtttggttcctctttcagttctctgttctaatcgccacctgttccttaataatttgtacttgattccgggctcctaccgatcacagatcatcacccttcctgaaaaaatgtctctcgagaaggagatgacgcttcgagcaatgggagccgagatcgttagaacacctactgagaagggctcattcgaggaggggtctcacatcatgcttgctcgattgctcgagcagcaactgccgcacggagttatcctcgatcagtactcgaacccatcgaacccgtcagctcatttcaacacgacctacccagagatcgttcactcgctcgccacctcaaatttgcccaacaagaagctctcggtcattgttgccggcagcggaaccggaggaacgatcactggtatcgctaccgccatgagaaacgccgccggagggttggacgatgagagcacgaacgcccgatgggccgagggagagttcggtgtcgtggttggtattgacccgatcggaagtatcttagccaccaatggagagggtgacgtcggaggatacgaagttgtaagcaacttctgtgtgtgctcatgtcgtggtccctgggctgatttttcacctggctcgcaccattcttccgattcttaggagggtattggttacgatttcatcccagcaagtccccttttcatcgctgtcacctttcttgtctcgttcttttgcagagggctaacttcggaataattggtattaggaaggttggctcagtttttcttaatttaaggaattcgaacccaatagagatacacctgaatgtcgactttcgcttaagagaatcatgcctagaacgcaatgaatctcttgctccagcctgtcgttgccctaacccttttcttcacaacgagatgtactcaattttggcttttcattctcttattcacagtcttgaagcctgggcagggcttgatccaccactggatgcggtccatcgatggaccgagtttcgctatggctaagcgagttcatcgattggaaggtaaagacctgttcattatgtgtcggtgaaagagggacgccaagcgcttacattgattggcttcattctctcttttcttaggactcctcgttggaggatcatccggaacggccatctactctgcgatcgactggctcaaggatacccggccgtacccccaggggggttgggagcgatttggttctaacgagaacgcgaacgtcgtcgttctttgcgctgacggaatcagaaactacatgggcaagccttggttcttggcccaggatccggaaccgaccgatctgttgaaggaaatcgaacacatcatcggtcgaccggcaggaaagccggtaaagaccgttgttcaggaggccgctactgaggccatcaactcaggtttggccacccctccgacaacggaataaaatgttctcttcctctttcttaactagactctcttcttgcatatttcactaccacacgcttgttcataatcttgggatgtcgccattatttatccctagcccccaatcctatctatacagtcatatgcttcgcttctactcaactcacagatattcaacatggccttatcgtcttatcctgcttgggcctctcctgtttcctctcttttcatactctgagtctgggagagatgtttcctggtgaaacatgaacagaagtacattcaccgcttcatgacgaagggaaagacgagtgataaaaaaacatgaatacataaagagaatatgaatgaaacacaagatatcacctagaaccaagaaaggaggatgcatcgagattaagccgaaatgaatatccatatagtcggggacgcgtaaacgtacattacagaccacgcactctcatgattcaattgactgcaaagctcgacgctcggattttcccttctacaacggaaactgtcacgctgttcagtccagcccagcccaaaccacagtgccacacagcatcccccaatcaatcaagaaaaagcgcgcacataatcagacatcttctctcaataactgaaactccaaagagaaagaaagaagatagggggcaagataggaaagagagtgatagagagaaaagaatagagaactaagacgaacgtcagatccttcccgttcataaattcctctcttatgttttccccaatctttccgtcaggcagcgggatatccgatctcgagttcctatccgcatctgtaagcgtcaacattctggatttccggcgccatccagatcggcgcgggaagattggattcagtttgctaaactactcggaataagagctggagtcgggaagcaagtccgaggttaaagaagactaggggaggaacgagaacgcactggttgggtgatatgtccagaagagtataagcctggatcgtttgatcaaccggatcgatgagacaagacagaatgagcttcactgtttctactcatgagttttctcccgacggatgttgaatcccctcgggagaggagcaacggacgaccgaaggatataatggacagataagataataaggattaaagagggaagcggaaggatgcttactttatcaggcatcgtgaatgactcttgcgcacgatttggttcggtcgactatcgaatggttcagtccagatgtggttcaaggaaaagagcgatgaagaggaagaagaaactaggcacacccaggctgatatatatccatccttggatccatgtctatcggggcgtctcagatttctccaaatagaacgaggttgggcgcagagagtcggtaggtatacggacgaacggacgcgacgtcatcccgcaccggttgagacctcaaccgtcgaaggctatttttctccgtttctctccatcccgcgcacatactcaacttttcagtcctctgttgcccactcctacctctctctttttctatttaactgactctttttatttctctcatgggaaagctcatccgccggagctggatccgtggtaatcagatgaaactgcgcggaacgccttatatagggatagagaatcggacatgattgaatcaatcaacagatctgtgccgtggtcaggcaggcagccgagaaaatatagctgcttcttccctcgatcacaagcggttgtggcagtccatatgacactcctgcaactgatgcccagtttaacaccacactttctcacatccacgcccacatccatttccacacatgcgcacgcacactcgcatacccgcgtacaccctttctctccctagatgtgaacttaagacgaaggctttttctgggataaaagatcatttacgtctcacgaggaagacctttgctacattaagatctacttgaggaaacagtaaaatgaacgaacccgtcgagatagacgggaaagaggggaggaggggggaatgaagtatctatctggtgcgccatagcatgcgcaaacgaggaaccacttaagcgtacaagagaacgacagtgagaaaagatctttttgtgtggtgttgggacggatgagtctatattagagggatttgaaagaagcggaaatcttgaagggaataagcaaaacggcgagaaagaaggaaaacagaacgagcagtgagcagaaaagatgggaaattgctgagtagagaaagaaaggttaacaaacaaagggaatatttggaaaacgatgacacaaatggaagagggagaaaaaacaaagaaaggaacgaaggacatcaaacaaacgtcccccaggcgcccaaagccgctccaaacaccccaaagacgatcaacgaccagtcaaaccaaccttccacactccaatttactcgcttcctagcctcctccagtcggattcgactttcctccgacaactcacccggagcggacgatactaaagaagaaaccgaggtggtcatcgaggtcggttcggctggtacatgatcatacaagtaaaccttcttggcggcaagagggatgatgaccgagacaaggaatgcaggggccgaacccatgaatgccaagaggagctcgaatgaaggaaatgtaactgtgaaaagcaatgattgaaagaaagaagagcgcatgataagaacattgttccgcttcggtaatgaaaatccgtagatttaagttaatgacaactgactagagatgataacgatactgattacaagagaaatcttgctaattcctcgaatccatgccttcctgatctctgcccttcgccaggctttgacctgagtgacaatgtcctcctcctgagcctctgcctcagcgttgataacggtctcatcatcatctccggtagagccggctgcaacgctcgcataagacttttgaagagtgggcgagggaggtcgagtcgaactaggagtctgctgagcagagagcgcagggtttggctttggcatgatgttgaacgcgatttcaaccatatcgttaagctatagtggggtttcaaaacaaaccctaatcagtatttctttaaaacagaacagaaaacagaaaacagaacactcaccattttcataccaatcgggacctagatgtaagcacagagtcacgttagtttgcggcttgtatgcttgagtatagtggcgaggttgacttgccttagtcaaagggtttatagccacactatagagtgccatcgtgctaatcaatgaagagaatccagggatcttggaaatatccagactgatctgaacgaggaggatccaagacaaaccgatcagcaaaagaacgttatggactcacgtcaaaaagatggcgaatcagacttacttcgtcgctgacgtcccttccgaacatcaaatatccagccgagccaattcccaagcagacagacaatgcgaccgcgtaactcaagtcaaccaactttctccacttcgtagtgtctttcatgtcagaaacaataacaggacaagccgcgtgaccaccctatcgagacgcgccgaaagaagttgcgtcaggatccaagagacgtgtttatcattgttaccaatgatttaaaaaggaagagggggacacagaagaacgaacataagcactcatcatcagcccacccgcgacaccgactttagcaagtccccaagccggccaaatatccgtcggctccgggtgaagaatcgatccaggcgagctagtagccatgaaaccatttagaagcactatggcgatcaatatgaatgacgtagtgatcccgaggaaggaggtataactcaagaagtggagcggcatgaacgatagaggtgcaatgatgaagaatgaaacgattttccactcagtcgacgagaagaacgggagaagggcggatagcgtgtcggagtaaaggatcacaagcgcgatggtccaggcaaagatttcgaacacaaacaacccggtgagccagggtcggacgttgaatcgtttatcaaacgctttgccaacgatgtctgggtatgtgtacacggtagggtcgtctaacgtgaactgaaccatgacgagaagcgttcggtgagtgataaaggcgaggaggatgagaagaatcggaccgagaacccatccacagtaagctgagagaaagttgagcgagggtgtgagtcatgagtgagtgagggagcgattgttgatgatttgcttgtctctgtttgaaacacataaaggacttaccgatagccaatggagaggctaacaaacccgtgccaacaagatctccgataacattgaagagctggatgggagcggagaagaacacgaatgacaatgttcttgtaaatcaggtattctaaaagcgacgatacagttggatttcagtgtactaacagcttgtagaaatgtgctctttccaccgtgggtttcgccaagacctaaggcaagcacctcgaggtcctctctagctctcaagtcgaatgcggactcgtccgcgtgcgcatttggctgagaatgtttcttattggatctagcgtggacggtagtagcgttctggttttgaagaaggggtgtggtctccaacgattgagaaggcatcttttaggacgaacgagattgataggtgggaaaagcgaggggataaccgaagagatagagggggttttttacacaagaaagagaaccggaaaaaccgtctgtttaatcttctcctgttttctcttctctctttcgttccgttttctatgtttccttctcaatatgtctacaagcgaggagacagaataattggatggagagtaggtcagagaaagaagaagagagtcgttgaaggtcggctgtctataattttttctgattgggctggaatgaaacaaccggccagttcgggaaatccaaattggcagattagttacgttgaacatcaccatcacagctttgatccggattctcggtcggtgtgtttgtggggacaacagcgttaggttagacatatagtcgaatatgtagacgccacgatacacctgccacgtgctttggttacaaccatttttttggttgccctccacactcgactatcatcaacgaggaatcctatacctgaaacttttaactcattcatacacgcacactcgtatcctatcaaacaactatgccaaagatgggaaggaacagttcgtatctgtttatatcctatttattagctatttaatcacagctgttatcaaagacaaggagaggatctgacatacctacgcatgcacactctcaacagaagtcaatgctcttcctacacccggagctagttcgtgaactgatttttgagacttcctggtttacgccgtgttcatgagaatactcctcctggtagctaaccacatgattcgactgataaataactacttctagaaaagagaaaggatccgggagtacccaagtttgcccaggcggctgctcgaaaggagcagctcaaagttcagagcaaggccatagagaagcaagtccatcgagaccgagcggctgctgtgcgtgactctcatctcggtctcaccctctgactctgaagagtagtgcagagataacttactgagtgttttttcctgtttgttttactttgcagagaaaacctcaaacgttcgccagcatggggtcaacctcgacattgaagtatgatccagacgctccttctggttcaggcctcaatggattcaccgacgatattcagacggctgattatcctgaggttagcgaacctgtttcttcatcttcttgggcaacaggtcactgatacaattgctgatcgattgtcatcatcaaacgtatatgaactcgtcttgttcttagcttgatccagggatcatgctgaaggattcgagtgcaaaggcttttatgaaccatcttcgaaaagttattgatcaaagtgatgtgatcattcaggtctgttcttcttctcttttgcgctcttaagagctcacgagcccgaggttgtatctgatattttcctttttcttcatatatctatctacctatcaggtgttggatgcaagagacccgttaggtggaaggagtaaatacgtcgaggatgaggtgagacgtcgggaaggagacggcaagcgtttgattgcggtgatgaacaagattggtacgttcatgctattgttctctcgaggaggacaactagacatatataccgactagggatttcttttttctctttatcgaatcatcagacttggtacctcgtccagcggtcgagcaatggcttcgataccttcgacacgatttccctactttacccttcaagtcatcaacccaatctcaaaggaatcatatctcttccctccatctgccgacatcatcctcatcggcgtcccactcgcaaaatcagactggcggaaggacagacgactcgaatttaacgactccggtgaccgctctggcgctcggttcggctccgttgattcaacttttgaaagggtacgcccgacatctaccgacgggtcagtcgttgaccgtcggcgtggtcggattcccgaatgtgggaaaatcttcgttgatcaattcgttgaagaggagcaaggcctgtggtgtcgcggctacgccaggaaagacgagggttgtccaagaggttgcgcttgacaagtcgctcaagatcttggattgcccaggtatcgtttttgacccggctggctcggttgaagggttggatgagcacgagcgaaggaaaaagagaggagaggttattttgaggaattgtgtcaaaccagagttggtcgaggatccgatttctcctagtaagttttcgatttttactttcaaatcttattctccttctctcattcctttgcgtggtctctgattgatcaaccatgtcatcttcatcaaacgttcatctcacagtggacatcatcatcagcaaggttgaacgttatcaactcgaaaaactctacgggattccaccgtttgagacgacgactcagttcctggtgtccatcgcgttggtccgaggtcggctaggtaaaggaggtgtgcctgacttagaatcttctgccgtccaggttctcagagattggaactctggaaagattgcgtatcatacagtccctcctgcggttcatcattcttcgattcttcgaacaacgaagaatcccaatgtgcctgttggtgatattggtgatggcgtcaatgataacaccatgtcggaaacgaccaacggcggactcggatcaactttggggtcaggaataggtacccagacgggagatgccgccatcgttcgttcgtttgctcctgcgttcgatctggccggtttgatgggtgccgccgatagagaagtgttcgaggaagaacctatgacggaggaccctatggatgacggcgaagcagacaggcaagatatggctcaagacgaacccgacatgatggatgacgagcttgacgacgaggccgacgaagcttggggtggtctggaggactatatcgggatgggcttattgaagggtggtgtggaagaagaggttatcgaggacaaagtagcctcgatcgagcaggccagaattgaacatgaaatcgctcgagaagcttcgtgagtccatctctttctcttcccccccccacatatgcgaaccgatatgtatcattcgtggagaatacaaaaataaattggggcccaaaaacatctcaccgttacgaccatgcttatcgttccgctttcatggatcgaccatgccctttttatgcttaattaattccgatcgatactattgtttcccccacttcctaggcggccgaccatgccgacgagcgggattcagtttcctaacccttctgcccttcctcgggtcaagacagcccagctaggcaagctgttcacgccaaccgagatggaccatatgtcgatgacgaatccaaacagtcgaaagaacttgaaggcggagaagaagcgaaaggagaaagaactccggaggttgatggctcttgctggggagaatccaggagatggagaaggggacgacttgatgatgggctaagacgtcgtcgaaatgtccgtgtgtatgtgtttgagtgagcggatgagagggaggtggcatgagttgcatggtgagccagcgtagggtttatgatgtgaatgcaagtgtgtgcaattgtacgtactgtggccaactcggcaactgaacgatgagacctgttcgagaccaacggtggtaatctctaactgattagatctgttttgacgatcaattgacgtcttcttgtgtatattcgtcgatcacctttcctgcagcatagagggattttttagaggagaaggaagaaagaaaataagggtgctaatggttatctgaagccaccttgttcttttgaactctgcatccttaggactcaaaacaaccatttagcctcttcgggcgatgttctttctcgtctttgtttatcgtctgtatgtatatgttatacgtgtaacgctgggtctcctctgaattctctcagcgttcgatctatcttcggtcaacgttctctctcttctgaatgttcgggtagaggctgttttcggtctcgttaaataaaatataatcctcgtaggcccgaccggcgatctttctacatctgtatttacatccattttctgattcaccgtatttcggtctctgatatcctttcgggatggatctctcgttttcctgctctttttgacctttatatgctttccaaccttctacggatggaccttctgattggaatactggggaggaaagagtaccatttgtacggatatgagcaggatgcaagggaaaaaagggtagattcggcttaaagctgtgctaatgcgcgactgttttcgttcatctcttggttcccatggtatatgcgtgtgcgtgtatgctccctccggacaccctgattgaccatatggaccggggatcgagtcgatgtccatatctgtttatccgctctatttatcgaagcaaacgggatctatgtataggaagagattgcaagaacgaacgtaaacgcatagagagacagaaagaaggcaggatgagaaggttgaatttttttttccgttaaaaacaatgtacacccgctcaatcttcttccatccgacgacggcagtcttctttttctttttccttccctcctttgccttcgagagacgatagatccggacgttgcttcaccctggttcctcatcgttgtcttgcttcctggcgttctgtttgattcgcttcaagagaagagttgcagagaaaacccgacagcagcaacgactgaatacattcctttctatctctgaccattcctggtttccctcgactggccttcttttcacctcgcttgcattttttttcttctcgttcctcttttctctttcttccatcggatcttcttctcagtacaaacctcttgttcttggaccatcgttgacaaggaaaggagtccagttgtctttcattttcttgccttgttctatctcggccgttgtcaacaataccgacatctcgtccttcgagtccataccctatacctcggctcatctctcccaaaactcgatccatcataggccatctctattcactttcagtcccaggctttcatctcaatcaacacatcatcaggtgcgatctcaaaactgtttattctctgtcttcctcacattgtgtgtcttaaccttgttctctgtcttaatatgctttctctttattcgtttggaccgaacacatcttgatcggaaacacttttcctctactctgccctctccctgtttcctacctttcgcgaatgtcaacagatttatcctgtagatccggaacttgcattctcgctcctcccatctgcaacccaacgctccttggttggctgtcggctctgtcgatattcgtttgctcgaccgagttgcccgttctcttcgctccgtaacgctcagtcccatgtctgatcatcctccaaacactcacactggatccagctacggccctttgtacgatcagtcatcgtccctgcctggagatcttcacgatgctgccggtcatcatccgttctcttccatcggccgggtcattccctatagctcggccttacctacccaaggccctccttcttatcccccttcccaggtctctctacagtcaacgatggccgtaacatgctcatcaccgtcatcatcatcaacagcagccatgccgacccggacaaagataaagctgacagccatccagaagaaagagctgtgtggaattcatgcgcagtaccccaggaagaagcaggaggaccttgccaaacagtttggaattgaacgaagtactgtcagcaagattttgaaagacaaggatagatggctaggaaacccaacagaatgggttgcagagaggaaaaaggaaaaagaatgcggcatcagtccaaaagttcctcggtaagtactcgatcctgaactcttttcttgtattgtcttactagcaatctcttccttgatggaaactaacgttcaaaacatatgttttttcatttctctccccgcacatatgcaatctatctcagctccttccgattcatcgagattgaggagcatatgagtgactgggcccatcagatcttcaagtctggccagacggtctctgatggtcagatcagagagaaagctcttggctgcgcacaggttctgtcctggccggtcggaaaattcaaagcatcgactgggtggatcgaaaattttcgagatcgacatcagttgcgcaaacagccctcgttcgccagcacctcatctggtagagatctcgccggccagcgtatccagagctactcccctcgtagtattgaggggtccgtcagtcctgccggatcgtctcctcggacggacgccgggatttgttttgttcaacgggacgaaggcggcaagtcgctgaggaaacgagcaagctcaaactcttcactaagcctgcgaggtggtctgacggctctaccaaccgtcgtcgagggaacacccacttctggtgcgatccatggaattgctagcttcagccttgatgactctccttcggctgattccccgtacggaagctatcaatcctcaccatccacctccccacgatatccgcctacctcgttgttttccacccttgaggttgccggaatctcacctccctcccagcggccttatcgggccagccctcggtcgagttttccactagccggtcgaccgggaatgcatcaccggacaaggtcccaaccgtatatcctaccatcctcccagctgtccagcacaaatggcatgcccgcgacgccttgtcccaaccgaggatcatcggaagatccatacatcggtctccttccaaccggtctaggcccccaggttggtaccccgtcgctttcccaatattctgaatccatgtttcatccatccccggctgtgctgtcagattgcggctcgctaggccctccactctcgcattattcacattcatctacgtcttccgtatcatcgttgccccattcaatctcgttcgatagcgccctagttgcctcacccaccccttggtcgtccacgatggtccacacagatgatcttaagtcagaccatctgggcgctcaaccatggcactcggagtatccctcaccaaacgagagccgtattcaggatggcggaggacaaggcacgctggtcggctatcaccttaatcacctgaacatcagaagaggatctgctggtggtagtggcgaattgtcatcttcgtcatcctcgacgggcggaccactcgctccatcaacgttacaacctactattggcttaggatttcagatcgttgatttatcattgcagccgccgatgaaaaaccttgatccgcaatccaactaccttcctatggagaatcaatcatcatacccgttgatgacctggcctcagcaaccgctccagcagcaacaacgacgaccatctcctcaacaacaacaacaacaacaacaacagcagcagcaaatctaccaacaactcctcccggcttatcaatcaggccagactcaatctctgcagtcttccatgctatcgctttcaccactccccgacaatccgactttggaagacggatcatccgtgatgcaatcgaattcctatcctgccccagctactacggttgaaaccatcggtcaatcggtcccgatgggacggtctgctggttcaacatcgtctttccggaacgacaagcttctgggcggaacaacctcggcttcgctagggaactggaaccacgtggacccaaagttgttggctggctagatcgtttacttctttacccttttttgcttttctcaccccccccttctccattcgctttgctttttcatacaaacagaaacccacttttatagtccttcctcagatgttcagcttcttctcttacttctgttttcctcctcgagttttggtcataaaatcagactgtatatgtagcgcattcatccatcatcaagacgtcgttcattactcttcttcttctcctcttttcttcttttcttcttttctcccccttgacaagaacacacccaacctcatcaaagcatattttcaatctcactctatctcattcttctttgtctcattctttggtcattcacattggttggtcgttttgcttcctcttctctttcctttcttccttctcggcttgaagttttcgttccaatcctaaaaaaaatcccttccttgcttgtttccatttcttcgtcatcttttgcccttcttaactcccaaaggattttctaatcgcatagttcagtcaatcaatccttcttgttctcgacacttccatctttattcttcgtttcttgtcctctttgacagaaaacaaactcaaaagtaagaataagaaggaaagcttaatcatgtcttcattcgcgattatgtcatcttctcgttctcctcgcccctttctaacatatttcaatttcttttgcgcttggcttctctagatttctagtcattcgaggtttctattctgtcatcttggtaacttcttcctgttcttccccaactatatcctcttctttcctcttcttcctcttggacggtggtttttggtgtcatcggatcatccgttcattctagctttaccccctctttccttttgcttgtcattccttcctgtctatggtttccgctagttctcgttctctcatcagataggaagcaactcttgttgctcgctcagcgataaataatcatgcctatccgatcttcgatatcatttcttctcttctgtactctctcttgacagaagctatgggttccccgggaatgacaaaacttgcatgtaccaagccaggttacatatattttccaagcgcccgtgtactcatcctgcccttcgcttgttctcaggtgcagctcccaatactaccaccaccaccaccgcctccgaagaaacttctcaacgaaccctgtttaggatcgaacgctccgttcccaactccgccacgttgtctttcgagtccttttagatggccggtttggttcattctcaagatctcgaccttcaatcttatctctctcccatcgctcttctccaagattgatccggatggggtttctagtgcggacccaggaacgggtttcgttggcgcaggagccgcaggaacggatgaggggttcggagcggtcgcggacgaaagggtatcggcatttgcagtcgcagtcggagaggccgagcgcgtaagagagggcgaaggggaagtagatggtgtgaaggtcggtgtgatcaatactttgtgccaacctgtatctgcaaagtgcgagcgtacgctcaatgtcagccatcatcgttatctccatcttaattaagaggaataacgaaaggacaagaaaaagagaagattaggaaaaacgaactggtcatcccaacaggattccatgggtcgttttgtcgtctaggccgtctacggagtagtgtacccataagctcggagctgtaatgatcgtttgtttccgaaaaccaaaaggaaaagaatgaacaagaagaaatggtaagacgtcgtcatttttatgatagatcttgcttctaccgacaagagtgaaaaggtttcacttgaaaatcccatgagcgacggctactatgtgtatattttcttgttcggatgactctagatgatgattaaggaacccgtcgataaatcttgttcagaaagtcaaagacgggcgcgcaagatacaagcgaaactccggatctactttagcaaactcgcaagaaagacattcgagggcgagaagatcagacgaaccgatctgctctcttcccaacatcatccaaacactccccatcttcaaatgaaaatgtccttccggcaagtcttttataatttccgctcatgttgttccatgacttaccctcggcctgaccaaagtttctttatgacagcgtttccagcaaatcataagaatgatcagtcaactttctctcctcccgagtaatttggagaaattctactatgattgttctgtcgtaaaataagccttgaacgtactgttcctgcataagaggcgagaatactataggcggcaaattttcggaagcttcattctgctcaaatatctgctctgctgtccattttgctcgaagctgaagaaatcagatttaaatagattaacattcaaacgaccgaaacaaggaactttttgtcagcacttgcatatcctcagtgtcagagaaagtggaaaagatgacttacaagcggactggcatatatctgagtgatacgaactcccttgaatgatccacctagagcctatgtgaggaaaatgacagtcagattcgttttttttgttccttcaatcacccttgaacttccctagcctggaggaaccacgaacacaaaagaacaatgaataaaaaactgactcaccttcgcttgattcattccatggtttgaaagtggggtatctcttgaacctgcccagatgtccctctaagcaacccccgaaaagcattgcctgtgtcaggtcagcccttgtttgctttttcttttgttctgacttagactcttctagaaactagagtagaagtgaatctgaatcggttcaaactgacaagattatcctatcgggtcacatgatgggcagaatatacaggcgaatgtataccaatcagtctgcgtgtaagtctcaccgaaacagtcccatcgttgtgctcatcgatgctggagagtcaaactcacggtagattctccatgccggacctggtttgatgaaacatagttcccagaaattaaatctttcacaaccccagaactggttcacactaaattgtagattgatgtacgaacgatggtcagatacatagtctcggttctcgaattgtggtgatggtttgtgtctcgagtcgtctaactgcatgactaatcggttgaccggccttctaaattcatcaggatcattagataagataacaacatctccattttaaactcaatcttgccgtttcggaacgctctgaagtttgtaaacacaagacaataacggagcacggggcacaggtaacaaaatgtcccgtcaaatttatttctacttgtacacaagatctgtctgtaaatatacgttttgccgcccaagaaaaacgccgatgcgagtttatgtatcattcatatcgccagaggccaataggctgggttcattgcggaggggaagagggggaggaaacggggccgacaaatacatgacttgagaagaggaagagatgagcaagagaatgtgggtgatgtaacatcaaagttaaggaaaaaagagaagaagaaaagagggaaaacagatgtattgagcgatctagccaactcggaagataatgaacagaaccgatagagaaaaaccgaaagggcgtggtgacagaacgtgatgaaggggaaaacgtgaacagaaacagaaacgaagagattgaaaagaaaaaaatgagagcgcgcgaaacaattctcagatttattggttgtatcttcggaaagctggaaaagaaatctcgattcaatcttagttcttggtctctactcgatattacaggacaagaaaaaaagacgcactgtaacccaagaaagcaagatccttcccagctccagctcccccggtatccggttgttgattcggaacgccgtcaagatcctcggtcggaaagtatgacgtatccgtgatagatcttaaatgtggaacgaagggagcgtcgatatttcgaatggtatcccagtcgactccgtagaagaacgggtgagacttgatctgagcgacgttcagtctctgttccggtgatgtcagaaggctgggttggtttcatagagcgaagtataagtaaagaatgatctcagaacgacacaaccaataagaagagccaaggcataccgcttgatcaaatcttcagactctcgagaaagatgaacatcatcagggaagtacaaatcttaggagaaacacagagaaccaatatcagcagctggaccagagccgagacgaaagatgaaacaaaatagaaatgaacgacctacgatttcgccagtcaatgatctttcggtaagtgtcatgcgcgttctccgagcagaacggggggtagccgaccaaacactcgaacataatccctctacaccgtggccaaacgagagtagcttcaatggatgatatgtgacgaacgaaaagaaaagaaggaaaaagacacgaacccaagagaccaccagtcacattcgttggagtatccttgctgcaagaagatttcaggggcgatctaaagcgatacaagtttttttcaataatagaagacatgataagctaaggaaagcttgtttgagttggagaaatcctgaagttgtgaacgtacataatcaggtgttccaacggtcgagtatgcctgtcgtgataagaatttcaacaaaggccatgaattagtacgtctattacgaaccttattaacgtcctttaagtatctccactgctcgtctggctttcgagacggtgatatctcagaaggtagattgcataccaattttctcctattggccttccacgttgcgatcgtgtccttcgagctcattgtcagatggatactgttcaccataaccgagttcctagcccccggtcctgcgccggccatggcgtttcctcccggacccgttcctgcgcctgctgccgcgcccgatcctccatcaagaagtcgttggtagtaagctgaatcgtgttgcttctggaagccagtagacagcccgaaatcggaaagtttgatgtgaccctgagggtcgatcaaaatattatccggtttgatatctcggtggatgaatccaagtttgtggaccgcctcgatagcgagaacgcactcggccatgtagaacttggtcacatcttccgagaaagtgtcatatttaattaacctgactcaacagatcaccccgagcgtaggaaacgtataaagggtatttcctcagatcagacacatgtacttgtgatcagtccagaaaaaaagtctatgggatgacctacattgtcattaagtctcctcctggcaaaaactccatgatcaagtacaagaagcttggatcttggaatgaaaagtagagcggtacaacccagggtgagttggactctgctagaacatctcgctccgctcgaacatgtgccagctatgctcgagaacgaagtcaaggttgagacccagaacagaagataattattcaaaataaacaaaatgagctgtctccatccgaaaagaaagttttcttataaggtaggcacgaaaaaagaagtacagacctggtcttttttgaacatctcgctcttcatcagcgtcttcatggcgtagattcgaccggtatcgattttctggactaggcgaacctacacgatcccaacaaaacatatgacaagatgcgataagcgcatgtagttagttgacttgtcactccgctttgatggctttcaagagtatgattgatctctcgacgatatagagcgaacagaaagaacacacctctccgaatgctccctttccgatgactttgactgttcggaaatcctgaagactaagcttcgttcgcctcatcctcaggaaacttaatatgcaattttagagccagccagagatcattcagtgatcgacgacatagatgaagagagagtaggagcaaaggcttcaagagaagaatacttacttgctctctttccgaccgtattgagcgatcagccgctgcttgagatggtccggagtaagatgatcttgagtgagtgcccgctcagttgtgatacgcctgtatgccacgagagcaaaatgagtcccggtagatagtttttatcatgagtaagtgacaggaatagtatagaaagctcatcagaaaatgttgttctatcctaagagagagcagaggtatatgaaaggaggacagaagagaggatgatctagtgactacgatctctatctcccacctcttcaccaatgtccttttcgggttaatatatgctcgacacatatccgaaagagcacagcatatttccgaggagcgcaaggagatgaaaagaggggaagaaaagaaagagaaacaggagagagattgagaacaagatcagaacgaacctctctcgcctggccaccgcgccctccacaccgtccttgtaccaaagctcaagtctcatcctgacctcagtagctttctgtctagcaccttcgaacttctccggatgtctctcaaaatacacatagtctggcccatgggcctgctccgagcttgctgctcctccactgccggttgacaaggtggacacaggatcgacgtccatattttgattgggatagtggggctgggattgaggataaggaggagaagggcggtgaggttgttgttgctgctgttgctgatatggctgctgctgctgatacggttggttgggacgaggctgatacgactgattgtttgagtaagccatggtgggattccttattcgctcttcttttagaaagaattgaatggatagagtggaaaatgctcgatctattcgggaccacaaggaacaggaataggaatctgaggggcgagagatgagaaagaggcacacacgaaaaataacaagccatcacgcacgccaatcacatcacacaaaagttacactcttagcctgcgttgtctattgcctttgtacgttttatcagaaattcataaagatacactgcaagacgcatacacaaacacccccaaacacacatacacaccatggccatcggtactccatacctaactgatcatcagtcctcagcctctaaggaactagcttcctgcctcaaatcgttcggtacctctccatccctctcctttcgactcattacctcggcttcctcagccttctcagcagccacatcatccgcccggacttctagatctcgttggccaccggggaaaatatgtgacaccacggccacacccttgcctagatatccaatgtgggacaaagaaaagatagaggaacgacactggtcagcaaaccatgatctagaatatctgtttgtcttttgcgcgcgcagtatcagacataccctgagtagcttcagcgacctgttgaagaataagcaagtgtcagtagtcgttcgtctgttcaaacagatatatagaacgagaaatttccctacattttcgtaaagatttttcccggtatccccatcgcttcttcccggacccgtccagaagtggaacgctctcgagagaactccactaaggtaacacacagtcagttttggtcgatcaattgagaatatatgaacgaaaccaagagacccactaggaagcaggcacgacctcgaccaggtcacctcgagcaatctctacggacgggacctcgttcggtggcaagccgaccaaataagccaacttaagaacacagcaaccgacagcggtgatggcaggacaaggatgtcgttaggtgcgaatgatgaacagctgaatgatctaacgaagagaatcaacaaacataccaaacaacgaatcacagaagcatgtccgataattagcaaatcatcctgacacctttccaactcgaagatcacgctttccaatcggactgtcgacaaaaagaattgagttagtcagatacacttctagaacgatagaaaagtgtgctcagcaatcttttaccaagacgtaccactcaaatcgtgataactttccgcgcgaggtgctcggtgagcgtaaggatcctttaagaacctttcccactcatctgggtacagtctcttagcctcttctgaagacaaaccgtcccagacaccaggctgttgaaggacagttgtacaaagatgcgtttgagaaggatttagaagagtatttcggcataataaggaaggatatgagatgaacaggaaaatgaacagacgttgatctctcccatctgaggcttctcctcgactttgtagtctaatcgaacgaatggccaagcggtatgatacgcccttctccttgcgctcgtccagatctattagagaagctgcgatgagcgttgatatgaagagtatgaaaagaaacactgaagttcgagcataccgttagcggccgatccttcgcgacctctcctcttcttgtcctctcttctttgacctgccgtcgcctactgagtacggcttccttaagcctctccgcatagtcccatccatcagcacatagatcggaatcagctttgtacgagtgctcgatgatagattggccggatctggcgaagtagattgttcgaggacggttgtgaatgttctgaagatgtggcgcacaaaagatcagacaagtcatcagcaaaggtaagtgcagtaagcgtaaagggacatcatctgagaacttcaagcataccataaggaagaagataattcgggattggagatatcctaagatatgattaacgagtgcagaagacagtacatgactgagtcagacagaccgatctgttcatatggccgatcaggcttatcatcaagaacataccttcaattcggttaatgacgatgcgctcgccaacgttgatgactttgatccatgccgcatctggatcgacaattggctcgtatgatctttcctggtctctgattcgcgaccaatagtctcgaacagcatcatccgagttccaaccccggtactatatacacgcattcaaatcatttaagcgaatcagtatggaaattcatctcaaacaagcgatcatgaagtcaaaataaaatatactgacgtcgggcgacgagagcttgacagaacgaatattagcttcgacgatttcgtctctgtcgcacatactttctgttaaacgcgtaagataaacgagtgcaagtaagagatcgtcaatcgagcagatgcgtgaacagtaaactgacctaggaagatgactttgataccagcctcgttgaatcgtttccacagctcatatctcgtcttccgaactccgttgttggcatcgtatatgacgacttggccgccctctttctgaaagaagtccagtgcttgctgttccaaaccaagcttaattcggtccctcaactcttgcgtttctggccgcttcgctcctgatcatggcaaaccgcaagacatatattagacatcaaagcgcttgcattgacacattggctggagccaagcttaggatgagatatgaagggaaaggaacgaaccgattgcaaagtaatctccaggcagcttgtctgctcctcctatgatctttcttctgtaatccccgagagagaacactccagttttgactcctagccatcgtagatacctctcgagcgatctactgatgtgtgttttacctcgagctgtgtttagaagatgatccacatagaagacggagccaatgaatgattagccctccggaagatggtcggctggccacttctacatagaccagaatatacaacttaccaggtaacccgacggttactgaacaacgaagtaaagaagatgcatgtattcagatcgttgtcgagttctctgtagagctttgaaggacatcataactcaccaatgataatctagtagacagtgtccgttgataagcgaaagtgaaaaagcagaaacaattggtgaatttctattatagatacaaaggaggaatcctcttgatccctgattcgattcgttccataggaaatcctgacgacaagttcaatcaagaaacttacttgaccagcatgccagagtcttcctgaatctgtggtgtatagaggagccgccatgtgatggatgaaggatagagatgacgatgatgatgatgaggagaaggagtaagatatcagatccagtcgcaggagagatgttcagcgtctaggacgaatcgatttatctaagcatcgtcattcaaatacactacataagtctttttcgcggtggaactcatcccaatgtgttggaactcattttagccatctctcactcccatccctccatcttactatcgtcttgaacctcttctctctttctcatctatcacctttctttagatgtctcgcttcaatccatactctgaaaatggaggaaccgttcgttctagttttgaaatgatttcgttgccagctcaacccttggcatacccttctggttgccctgttgaaatgctttcgacaagacacgatctttcctaacctttcctccgttcctcgtctgtgtttgaaactagatcctcgccatcgcaggttcaaactttacaattatcgccggtgatactcgtcagtcggaaggctactcgattcagacccgatacgcacccaaagtgtttcgtttaacagacacctgcgtcatcgccgtcaacgggttcgctgccgatggaaagacgcttgtccaaagggtcaagcagcgattggaggtatgatattcgtttttgcaaaaacttctctctttaaggaacaagaaatagagagaactatccgtttctggtctgatgataccagacagcgactgacttgtcgtgatttcaattcctcattccattagtggtacaaccatgcgcacgctaaaccaatgcctatcaagtcgattgctcgaatgattcagacaatcttgtacggcaaccgatttttccctctattcgcatacgtgattcttggtggagtagatgagacagatggtaaatttctttactttcagttgcgggtgtagactcgaatgaatattttgaatctggagggaatctttaatgatctatttgatcgcagggctgattcggagtgtctgtatcttctttctgggcttatacaggctcaggagcggtttactcattcgatcctgtgggaagttatgaacgagaattctgccgagcggcaggcgccgctcaatccctcatccaacctttcctcgataatcaggtgagtttctcctctcttttatattgatctcctctcttgctatgttttcatgtctctgtttctcatacttgtcaatatatctttatacgcttttcgtgcgacctgcgcagatttacttcaagaaccagacacagctcccacatcttcccccccggacgcccggtcaacttccgctgccccaggtgctctcgatcgtgaccgacacattcacctccgccaccgagcgacatatcgaagtcggtgatgggcttgagatgtttgttgtggtaactcgacaggttaccggagagaatgttcagtcttggaatgacgcgctagccggactgggacaggaagaattaagggaaggagcgagcatcgagtggttagacagcttgggcgtcgttggtggtcgtgagacgaaatgctgtgtggttaggagagaacttaagaaggattaagacttctttttttcttctcggttatccattctgatttctactctttcggttctttcctgatcctttcctttgttactagtgtagtccttccaccttgttctgaagattaccccgatgtgctgcaaacaactcttttcttcttgcttctttctccatgagtgtgaatgttcgcgatcaagagatacactcataaataatttcaacaaacaaaggtaaaaccttacaagagaagggaaggaagagagatagaaaacatatatgaaacagagagaacagtagatgtatatagaattataaaagtgatacaatatgggcagagtattgttttatgatatttgaattgaaaaatcgaagatcgaagaaaggggaagatgaatcaagggacacttgagatgaagatggtggtgagattgaaagtccaagaaatttgaaagtgagagaaccgaatgtccaaggcaaaaagagagttccaaagaaatatactagagagcagatcggaaaatggacgcgcgcaaagaagggagacagaagaaggaatacgggaaggaatatgttatttcgtggtgagaccaaatgcgttccggttgacaaccaggcgagtctactaatctattgatggctataggtagaacggggaagaacccggaggtaaaaaaacgggcattcagatgggagggcggtaagaagggaccggagagatggagcaagagatctccggccaaacggcacgaatctatgtatacgtagaaagtatagactcaaggtctggctccgaccagcttcaaaagaatgagaccaatgagaagtatactcgtaaacgcacacgccctagccagtcgctcgaaccagctctcgaaagaaagtcttctacgggacccaattaagcgtttgcctttgccatcgcccttttcctcctcggccgaattccagaatgaaattgtcacaccgcgctcttcatctgagggggtgtattcttcaggaaacgacggaagccgaggtctgaatgatttcgacggcggtggacggtacgtcttgccgcccggcgagggtttcggtcttgatggcacgagaaacgagctgggcgggccgggaggcgggcaagttcgtgaggtaaggggcagagaaaacgatcgtttaggttgaatcttatgagacggaactgtcgatggatctgacgaacgtcgagcggacgagaagggtgtggccggtggggagatactggttggagaagccggggtggtttgtacgtgtggagggaatgaccatgacctcgtcggtcttaccggttcgaatgagttcatcctcggaatctcgagtgtgagtgagggtttctccgtgggcgatacggtgatctctaaaggatcacagtgttgagacagaatgtctaataagtaggggaggaaaagacaagacagagtcagaacaaaggagtaagaatgcagacactttcatggacggaaggaactgaactggtctgatgcatcgttcgttctacaaaatggcagagaagaaagggttggagtgaaaaggaagggagagatttctatagttgagacacggggaggtccaagaggatgatgattcctggtctgtccgtcttgactacgcccgagtgtgtgtacgtgcgagcggtctgtacctgaatgaatgacaacagataaatgggtaagctaaatacgtcaccaaactgatgagagcacggagcgagagaatgaatataagcaaggtgaaggaaattgtgcgtgcatgcataaggatggtatgtgagagggacgatgtatgtgcataggtgtgcatgaaactatgcccctgcacttctgacaagtgccgccgtcctttgtcggaccgatcgaaggatatctgtctctccgccggttcatctgtcttgacgatgcacagttggtcgtataatcaagttgattgacgagctatctgaggtgcgcgtctgactctcatgtcgatgtctgctcttctatcctgacgaagatagaaaagatcgagatgccagcagacgaagaaaaggagagataaaggaagaaaagagagaggagaggaatcaatctcactcaccgagagctgagcagaatgagtgtttgtagaagtaaggaatcaaggtaagaagaggaaaagagtcgaaagatggaaaagagatctagtgaagtccactgttaaaagtggtttggaggacagatcagaagaagaagaagaagaacgaaagataaagaagaatgaatccgatggggagagggagagaaagcgttcagtgagcgacacgcaccccttgatagtgagcaagaagaaggatgtaggacgatctgtcgcaggctcgttcgtaggcgctttcacaggcacactcaccccttactcagccgatcggacggtgtgatagcttctctctacctctcttcttttgatatattgtctcggccaagcagacgccatttgttctgtgctttggtaactgactgagattgtgcctgtcgcctggcccgagcggacctaaaagcggatgatatcactctgagggagtaaagatttcgctcgtacgggctcaatcacgcactctcgtccgaaccctgaattattccgggcctggaacattccttcgttgatcttgttcggccatggcgatctccggggccacgcttttaagctttctagaccaagacaacgtttactcagactcaactctacttattacggtcttcaagctccgcaggtagccggttgtaaccgcctgcgtaaccggtatcgataggcacagagatttgaggtcaggctttcagttgatttattaaagacggaaagaatgatatttatgaaagacaggaaacgacaaacaagaaatagaaaaagggattgatagattgcaaaacaactaggacgaaaatatacacgaaaaaggcaagtaaaagcttaggtggcaagacatacaatcctcctcataaagagtctgtaaacaatatagctacgtaaacgggtcgagttctatacacgggatatgccccacaagaggagatacgtgatatacagttcgcatctcgtaaggcatctcctccctcctcccaaaacggctaagtgaaagatttgtcagaacggggagcgaggctgggaagttgttcgtggattacatacatgattctggacagctgtccttcgatcgaaactacccatcacgcccgggagttcagtatggaattgataacgacagcggcattgtcattaaacttaccgttaaatatacagtggtcaaaacttaagtcaaatcattttatctaaacgaggtgttcgagcttttctcgatggatccgagattctaggatttcttcggcctcatacctctcgctttcgtcttcagagacttttcagcaggcggtgatgtgacctgttgagccgatggttcgttttgatgatatcgctcaagttgcgagacgtggattaccgggtggcggtccatagtggccggaaagtcgagtcggaaagcagcgcggcctactggctcaagaatcttgaacggcccaagcaccttgtaatcaagtttgtcgtttggtccgtaagtcttggtgactatttgtttgtacaagactagatcgcctggtttgaagtctggagcagcggatccatttggatcatcatatccttcttgtgtttccgcggcattcttcaagaccgcttggcagaaagactcaatgtctctcacctgtcgaacgtgtttttgagcatccagaaccgggcagttaattcgaatgtggccaggttgaccacaatacaaacataaattgagttctcgtcgacgatctcgttcttgagctgttaggggtccacgaggagaggaaagattgtcgatgtctatcataatcgaaccgtctggtggatctgcgtgaacagcaggtcggtccgctggggtgatccagggtggtttctcgtcatcaagaagaaaaggtcgatgaggtatggttgattgtgtgccctcacccttgagtttcttctcgcgttcgtagaatcgctcatcgatttgagtagcaaggttcctaagctcctccagagtatcaggtctttttaaaaagtcgattctatccttgatcctgggtttgagtccggagtagaactgggagatcagccagtcgtcgttccagcctgtgaaggcgactaaagatatgaactcgacgtaatattcatagactgatcgggtctgagtcaaatattagatctgtcgtgaagctgaatatgtctcgttaacgaggccgaacgaggtgttgagacgtgcttcgaattgtctaaagtctttcatccagtcaggtttcgtgaacgcgccttggctcttcatatagggctggaccagtttgaatgcgggtccccggaggtggtttatggcgtagtatattttagattcctcggtagggaacttgcgtggataaaccgtgaaattgagcgtgcagagacagaaaactctctacatgcgctcggatctcgtccgtcaaaaagtggaggcgcggagatcgtaggttcgttcgaccgttcggctaattcggattggagggctaggactttggcttccaattgagcgatcctggtggagttcgttgcgttggacatatcggatgctttttgcggcagagatggccgaataaagaatcctaaacaggaggtgtagattgatgaaccgcaaacgaagaggatagggttgcacgcaagaaggtatacaagggcttagatggcaagatggaaatgacaaagactcgtgctcgaattccgatatcaggattggacgaggaagcattccttaaatactataccgaagcctcgacacagctgggtgagtatcaggataataaagtatatgattctccacacaagaatgcatggaagagaaagaattttcgaaaataatagccaggtaaacgggtcgaggttcgcagctctgatgtgctgttaggaatgtgacctgggtgctacatgcctggaacctataggttacaggtcccttgccgttattgctacttctcttgcaaagcattaacttccaagtatgtagtcgtacaacgcatgtgcccctatcgcatcccatggttccttcttccgtgcaaccctgtgatacaatccttccgtgcaacccgccaacgcagtgtaatttcttagctcatcgtctgcaagtagtatctctgtagtctgaggatcaggtatacgaggggcttcctttgccctctatagcatgaccttttccagccaggatcttttgttagtttccttgctatctttatcattgctctctattatctgtccttgtgttccatcttgatatattaatatcattttcttgcgctcctgttctcagccatcctagtcagagcctaaattccacactaccaatcctagcagtcattgtgggttatacagctcgtagtcttctccatcacaggtacagctcacgcccctcacaggataccacattcgtttcaacactcaaccttacctaatcaagatgatgtttacctaatcacatatataaattaagcattcaccgtcttccccttgttgacccgccctcttaggagccccacaaatattgaccctgttcatcgaatgattcaatacccaaacaaacccattactttcttcttgtccagaaacacttctggctttctctatttccttctcctgcttccctaggtgtcatttgcatatagagcacaccaggttgttcgctcacttattttaactcaactcatccgcacctacctgcagcccatggcgaccatccaagacaggcagtggacagagtgagtgccgtcgcgtattttctccgataggcattcattcggccttaaccctaacgttgctatctcccaatacagagagtactctggcctattgaccaacctgtatgtcgctctcgcagtcacaggtatgcccttttgcttaagtggatagtacagcatatctagtctgatcatatcaagcctaatatcctccctttctccatcccaggcatatgcgggcttagtacagagatcatgaggggacggagaaggcgtcgtggtagactagggaaagatgatcgatctgggaacatttccagcagagacagctgggagtttggatagtaagtctctctcggtccatccttcctttctattcgtgttttccgattctctgacttgtttgagctttctctgccttgctcctcaccagcctgtaccaggctagagcatggtccaagattccgtccccgatgcatccaaggggtcctctcatgtcgctctggcaagcccacaagtttccagaggatagactgcccgcacttatcggcatggatcataccgttcatgttcgatttctccgtgcttgctgttagtcaagattctatctttcaattcagatccccttggcattaggttgacaattactatttttctctaaaattcacagtctacttcctgttgattcatattctcacaaccctacctatcctcctcccgtatgttttcccttttgatgatctagagcgtgtacaattctcatcgactgattcttctccctttactctttaattcttttgcgcgtactgttcctttcttcctctctttgtcgcccacctgtgctcgcttaataggattcacttggtgtatgctccttccaacgtctcacgaacgagtatgctcagagcgtcgctttccagtctgatcttaagcgtgaccgctcaaaagtatctctgggttcatttgagcattttgctttggcttatggtcacttgggtcgctattcttctctggttttcctggggttgtcttagatgtaagcctttgtccttgcctttgtttcttcttttctccttcttcttcttcttcttcttctcgtctctctacatggtgcaaatactgatcggtgtttggctggctttaattcaatcacagaccgaaggatcaacatcgaagccgatcttcaagcagctgaacgatccgcctatccaccaaagtctccttcctgttctcccccatcggttccaagttacgatggcaataacatgagccagacagatcctacgacctccatcgcaccggacctgtccgcccagtccctccaccccacccggtctgttctacaatctgacatgtatttttccgcgccgctcgtcacaccagatcaaaaattgatagaaaatcttggtccgaggggttggcgattccgaacgctcatggtatctaacgttccacccgatatgagagatccagaggtactccggacgtactttcaacaggggctcgaccggaacgatatacttgtcaatagaagtaaccagagggtgtccttttttggcaccgatcccgctcaagcgacctgttctctcgatattgaacggcggctggtagaagaacaagaagcagaacctatcaccgaggtcgtcattgtccgtcggcttctcgagctagagaaactcagagagagaagggcggacgtattgaaacggttagaagaagcgcatgtcaagttgattaacaacgtcatgacagcggtcatcaaggagctcaaagggtcggcttggaacggtcgttggctcggtcgtcacttcggtggcgtacccctgtggatacctcatcagacggctgagattgggggtaaatacaagccggaagggcataacgaaaagagagcggacgaggttgccgatctaccctctatagagaagggtaattcaaagaaatatgatgtagacagagaggacgaagtcgagggaatggacgaacgggaaaggctaaactttctggttgagaagcttcggaggttcgttgacgaagctgaggaccagactgaaagctcacaaggtagaacatctggctcaatggagaatctgaatgaccagtcgtccggtttgcaagaggagagagagggggaggaaaaggaggaaaacatgccgacgatttgggaagtaagtttcaaagtcatgtctccatcagttgtttttgttttgtccttgatagtccgattgatctgaatcgtcttaattcttatcgttacatctcaggttctccactctcttccgcgttccctgttggatccatatcaaccactttactattcctcgttaaccgcctatgcgcttagaaagcacaatccaccgttgataaactatctgactcccaaactcggtctgctttcctctctcatcgaggaacaccgatctcaaccgatagacactttttctgccgcatctaccgctttcgttacgtttagaagcccagaacttgccagaggagtgttgaaaaagatgaagagtcatccaaagagagcattagcttgtaatcttagtccggcgccggattacagagacctcgaatgggtcagtaccatctttcttcttttttaattctagtcgtcctggcgcatttctttctttctctttttccgtgtatcctatctccgtttttactaaataatagcttggactgtctgtttggtttgatgacttccgtaaaaactctatgatctagcttcggctcatgacggcgaggtacaggacagagtacgtcaagggctgggttgtagctatcggaggtaggtgttaatcctctttttctaggttaatagttgatagctgattacagatcttgttatcgtttatttcctttctgtcggttcaacgtgattctagtctgggccttcatcatcttctggatcgtgagtcattttgctttctcctctgtttcatacatggtctctggttgtcgttctatcaactgccaaaacaattctgacgaaacgatggaacaatttctacaacagattcctatcactctcttcgccggtctggtttcagtgaaaaacatagcaacaattattcctcatctccaagatgtcctggataaataccccaaagcggcaacgatcatcacctcgcttctaccaacgctgcttgtctccgggttgacgttgttgatcccattgttattgttcttaatctcgaggaacgcggagacgatcgtgacaaagtctcaaatgcacaacattatgctttctagatattatcggttagtctttgtggtttcgcattttgattcaacaattgattgcaactgatttctcctcacctttcttgtcgttctcttcctttgggggtttatttaggttcctgatgtgtaacgttgtgatcttgtgagtgactacttgaaagtcagcgcatttatctgatcaacattgactcgtgacgacctctagcttttgcgtcggagtggcttcccttgaagcattcgttacgtccttccgaaagaatttcacgcccatcaacctcctgcgtgtcatcgcttctactttcccccaagctgccccgttcttcgcgggctggttgatcgtacagacagcgttgcattcgatgattgaatacatgttgcttggtctaccattgatcacttactttgggcttaggaaagctcaggtgcccagaagaagaagctctggtacagaacctagattcttcagtatgtcttcttcttctttccatctatctattcttccctggaccgggtttgatagactctaacaacgctaacaatttgaccttccttgtttcccttttctcaccaaaaggcgacgcgtattggaaacccctccatatcctgtaagttagcgcaaagaaaagctggagattagtctgcgagctgctttgcttatcatctggttgaaaccatcccactggattatcttcaagctgtctttcaattaccgttctctttgctatcctgtaagctcttcgtctggtgatttgtactggtagtttttgtcatcagtacctgccttcctgacacagcccgagcccgaaatcgttctatctctcgatgctagcaacccgttggtgttgccttttggtttcgtctattttgctgtagccttgcccatctttaagaaccagatgatccatgtgtatcaggtgagtcgcttcctttcttttcttatccaatgaacctattcttcttttgttcagtggcagactgatttcatcttctccatgtacatccattgtcttcgtcggaactggctcgccccttttcctatcctgaaagcatcaatacgagacccagggtcagaggccagtcatccgattcgttcggtacacattggacggtcatgcttgtaagttgtatcattttggaactctcgctttttatgtttatcttcatatcgactattgaggttatatttcgaatattggagatgttttgactgatatgtatgttcttgttgtctttgaaaattcagtggctcaagtgagtttcatcattcactcatcgattcttcatccaattcactgagatgtcttctttgtgtccgggtacagattgtgttcatggccatgatggtcatcctgaagaagagcgcgtatgttctcattcatttatttatttatttttaatcgtggtcattttcagcgttttcttgattcaggtctgacaatcttgtcgtggtatcccgacaatcttttcctgcccatgttcttatagtctcattgggttgacatgtgttttgattgtgatcacgcttgcgtcaaaaattatgttcgtttcgttttttttctcaatcccttgcttttctgtgctattcatttcaacacgacatactgagcgatcttcattggttatttcctgggacgtaaaatgcgattgatagattgacaagagccctcaagagtcgattcagagtgctcagaatctcggaggcagaaggattacaccatgtgtcccaagggtatccattaccttgtgttccatccaggatttctcttgagacttcaccctactcggcaactcccgttgctggtaatgctcttacaccggctcctgtcactgcctcgaacaacggcgggaacgagaacgatggaacttacacctatcctccttccgccgcaagcgctccggatagactgggctttgtaccagacaataatcctcccaacccgctgaccggacggaatgtgtctactcttccatcgcgtggctcggtccttctaccgttccctctagccaggaagccacttccattcgaaatgtcttcgattagacgatcagctccttggacggaacgtgtcctctctgtgccttcccgattgctgatcgcaccaatcctttcccgattcgatgctcattattcgggcgaaatcgggaacggtaagagaaatgcgaattattcggaaagcgatggaaacagggagccttcatcccattcttcaaatcgtgtctcgaccgattcgggctgtcagtctggtgttcctccaagcggaaacaacaaacaagaatcaaagataagggaggtgaaaaaagacaaacctgacaatgaggttgatcaaggtgcagacgtccggacacgaccagctctcaaagtcacccctcgagctggcccgcttccttggactgaccgtcctatcgactcgagactctacggatatcaaccttcctattcaagaccactggaaactttgttgtggttacctagacatccgctccgaacgcttgatttagatgataccgtcgagagtgagttccgtacctcttcttcagttcaggtcaataaatcactgctcatcgttgagcataatttttctctctcttcttgatgataaagtcaaccaagcattcgagagttcacacggtggctccggccatctaggcatatgggctatgaatgaaaatggggagttctgcccaacgatcatcgaagaacgagacgagattattgaggagatttctgccgtcatcaaacaacacctagacgacgatgaagccgaagaagaaatggagttgggccgaaaggtatccgttcggtcaaacacagggatgaacgcttcgtatagcccgccgtctccttcaggagtagcttcgtctccgacatcgagagaactgaatgctcttcctgtctcgccaacagctctcctgtccattccaagcgtcacttttagtaatgaaccacaaagtccgacccgcccgggcccgatgtcaagcccgaagatttcgcccattcggttcaacagagctagagccagaacgttgcacatacctagacgaaagacgagtacttcttctagtcatagacctatccgacacttttcactttcgaggaccacgaacgcggctccgtcggatgatgtgtttaccacgactggttctccccaacgatctaccgatcatcgaggtcgatcaaacagtcagcgtagtgggtcgagagaggatgtattgcagttgatcgcgaaggaagagttagcggcttcccgtagagatcgggtacgtactcttcattctgcttggagacggtattcggatcattggccatttcggtcagttcgtttattgacctatcctcttctctacttggttttaattggtgtctgttacaggcggaggctagcgcgattgtggagctcgaacgcagtaaaactcattctcgtgtcttgcgacgtcttggtcttgtcaacgccggcaacgattagaagtacatggactctcgttgatcgttaatccattctctttacgctgttcttgtttcttaaatctcgcaacgtatagtatcgctcttaccctccggaaatcgttcacatttttcacgcctttttgtgtagtttcattcatctttttatccatacagtcaaacttttcccatcgacacatatacatacacaccaaatcatgttgtacgcttcgaagctaccttatagtttattgactctatccacgtccaacccatacatacaagccccatagagtggccccaattttcatccatctgcctccttccaatctctctagatcatttatttactcttcatcctcattcttgatgaatgaaggtggacaatgacgagtgattatcgttgtgagatttctcgaacgatgcatctgacgcaggtataaatctagatgtgactgatctcgataacgctcgacaaacggaagaaaggagataggactgacaggacaggacaaatttgttctcccaccccgaaagcttgtctcatctgtggttgacctagacttttcatgcactctactccttggaacatcaacctgtatcctatttctagcctgacctgcctctttctatcgtcttcaagcatcctttctaggttctcttacgatgaacatgctcacagacaccacacgtacaactacccctgctcgtacggctagccactctaggtctatctctaccgtggggacgcctggtcagagtcgaaaatctacaccatcaatcaggtcaaaacgtcctgtcaagccaagcgcgtctaagaaagagagaaccgtcaagcgtccgaagacaccattaggaagagatggaaagaaacttgaagagatcgatgagaccgaaagtagggaaggtgatgaggataacgagagtgagagtgagagtgaaggatctcaagtcgaagtgcgcatacaaccctcttcttctttttctctcatttgctctcaaactggtattttgactaatatgatttgacgtgataccatactagacgaccctggttgtatgtaacgctcattcgaaggtggccgctgcatacatcgatctagtgacagacaagctctatataatggaagatgtcaccgactcttctcatttcgatacaatcgatcttggtaaagaaactgtgtatcttatcatttaactctagattaagttaactagaggggtttctttacgggtttcatgaatctagtactccatcaaatacatcctcagatgatccttgtaaattctggcgcggaagacgtgttagtcgagcagctcaaggcgtacgctatcgcgcaaaatgttaagtttgagatccaaccacagaaaggcaagttttcagaatttgcgcttgattgaagtgataatgtctgacgatttatcatctctgggtcggtggttgcggtttgatcgcgccttttccagattttcaatacattaaatcgaagaacaaactcatctcgctaagtcttcctagctcgatcatgcgcgcaacatcccaaaacagatctctctcttcagaaaatgtgtttccagaaaaccccgaaagttacaccttttctcacgggggtgaccaagtcgatgatgacatggaatatgatcataggtcgaagcggatggagcttgtcttggcgggtatgttggatttcggaaagactctttcggtgagttcaaccatgcaattgttttcttatcccatgtaagccatgccttcaattgacaaggtaggtatcaacatatgattttagatctcagcttgtggcgctctgttgacatggatggccaaaaaaagagctatcggtgaccttccacgagaggacaatggttccataagcgttagcggtatcgagacagttacaccgtctgtcttgacaatctttctacttctgttttttatgagtatttaaccatgatatctgttatatctgcctttttttttactccagagtcgagtttatgcagatcagtgctgatactctctcgtaagaacatgtgatctcttcaagcgcgcattcatgcgtcatctaatcaaggagcgattctcttcatttcatgaacagatctctggggatatttgagcatgagtcccacgcatacactcactcctctgcaactaaagaaggtctatctctctatggtaagtgaatatgtctggctctgtactggatgatctgttcatgagagttctgaacatgcgcagatacatgctttgattttatttgtcagccatcttgaatacgacatacacgcctcttggacaaaagcttcttcaatcgtggcttctacgcccgttattgtcactgaaagatatcaaagcgcgtcatgatgctgtgggggtttttcatcacccagaaaacaccgtaggtgtagatgggatcaagggccttctgaaaggaatgggtaacgtgctggcgatcttgaaacggatgaggcaaggcatcacgaagtggaaggattggaagctcttgcttgaggtgagcgcacttgatgattctgaaaaatgaaaagatgccccctgatcgagaatctggttttgcacagttttgcttcaaagcggttcaattgagtaagttcaactgatgacatgattgtgtttctacgctatataactgaatcttaatctatttgtcctttctatgtatctttattaggagagggttgtttggcgctcgtgggttctcattcgaagaatatcctgaagctggtatgatcgattctatcccagagcatgattgttcgaacgggatttactcacgcgctacaggttatgtaggtcaaagaaagcctcgacacagagttgttctcttctatcggctcgaggctcaacgaagtcgtatgtaacaagagtcttgacggcgatatcataccttttgttaataattgctcacaaatatttcttcatctgagaaagattgattgggacgaaactatcaacatcggtggagatagagtatgttgtaaaggaggtttggacgctgagctagacgactggaagcatcagtatgctggattggattcgttcttggtacgtatccttctcacatcaatcaaaccatccagatcaagcataaacttcttgacgcctgcgtttaccgcaatactttgctctcatcggttgcccatagatgcaagtggccaaaacgttaggccaagatcttgatcgacagattgtcaagaattttcatgtgacctattttccacagctaggatttcaggttgctgtaaacttggtcaggccttgggaccctgatggtgaagaatccaaagtgttagctgattgggagtaccaggttcgccgctactatgacatctgctgtgcggataatccaactcaaatgatttgcctaatttgtcacagttcttcacagagtgagcctaggctggcgcaggacgactgtgttgagatttaagctgacctccgttcgtctatggcatcagtgagagatactattttaaaacaccacaggtaagtcgttcgcatcgaaatatacatcttgtgctcaggtattgacattggtactcaaccttggattcttttccagatgcgcgaccttgacagccactttggggatattgatagcaagattgctgaccgtgagggtgggtatttaggcttgatcggattttctcctcctactgtctattaaattgacgctataggaaattctcttttccagtcgagattttatttgatctggcggaatttgttcttgaaagctcatctttgatcgagaaggccgtacagtgttgctcagagctggattggtgagatacttggacaatatgtcatccatcacaggatcatttactatctcttcattttgatcccagttgtatcgcttttgcgtcagctgcgacaactttcgagcttaagcgcccgaccatgacggaagagaatattcttgagatcaaggacggaaggtatgtaggcccgaatgatcttcctcgatatgacgtactcgaccgttctgatggagctcgaattttgaacaggcatcccctgcaagttagttgatggtgtttccactcaaattcgatgaatcgcatgttcaaagtctgagaggttatatgtaaattcaaaaggagcttgtcgaagacaattttgtcccaaactcgacccttctttgtggaggccgtggattcgattggcaaacgaaaccgctgaatgatatagactcggacgaggatattctgaagagtgtcatgattctaacaggcccaaatgctagtaagtgtgacatttcctgaggtctggcaaagcatttgaaagctgatcatttcacaccgtaggtgggaagtcaatctatgcaaaatcagttgccctgatcacatacatgtacgttcgttgaacactctgtctacgacaggaacctttgttgatgccgttaatgatggtttttacagggctcatatcggatggtaagactttctcgcttccgtctcaagaacctgcattgatatgtattcggctcgagatgacaatttctctttagttttgtgccctgccgagaggcgactatcggtctctgcgacaagagtaagtgatgcttgagcgctttgtaacttgatctcgacctcattttgtgtttcacgacatctagtcttcacccgactatcgaccaaagagagcgtgtccaaggtatgctcatttatgttatcatatcaagagtcctttctcggaaatatgttgaagcaccatttcttgatccatctctatgcagctgcaatcgtcgttcatgattgatctatctcagataagttatgcgcttcgcaattcgaccgctcggagtttgatcatcgcagacgagtgagcgcgcttcgctttttatgatgaaaatcacacacgatagcttacacccttcttctatttcaggtttgggaaaggaacagtttcaaccgatggggcaggccttctggctggagtcatcatgcatctacttaaccgaggtcaagcctgtccaaaaacaatcatcacgacacattttcacgaactgttcaccaacaagctcttgcctgcaaaccttccagtattgtttgcttcgatggtcagtatgatgtgattcgagcagtctgaatgcacggagaggttgagtatcttcctttcgctttcaacacaggatgtgatcgtccaggacgatattgatgatcgacggacacataaaccaatcacctacctttatcggtaggaaaattcattagtcgaccaaaacgcaagttttgcgcgcaaatcttgacgtcgtgtttctcttgtttttttttccttgctctgcttctgttcagtttgactcctacactatgcttgaagtcatacgctgcagattgcgcacaatctcaaggaattccgctgaaggtgatcgagagaactagacaagtggagtaagaactagttgccttcactgaccaaccatgtgaacgagcaagtcgttgattattagaaagtctgttcttggaacttctagggcatatatctcccgatttgaatatctccctcttcaaacgctgatgttcgagccacaagagaaagcgtatgtgttctatgtcaattcaacccaagagcgatctgtgtgaaccaagctgagtggaagaatgatgtgcttgtcgctttctctgtctgtctctctactcaattctaagtgacctggttgccgcagaaggttgttgtcgagcgtttctcgagttggacattgatcaagcggtcgagagcggagttgacctcagagaaagactgaaggagatactggcaacggatgagagcaatcatctcagcgaggatgcagcggacggcacgagtggcaactaggcgcgggtgtgtgtgtcgttaggattacgtgtttgcatggtaagaacaaatggagacggacgtttacgtaatcaacgacccacacgcgcggaaagaaagcactagaaacgactagagaagaaaactagagaactgactagagaacactacaaaatcttgagagagcacgatgagatcaccacagcggggccgcatgtgccgtcgaagatgcgagaaacatctaccgcagaaagaaagaaagaaagaaagaaaaaaaagtctccccgaaaaagttcataaagccaacgctgttggatttcctgtgtttctcctcttttatcttttcttccatcacccggattgtaccagttcatccaccccattctattaaacaacaaataaacccttttcatatctatgtaggtgtcttccttcgattggctttctttcctggcttcactcccgctgccttttcgagtcgataatctcaccatctttttttcccttctttttcgcctctccaccctagaactaatcatgtctgccggaaaaggttggtttattctctcttttcctttgttcgccgtggcgacaccgcgctgaccatcttttgtccttcacattcactcagctatcggaatcgatctcggaaccacttactcctgtgtcggagtgtggcagaacgaccgagtcgagatcattggtaggtttccatactactatctgactcccctctaagagcgcatatctaactatccccaaactacatcagccaacgaccagggaaaccgaaccaccccttcttacgtcgctttcaccgactctgagcgattgatcggagatgccgccaagaatcaggtcgccatgaacccgtatgtttcgttgatttacattattccattctgaatgtatcaataactaatctcttcgcatttttctcatttagcaccaactccatctttgacgccaagcgattgatcggacgaaagttcgaggactctgaggtccagtccgacatgaagcactggcctttcaaggtcatctccaaggagggaaagcccgttgtccagatccagtacaagggagaggaccgaactttcacccctgaggaggtttccgccatgatccttaccaagatgaaggacactgctgaggcttacctcggaaccactgtcaccaacgctgtcgtcactgttcctgcttgtgagtcaatcctccatctttttacatcttgactcctttgcttactccggttctctttcgatcaaacagacttcaacgactcccagcgacaggctaccaaggatgccggagtcatcgccggacttaacgttctccgaatcatcaacgagcctaccgccgccgccatcgcttacggtcttgacaagaaggtcatcggtgagaagaacgttctcatcttcgatcttggaggaggaaccttcgatgtctcccttcttaccatcgaggagggtatcttcgaggtcaagtccactgccggagacacccacttgggaggagaggacttcgataaccgacttgtcaaccacttcgtccaggagttcaagcgaaagaacaagaaggacatcaccggaaacccccgagctcttcgacgactccgaaccgcctgtgagcgagctaagcgaaccctctcttctgccgcccagaccaccatcgagatcgactccctcttcgacggaattgacttctacacttccctcactcgagctcgattcgaggagctctgccaggatctcttccgaggaaccatggatcccgtcgagaaggtcctgaaggatgccaagatggacaagtccactgtccacgagattgtcctcgtcggaggatccactcgaatccccaagatccagaagcttgtctctgacttcttctccggaaaggagcccaacaagtccattaaccctgatgaggctgttgcttacggagccgccgtccaggccgccattctctctggagatacctctgagaagacccaggacttgctcctcctcgatgttgcccctctttccactggtattgagaccgctggaggtgttttcactgctttgatcaagcgaaacaccaccgttcctaccaagaagtccgagatcttctccacttacgctgacaaccagcccggagttcttatccaggtcttcgagggagagcgagcccgaactaaggacaacaacttgctcggaaagttcgagctttctggtatcccccctgcgccccgaggagttccccagatcgaggtcaccttcgacattgatgccaactctatcttgaacgtctctgctgccgacaagaccaccggaaagtccaacaagatcaccatcaccaacgataagggacgactctccaaggaggacattgagcgaatggtctccgaggctgagaagtacaaggacgaggatgatgccgccgctgagcgaatcaccacccgaaacgccctcgagtcgtacacctacaacctccgaaacaccctccaggacgataagctcgccgacaagtgggatggtgaggacaagaccaccctccagaccgctgttgacgaggccatcagctggctcgatgcctctgctgaggcttccaaggaggagtacgaggagcgacagaaggagctcgaggccgttgccaaccccatcatgacccgagtctacggtgctggaggtgcccctggaggagcccctggagctcccccgcccgctgcttctgatgatggaccttccgtcgaggaggttgattaaacgatctaccctctcctggatttaaagactgataaatataattcccactagaccagtgtctatgtccctttttactctgtcttttaatttctctccttcgtcttttgttactctcacgacctctcgttgttcctttaaccttgttctattcaaaaatcctcacgcaccatgtgtccctagtacttgcattagtttcccgttctcctgtttttttccagagcttccaattacaattgaatggttgccttataataacactttgagatctatcacaacatgagtaacatgagcaagcatcctgatcaaagcacttcctccctccatgtttttattttattttcttcctgcttctccaatcgtctcacatgaattggctcctctttctgattcgaactgcagagacgctggacaaataagcacaagactgtgtgatgtatcttcttcagtggtctctttctttgaacaccctcttctcttttgctgcacatctctcgacttataaaattcaatctcatactttgttcattcgttcactctaagaaatcaagaaaagactggaagattcctcttcttctgtgtgatcctggtcatgcgagaaatcaaagtacgtcatctatctgtgatgggtcggccgaacctaatgctgggatgctcctccgctctgaagttatcgaaaccaacaggccgaaccatcaacgaataaaaaaaagaagaagaaaaagaaagaaacagaaaggaaaaaaatagacaaaatgatcatcagatattgaaggcaatagagtgacaaggagatatgacggaagacgaaccatgacggcctccaactctgcttcttcgatcttcaaggagcccaaccagaactttctcggtgacagcatatcgtcctcataatcaaactttccagaagatgccgcctttttttttggtgtgggcgaagatggggatgatgatgatggcgatgacgaggaagaagaggatagggatttgaggaacggagattcggagagaagagcaggaggagcctgagagtgaggtttgggagtagaagaatctgatggtagattaaagcgcatatgagtgaatgtcagatcaagagaataacatcagccagccaagctgatagagaacagtaggaagcaagagacagagagaagaagaaagaaggaaggccaaaggagggcaaaggaagaatccaatgaaaggattcgtattaaacgagaagtccagtgaagagaaatggtcccaagacttacgtccagcccatcggtcaccgtttccgatgaacttgatagaaggcgttcgctgccattgagcgagtagtctaagagaggatcgcatgctgaaagtgtttgggtgggagtcgatgaaagcagggagaaggatgggataggattcagaaggtgagtgcgaaagaagcgaacgtaaccaattcgtagccacggaaactgccgggccggaaggtcttacccgaaaagacccgatgagggccgatatagcttatcacgtgtttgttacggccatcatagacacagcctggccatccctcgtctgactctcattaatctaaaagcagcaacatcagcagcacacacagccatacacatactacaagaacagagacaactgcagaagagatgttgagtggtcaagctagaaagcgtacaggaaagaaagtgcagaaagatgacacgcctgtagatgaacaaggtatgtttctttgtcgaacagtgaagttcgatcaaggagttgtggaaactagcttaagccttctgcactctttatctatatacatcttcacagagcaagaagagatcattgagggtcttcgggaggccgcgctcgtatccaatataacaaccaggactctactcattgttctcgttggactttctaccttggtgtgagtttcgctgcaagctctttccccttcctcggctacatccgtatcgctcatcacgcaaacctctctctatcatcagccacatcattcatttctcacccttgatgtcatccactccgcctagcctgttccttctcattcaaacgatcttcccgttgttgatctctctaatttctatcccactctctacatcgtacacattccaactaggaaatctagcagccgcgtttttccctgctgtatccaaacagttattcacacacgagtccgtcagtctgtgggactttctgactcccattctcgtcggtatagtctggagagcaaacatttggatgtcagagatcctgaagaacgtggaagaaatggaagggaagaagtacaagctgaagggcgcttagaacgagatttgatgaaaccttgcgcgcgtctcttttcaatttgtcaaagacgcgaccaaaaatgagttttcctttcacgtacatccatcaatcttcgaaatctcacatacacacatacacacaaaacacaaatggccagactagtgaataaggtgtcccgaatagaatcagaggaagaagacgagctggaagatgatgaagaggcagatatcgatgaggtcgacgagatcggggatgaagaggatgatgtttcttctattcccgtccgtccggctcgaggtcgacccggagcaacctcttcttccgttcgtgtctcttgtctttctccaactctttttctcctcctgttcgatgtttaagtcgcatggacagtttgatgtatgagcaaagctgacaacagattccatggacccctcagttgagcgacgtagatggtatgatcttctagttgctctctttctccctatcctcctttgacttcctttatctaatcatctcttgtttctttgttcttcctgcgaacgcctgatcattgctctcttgagatacagcaaagaaatcagatccagaagaagacatgatcattgtcgaaaaacagcaagactcttcggacgacgaggacgaggatgatgatgaggagcttgatgaggaggacgaggaggaagaagacgaggaggaagacgaggaagaagtagaagaagaagatgagctcttagaggaagaagacgaagagcttgagtacgaagaagacaaagatggtacaggaaacatttcttctgcctcctcgacaacatcctcgtccgcttcgggtagaaaagcaccctctacgacatccacaggagcacctttctcggaatcagggacaatcaacgggtctaccagcaaagcaggatcaagcaaaggcggaccagtgaagatcaagttaatgctcggtaatcgagccgtcggtagcagcagtggctccggggcgggtacatcaaacagaacgtccagatcaagacgaaagttgaagggttcgtctcttgctcaaatttagtgtgaatgagaaagaagagaaaagcgtgcagctgaaatcaaagtccatgactgtgtagacccaggatcttcagattcaagcgcagatgaactaggtcagagccggacaaaggatttctcaaagatgactgctcgtcagcgggctgctcaaggcaaagagttctatgagccattgttggtgttggaagaaggtctatccctttccgccctctctttgttcttgtgtccaatcttgcacaaatttctgacatgtgctctgttgagccctccattttgttcaggttcgaaagcacttcagctaacggcagctgaaaaggaagcaaagaaggcagagaccgctcgtcgacgaaaaaatcagagcgagaaaaagctggaggatgacaaggtatgcctctcttttccaccttgttgctataatcaaggtctccaataaaactccttttctcacattttgctatctctcttcacgttacaatatatcagatcgaaacggtcaatagactactcaaggcccaatcttctcgatcaagaggcaaagcctccgccgttcttctctctacctctgcctctggtcctgcgaatccaaacccagcagacggtacgaattcatctgaccaacatgcctctgggatccatacacccgcaccgcctcttcccacagcgtttaggacaattcagtcgataaagtctggcgcatacgagatcactctgtccgcacccctcaatcctgcattcatggccaagcttgccaaaccaattgatcgggaaaacaaaagaaaacaaggaccaaagccggtgtgttcggttgaggattgtgggaaggagagaaagtatagatgtgtaggcggggaagacgcgttcgagttgggtggttgtgggctggatcatcttagaactgtacagcggacaagaatagagaccggaattctttagtttagctatgctcttcctcgtgttgtatctatgaaaacatttcaatttttggcgtatgtagtgtgtgcgtttgtgattcttgtcggcctcgtccttgaccgataaaaggttgagtggacaacgtggggagatgaaacagttggaaattatacggactgttttcttctgttttcatctcctgctttctcctcattctttgacctccaccctcgttcatccttggtatatagacagaggatgtacatcccatcgccttctattcttcttccttttctctcttacattcatcaaactcccttcagcccatcccacaatacagatacagcatccatcatggccacccaccatcaagctcaagcaccggccaaacccgatcacgcgacgttctcaaactatcttgacgttctcacgactcattttgacttggactgggaaatcaactggaaagatcaaatcattgggggacatgtactcctagagatggtcgtcttgaaacaggatggagtattggatgaagtcagactggatactagagatgtctctgttggggatatagaggttgacggggtttctatcaaggtgtgtgtaatcgctcgttcctatatatcttctctcgtcgctgatttcccaatatgatgaatgagagctgttctgaggactaacacttccgctcggtttgtccttcttcgttccgatcaattggtcgatcaatgaaataggactacaaattcggtgaacggcacgatgccttcggttctgtccttcatattccaattcccaagaccatgaaatacatcaaggacgacaaactgtccgtcaaagtgacttattcgactaccaaaaactgctcagccttaggatggctcactgctgaacaaacttcaggaggaaagcatccttacctgtattctcagagtcaggctattcatgcaagatcattgtttccttgtcaggatacaccgtctgtcaagtcgtacgtctcttcatctgagaaagccctttcctaatgatagcatcttctccgcgccactgttgacatcttgttcgagggtggctgtatcgctataggacgtactctgccactgtcaaatctactctacctgtccttctctccgcttctcgaatctccccgcggccagaagaacctatcgaaccaggcaaagatctcatcgtcttcaagttcaaccagcctatcaagatccctgcttatctagtagctattgccagtggaaacctcgcctacaaggctttcaaaggagggagggaaggagagaagggctggtccacgggagtgtggactgagccagagaatctagatgctgctcattgggaattttcagaagataccgcgaagtaaatccttgagttgtctcttgttccctttcaatagaaggggtcacgtctcgttgacgataaacaattgttttgatacagcttcgtgaaagcggcggaaaagttgacaggaagaccttatgtctggggatcgtatgatgtgttgctccttcctcccgccttcccctacggtatgcattcgttccctagttctaaaacgaagtaattgaacatgattactgaggtactcaagggcttctgacacttgtaaaataatcaggtggaatggaaaaccctcagatcgtacgttctttctatgtcccgtctgacgcgttcttgattcttatgcgaagccggacctgactcaagtcaacatgcttgtctctcatccgggctgattggggaatagaccttcgccactcctacgcttcttgcgggtgatagatctcttgtggatgtaattgcccacgagatttctcattcttggttcggcaacgaaattggtttgtattcttctctgttcatgttcaattccagatgcgttggtctaatcataatgtgtttttattaataggatgtgccgactggtctcatttctggttgaacgagggcttcactagtcagtttctctttttcttgccttctatttatgtgcttaactcggccttcctcttgttcttcgcagcctatctcgaacgattgatcatgcaagaggttcacggacccgcagctaggggtctctcgtacatcattggaaagaaggcgatggatgactcgttaaaggaatatgaggaagcgaagttgccgagattccagcgattggtggttgattaccatgatggggaagatccagagtcagttcaatctctcaacaaagaaagacgttcacatagagaaaactgacggttaaagattgaattggggattcttacgttttggcaatgattaaagtgatgcattttcaagcattccttacaacgttcgtttcagactaagaattgtctatctggagcaacttttatctgaacaaaatatttttgcgcatcacagaaaggagcgaatttcttgctctaccttggtgagggtttttctttcagcgtccctctcttcttaatctaacacaacgcatgtcatccgaatcactagaacaaactatgggtggactcgacgccttcttaccttatatccattcgtatgtcgatacgtttgccggtctatcgatttcgaccgagcaatggagagaacatctctatgcgttctggaagaaacatgggggacatcaggccatcgagaagtgagtttttgctttaaaatcaaggttaagtggctgttgagaacaggcgctaaaattcaggtggaacattttctccggaaaataaggctggatgcggtggattgggatggatggttaaacggtgaaggattgaagttgcctgttgccattgaagatacctacgacactagccttgccgatctcgtatgtttctgcttcatctgtcttcgcttcacttcacatctcgttcctgtacagatggaagccatgctgatcaagaacttctttcgaccattcaaaaaggcttttgacctggcagcccgatgggaacacgccggatcagatccagccaagctatccgaattcaaaaagtctgacatcgagaagtttgaaggagatcagacggttgtgtttttggagaagctgcagtccggaaagaaaccgatgggtgtcgaggcggtaaggaggttggatgaggtgtatggactgtcgaaggctggcaatgccgagttgtcctctaggttctttgaggtatgtggtcttcttgtcttgtcaattgatcagtcgcttatagaatatccgttctccttctggggaattttagattgctctggcttcgggggatgaatacgccaaagacgcagctcactgggttactgataaagggcgaatgaaattctgccggtacgtcttttcctctcaaatggatttccttcggctgcacatttctagtcttataccttcttaaccttgtctgacctttctgtgcaatacattcaacgaaaaagaacgatctacagggctctattcaaagtgacgcccgagttggctatcaagactttcaaagcacatagtggattctaccgttcgtcctgttgttcttcgcttagtgtttcttctaaaccctttggtcttgtagaagacaatacttgaggttcattcagttcttttttcttctcgatctagaccctatcgctcgacgaatgattgagaaggttggttttatctctttctttctcggctctcctttgatgtatctgctgactcatgttctttgtttctgaatcttttgatatctctcaggacttgggattgcttgcttgagcatgggagtgagagtaacacaattggaaacgaagttattcaatgggatattatacaatgaatgttgaatctgatggcgttcacttggccgataataatgacagatatgatgaaatgagaaagttatagagggactcacccagtacatcacctgtctactttattaccgccgatcttttggttctgtatggatgtaaaacttcgaaggatgctagaaccagcgagccttcctgtgataagagtaaaaaagagagagggtagatctggtgagtgaagtcgatcagtgaatttatcacgaggcgattatctgaactgtatagatcactagttgagtcattcacacggtaagtagtcgattgatcctgaatttggacaaaataggacacatgcgcgctcatcgcacacctctcttgacccctcgtttgaattattgattcttgttcatgttcagtctagaatgagaagacgaacacgagagaattacctttgatacaagatcgcatgaagaagagataaccaaaaaaagatcaaggggaactgagcaggtatctccctcatgttaggacgtctatgttcctctctgaacctcacaagccataagtgagaaataaactagatttcttttccgatagtttcctctgttggccgaacctcttctcctctctccttttttccacgtggtattgtttcgttaaaagtcccatatatctttatgacacctttccttctcatttcctcacgagatataaaatgacaaagtatcgccaagttccaaaaacattcccaaaaatccaaaataggaaaccgtttgttctgattgctttaatgcttgtttgtttttggatgggtgggattatatgagaccaggcagaaccacaaagacaaggcccaacaccgaaagaaacaagaaacagaagaagcctctgaaggaataaaaacttacaaaaattctctctttttgcttcttgaaatacatcctatttggttgtttctagggccgtttgtccgccaaccattctctgtttaagatggaggaagaagcaggcattagtttgagggtcgagttgtgatgagatgttttcgtatacaactttatatacgtacttgaacaaagagtcgactcctcggaagaggacttgttggggaagcgctcggatgacttcaaaaggagatatcgatgaagtgtcagtatccgaatctcatttgttatctgtttcatgaggaaaattagacaaggaaagacttactctccgccactcgatcatttaccgtttctgttggtactcccgctttaacagccatctcaactgccatcttcaaaactgccgagacagctgtactaacactctgacccatcgcactacttgctgctgagcttgttggagtcgacggattgaccactcgaagtagaatatctgatattcgatccatttcgacaaggtgaagctttacaaatcgacgtctctctcgagcggtaccaacggtagagttggtagcccaggagtctagactagagtggatagtaggggcgagtggagcctaacaacgccgataatgaatcagggtcaggatcaagtacagttcttgctctggatacaagaaaaagagaaggatactcgcttcttcgggatctaagacttcgaacttatgtcctctccaatcctttgcatgtcccttcgaacttggaccaaacgtgtccaataggaactcttcagctttaccagctttgacccacttcggttcgctcaaaggtttttcttggtcgaggtaggcgattaatttgaaagtgtctgtcttcaaagtagggaattgagccgattgaggcgagtcgggggaaattaatttgtgaatcggctagattgaataaagtcgagaaacaattaggtcggatcaaacaggcaaaaagggatagcaagaggtttgaacggaagcgtacaggtgtccaaccagcgcaaggatcctctacttcatcccacatatcttccaacgtatccaaaacgacaggctggaagtggtccgtttcttcctccaacaattccatctttgaccaaaaacattgaagagcagttagtgacaaaacctcaacagttatcaaacacttcttgatgtaaaaggacacaccaagataccccgacagatatcccaaacccgatcatctttcggctcttctaccttcaaaccgttctctgatggtttctcggccgccgtgtcatccacaagcgcaggagttgacttttcttccttgaccggttcggtaggttgctcgttcttctcaacaacctccgttttaacttcagccagagtagcatcggaagcagtagcggcagcggtagtatcatcgtcgccactgttctcaacaggagctgcagtttcattggcttccaacttcatagatgagccaccttcaatctcttccactttgattgtggagggagcctcatcaggtggattagcagtgacctctgtcgtactagtcgtagtgtcctcttcctctttgatcttttcctgttctgtcttctcctgctccagcccttttctccatctaatggtgaactccacttttccctctgctctcgatattcgaactctctcgataacaccagcgtcaatgcacaaccttctggtacatcgttcgtacaagatcgatactctgtctggtgaaggttccggtcctgtgtacaacgtcggactgggcttagttgattcagtagggttgggagtagatgcagaggtaggggtagcgatggcgttaggagtttttgatgttgccagtgaggtatcttgagtagatttagtgggagaaggagcggaagatgggatgggatgctgagattcttcacttggaacaagtgaagaagtggtcatggcagtgggagcagtcgagggtgcagatgtgaggatggaagcagaggcgcatgttaaagattgctcttgctgagggatttcgccttgagactgaggcacagaaggttgttcagaagtggatggttcctccggttgagaagtttgaagcaaagctaagacttcagacgactccacctcgtttccatccgtctcttgtggttcattcgcgccagcgtcctgatctctggccgcctcggagggttcttcctcggtatcagtctttccattcgttacaggtttgatctgtacttcgatctgagattcaatttcagcctccggttcagtttcggcctcggtcgggacaacagttgactgttcttcaggatttgatggctcgacttcaggctcagcggatcctcgcatactcaaatcctcgatctcttctccgtcgatgttggacgcgctgtctttcgccgtttcgctctcttcttcctgttccggctcttgctcggtcgaatcttctttctgatcctcttccgtttcttcagcattggatgaaggagcggaaatagcagaagcaggagcggagacagcagtggtggtgacggcagacgcagcgagaagagaagaggcgatggaaggagtatcttccagtttagcagcggactgctttcgctctccaccttcgattcctcctctacgtttgctctccccaggaccggcgcctgcaggtgagtcaaagtacaaccgaagccgactgatctctttggaaacttcttcgattctatcaggattggctttgccatgggtcttgaagtaactccggtgtttggaaggaggttgaccgatggtagacgcctgagtgggagaaccttggttaggatctatcagagaaaataagaggacgttagatggaactgcaactcaagcgaaaagaatggcaagaacgaaaagagagaaagagaaaagaccaaccttcagacccggcgtctgcctttctctttcgaccatttccaccctcaacctcatcctccctatccacaacaccccatttccagctcaattctggaacttctaacccgataatcttgaaatcggtaaatgtctgtttcggtccttcctccttggccatcttggctcgagggacgaccggtgttccagttggagtatcctttttgggcggtacattgccgagggaggctcgggcatggtagcgagtcgaagaaggacctcgaggggcatcatgaggggcatagtccgctcgcgggtgagaactggaatatgctgctcctcgcatgcctgattaagatagaaatagtcaagtggatagttcaaaatggacggatgcgtcagctcaacatgtcaatcatacaagagggacatagaagggatatggaaacatgaatgtgggaggatacgtcgattatgatttggaggcgagttctttcctaagaagaaaggtaagataaacaagggcgcaggaaaacgaacctctaccgcgatatccgcctctgtctcctctcataccgctgcctataccattattcattccaattcctccccgacctccactggacatcggaagtccgccgttcatactcatccccatgggcatcccggatcccatacccatactcatacccatgggcggtggactgcttctactgatgcctcttcctcttcctcttcctctgtaagaggaccctccacctgagtaatcatcgtcatcctgaacaccaccactaccaccattgctgctgctcccaacataccctcctcgggtacttccacctcgactgacagttcctcgtcctctgtaggaggtacctctggaagccatgcccattgaaagcccatctctaccatcaccgcctgaaaagaattcggatccggactctctcgaattatacgccctctcggcattcactacggctgcagtaatcaaaggatttaatggcaagcccggcacgggcgcaggtgagaggcctccgccggcagtgcccccggcagaatgcgagtcaaaccgcggtcgcttagcaggtgggaacccagctggctggttgaacccaccgctgcttccacccggaccacctccactcccaccccccatagacgaagaattagagatatgatggggtgcagacataggggaaggccgtacggatggatggtaactacttccacctccacctccaccagagacagacggagggccttgaccggacggatatcgtcctcctcctccgctaccggcgctcgctccgatctgataaggctgatttggggatccgtagggaccctgggatgggtacgcttgaggtccaacggatggaagtgacggtggtaggggtggaggttgagatcgatatggcggcggctgttggtgctgaggttgatgatgatgatgatgaggcggttgttggggatatgaaggccttacttgataggcaggttggctagaattgtacgactgagggcctggatacgaaggaccggctggttgagggtagctgtaaggttgttggcttggttgactgtaggcctgagctggaggaggtgcgggtgcgggtgcagcaggaccagctgtgggagcaccctgagcttgggcctgagcattcgccgcttgatgggcatagtactgagcccatgctgcactataatccggctgaggtgcgttggccatggcgagagcggtcgtcgtcgatgtccttttctgattgatggtcgtcgtttggagaaacggaaaaatggaagacgaaaagttcgacggcgagatgggttacaatcgtgggtggttacggtcgacctggcttacgtaatgaggccagcgtaaccactattcagccgtctcattttatcttacttgcttctatgaagtcctctaatttatcccattccattccattccatcccatcccatccagcacgcttggttctctctgttaggtctctgtatctccctgttgtagtacgttctgaagatgccacccagaacaggtctttcggggaatacactttccctgaaatttatgaatagaggaaaccccagctcagcctctgtcgcgaaaccttccgcgactgctgcctctttctcgtcttcaaagccttcgacaagtaaatcgataaccaacaattcgacagacggtgaatggttcattccaggatgggaagactcttcgcccgctcctgctactggctcgtcgtcatcagaaactcagaaagcgaacgaagacaagattgaggtcgaagacagttatcttcctttccttctggagaaggatacgggtggacgaagattaggcaatggaggagccgaggttgtgaaggaggacataggagggaaaggaggaaggcggagttttggaggtatcaacaaatccatcgaggtttgtcttcttcttttctttgctgttgaagtgctacctcgctcgatcatcgcgttaacgattatcgtcctctcgaattttacggctggctccgaacccattaacatcgcgcgaacgcacaacagaaattatcccaaccggtgaacacatctgtcgcaattcccgaaacctctagttcaaacacatctacccctccatccgctgtttctacgtcacaaacaccctccacggaaacacaaactggtttcctgcgtccctctggtttcgcctctccgccgtcaaaaagaaaaatagagaaatcagttctctcacaccttcaatcgtcctctggcgcccgatcaaccgcaccttcttctgctaattcttccagatcatccacacccgcctcgtcctctgggatgaagcggttcccacctctgtccaaaaagaaacgaaagtctgatacgatttcttcctctgcttctgaaagcgatggagatgaggaggaagaggaggaactgcagatgttgtatgattcggtggctccaactggcgcgagaggttcaaaagggaagcctcgagcaggaggtataagctctggtggcggcgctcgaaaacctcagggtcatgggaaaagatcgaagaagaatggaggatctgcctgaatgttatcaagattcatgagttattgtcttggagagaatctaagatcatgagtcaatgacagagtagactgaagtcaggatatcaaatatggaggagttcttttgagaaaagagtacagagcaatctgtagaaatggatagaggctgcgcaaagcatgattaagatgagaagatgcataggtaaataaattgaaagaaatcgtggtgatgtgtgacgtaaagaaagaaagaggcgacgaaaagaacaaaaatggataagacaagaggaaatcgaaggatgagagaatattgaacaaaagagtatatccaacaataagaagaagagaaaagaattcaaaccaaaagagaagaataaaagaaaagaaagtgctcttaatcaagcttgtactgcttctcgacctctctgatcgcctcctcctcagaaacgcctcccacccgttttctgttgatgacttcttccctggtcatgaccgtgtcaaacaagtggtcccatctggtgaagaacggttgtctacatcatcaagccagcaacgcccatagatcaatacggagtaagtaagactggaagtaatagtgaagaagtgaaatggagaagaaagataaacgaacgaaaagtttttcttaattccgaatgattgatgatggatatcatgataatccgcattgttcgcaaagagcatctgatgttcgcagatacagaaataaccatgaacagacagaagttagcttgaaattactagtgtcaaatgaagcatgaaagactgcagacgaacctgcatcggatcccaccaaagtctgtacccggaatgatcatccaccgttttcgcactactgaacccaaacagaagaattgtttgtctgaccgtcatcccactcagccattctgccatcgccgctcctacagaatccaacaggagtccttcgagccagtgattatagagtgcaccaaatgcgtaaggaacgtagagtctgtgatgatgagaatggaagtttcggtatagatatgggacttcgtgcattgtcttgtgcaagaagaattgatgagtgtcgatgatgaagctgggaaagtaggtcgtacaattatttgtggaggaaaagaagtccacagaacattagacgtcgtgtcggcttttgtatgacgaattctcgagaagagaaagactcacaaagccaaaccgaactgaaagatgggaacaccccaccaataattccactctaccagtcctctgccaacttcgccgcctgctaagcctaagaagtccgccgcgttcttcggtccaagcaagacagaaacggctttgcctacccaaggggcatacgactgcatggcttccaagtgattaatcctgatctgagtgcggaggatctcttcatcggatgataaccagaagaggccaagaattgtttgaagaacatgttgaagtacaacagctttgattaactgctcaagatatcatgaacgcatacaattgagggaatgattagctttcagatcaattccagttggctccacatataaagacgtagaggaagaagaaagaatccgatactgacatccgcaaaagaaactctgttccttcgagtgacctcttcactctcatgaatccttcttttttcaaaatactcgaattgtgcttcgtccagaaaatagaataggccaccgacaatccaatagacaaccaccggcgtcaacacagccagatagcggtccgagacgaacggcaataaggaatctctctgagcaagatatatcggataatgaacgtcttgaggaagaagtgatgctgtaaggttagagttaaccggaaaggatggaattaggtaggagagaatgccggttgacatagtcgtgtgtttatgtgaagtagaagcgtgaacccgatgtggatagggagaggccgtaacgagggtaagagggtagagtaaagaccagatcaagaatcaaacggacggtaagataagagaaaatggaagcggaatgaatggatgcagacttcttgatccttccagagtcaactgagagtagaagagtggcagagtggggaggaagaaaggaacgagaaggagaaggagtgtatgttttgtcggtggaggtctcgatctgatccccggttggcaaatatgtggcagtggtgtcaggtgacttatctacacagctttgtggctaggtggagccaagtttacatcgccttggtggctgatatacccgcgctgcaggagcatttacttcattctacagccaaacgaaaacctcatggattcggtgtatactacagaatagatatcctcttttctcttgcttcactggtcagatttattatcagttgatcctgaccggaagaatcctcgtcgtttgatgggatcagccggctttgagtctacccctgaaccggcaaaggaagatccagatccagcaccgaatgagacggcatgcgagttcatgactcgtttagatgcattcagagcggctctgtaagaattgagttgagaaaagccaaacacatctcaggattttgaagttttgcttgtcctggtatttatcactgactaaacatagataagactgcatacttactggctggtctgagtgatatactcgtcggattgtagtgctcgtttatctgtcttgatggacagcccatttttatcataggttcttcaggcaagaggatccggatgaatgttccagtattgttgaacggaaaatgcaaaaacggagcgcagaattagatcaggttgattccatgtgaactacatcaaacagagttgaacaagcttacactcctttcgcttgaagttgttgtttagctccatcgattccttgtgagacttttccctgaaagatcttgactccgtctatataggcataacagtatcagtgtcgacctatatgagaagatgaaacggataaaggaattggacgtgcagcaaacggccacaaacagaatcagagggaaaatgctagagatagtgtccctatggatgttttcattttgaatgaggtgagcatttggtagaatgtgcaaaaagaaaggcatggatctacagaccagatagatgccatattgatgagtttgactgaaaggttagttgatgcaaggaaacgtacaacttacaaagaagaaagattagtctagttgagcgtgtgagtttagagcgtcatcgccgtagaagggcctagggttaacttggggcatatacttgggcaaatatgggtaccaggaacatagacacttgggcaaacatgggtcaaattccggtctcgtccggggtccacaaattttgaatatacgcacataaaatccttacaaccttcccacactcctctctacacacaaatacaagcatagagagatgtctactatggaaaggcctgcaaaggcccatcgggctccgacttcaggtcggtcggccgagaagaaggacaagaacaaggataaagacaagtctagaggattcaacgataaggttcgtctcttagttatcatcggtattagcgtcctcagtactctgtttcttcgcctatgacaagatataaggatgccgactaactgtattgtacgcacatacatacacaaataggctttcgcccctacttctggaagaaatgcaaacatacggggacgtaggaacgctgagaaggatcagactagacttcacgtcccgctcgttgatcgaacacccgatgaggagcctccgccagtggtgattgccatcgttggacctcctggagtgagtcttcttctgttctttcgtagttctgaattctactggggaagctcgggatagagcagagagagtccagagactagacatgtagttacaattcgacgggaggagtgtgctccgcagaatcattacacggctaagaagtcgttcatcattgcagtccactgattcttttgcattcgtcttcactttgtattcctttttgctccatatttaaataaccattctaggttggaaaatctaccttgctcaagtctctcgtcaagaggttcacgaagcacaacctttccgagatccgaggacctgtcaccgtcgtttctggttcgttttgtttgtttgactcgatttgcgacgattcgcgttgtctaatctcttgatttgtatctccgtctctcctactccgaatgttgaatcaaggcaaacaccgaagactgacattcatcgagtgcaacaatgatctcaattcgatgattgatattgccaaggtggctgatcttgttctgttgatgatcgacggaagtttcggtttcgaaatggtgcgtcattctctttttgtctagtgcaaagagtttcccacaaaaaggtagaagaacatggttctaaccctgatgcttatgcttggaaaccgataaaggaaacattcgagttcttaaatatcctccaatcccacggtttccccaaagtcattggtgtacttactcacttggatctgatcaagaagacggcgacgctacgtgcgcagaagaagttactcaagactcgattctggaaagagatctacgcaggagcgaaactattctacttgtccggtgttttgaacggaaggtatcctgataccgagatcttgaatctctcgagattcatcggtgtgatgaagttcagacctttagtcttccgaaacactcgtgcgttcttacatctgctccctgaggactcggatatatgtttcgaatcaaacacaaaagactgatgcctcgagttcttatttctggagcacagatccctacctggtggcagatcgacttcaagatctgactccgcctcaactgatcgcggctgacccgaaggtggaccgaaccatcaccctgtatggttaccttcgaggaactaaccttccttcttcaggcgctcgagttcatatacctggtgcgggagatttaacaatttcatcgatcgaaaagttgaaggatccttgtcctctgccgacggccgatggtgaaaagagaaggaggatgggagagaaaggaaagttgatccatgcgccgatgagtgatgttggaggtatggtcttcgacaaggatgctgtctacgtgaacgtcatgggatcgttcacacgtaggaaaggagacgatcttctcgatgaagacggcaagccccagggtttgtcctttcttctttgttttcacctctgtatcctgctttcccacttcatcctggtccgatgactaacttcttgatacacttcatccttgctcacagtatatcaaggagaaggtgaaaagatggtgatggatctccaggacgttggttcgacactaggagaacgaatcgctcaatctgatatccgcctcttcggatcttcatccaagcctgttgattggaagtccaagcagcaagctggagctaggttggatgagatcgaggatgatgaggacgaggacgatgatgatcaagacgagtttggatctgaggatgaagatgatttcggatctgacgaggacgaggaagaggacgaagatgaggaagagcaggacgacgagggaggggttagaaaaccctcttcttcaggtcgacagaccgcccgaacacctcgaggacttccatctttatcttcctctgccatcactagcaacaagaaaccatccaaaaaccgaccttccggaacaggttctgactctgactctgactctgacgtagatctctctggagcgagaggtttcatccaagacgacgaagccgccggggttgatgtgtctgacgattccgacgtggattccgatcttgaggagacgcctaggtggaagtcagatttggcggaacgagcgttgagcgcttacgaagaccggactcgatcgaaaccccgaaacttgatgaaactcatctacagttccgagttgacgccggaagagattgctcatccttctgctaatgattcgaccgatgtgtcaaacggagattccaacgagttcttcaagagaacgtcttcgggcagatttgatggggctgaggagggagattcgatgaagacggcgatcgatctgacaaagcttggattgtgggacgaagaagggatgatcggttcgatcaaatccttgttcattaccggcgagctcgagggggatgccgctgctggtggtgatggtcaggagggctacgagagtgagggtgagggaggtgatttcgaggatttggaggaagaaggtggaaacatggatcttggagacgatgcccaggcttccggttctggctctgcgtttgatgatccagagatgaccgaggcagaagcactggcctcaaagaaggcggcgctgaaacgaaaattcgacgagcagtacgacgacgcgtccgatgaggagaagctcgacttttatgataccaagaagggagagatggcccgacagctccagctgaacaaggaggagtttgccgacgtggatgaggaaactcgggcgttggtggaaggatatcgaccggggtcataccttcggttagaattgacaggcgtgccgtgcgagatggtggataacttcgatccaaagttcccgatcatcgtcggtggacttcttcctgcagaggagcgattcggattcctgacggtccgaatcaaacgacaccgatggcacacaaaaatcctcaagacgaacgacccgttaatcttctccgttggttggcgacgattccagtcattaccgatctaccacctagacgaccattctatccgaaaccgactgcttaaatacacaccagaacatatgcattgtgctgctacgttctacggtccggtctctttaccaaacaccggtttctgcgctttcaacactctagacggtgctcaacctggcttccgaatctctgcaaccggtgtggtactcgatgtggatcgatctacaaagattgtcaaaaagctcaagttgacgggtacgccgttcaagatttacaagaacacggcattcatcaaggagatgttcaactctcagctcgaggtcgccaagtttgaaggagcgagcatccgaacggtctctggtatcagaggtcagatcaagaaggtcatgtcgaagcctgaaggagctttccgagctgctttcgaggacaaggttctcatgagtggttagtctaaggggtttttctttctttctttcacactctctgtttttcaaagctgaccattacttcttatgatcacaaacactacttcaaagacattgtattcctgcgagcatggctatctgtcgaaccccgaaagttctacaatccggtgacgtctctcttgttggccgacaagtcttcttggactgggatgaggttacttggaaagattcgaagagacgaaaagataaagactcctttgcctgtggattctcattacaaggttcgtttctgtgtcttcccttggtgtgtatgtgcatatgggggtttgtttgatattgaccattggcggaactacacacgcacatagcccatcgaaagaaagacccgacatttcaacacgctcaaggtaccgaaagcactgcaagctgctctaccatacgcttcaaaggcaaaggttacgcggccgcaaaagaaacagacgtaccttcagaaacgagctgtcgtcatgtcagccgaagagaagaaggcgaccgcgttgttacagcagatccagtgcgtatataccgagactcccgctttcgtttcttttcaagattgtcattttgtgatcgaaatatgtgctgacggtgggtgttctctttgtctttgtgttcacataacaggaccttgcgaaaagacaagacggctcgacgacacgccaagcaggaagagcgaagtaggtttttttattttatatctttctatgatttttttccttctctttccgaatcttgtcatcacagggtggaaggaaacagcgtattgaacgagaattctttctttacatatctggaacgaacaaacaaaacttttgctaatacagaaaccgaacatcgaaagaaggccgaagagaccgacgaacgaaagtcggacaaaatcaaggcggaacgaaagaagctgttacggaaccaggcgatcaaggcaaagcacgaggatgccgacggagggaaaggacgaggtggaaagaggcaaaagagggattgatcgagagtatttgtgtttgtgttctgtcactatatttgttatcttgcattgtgcatcgagagaaacgagaggtagagaagagagagaggaaaaaaaaaggagaaatcaaatcaaggaaataaagatgaaagtcgaaaataggaatgaaacagtgacttgagaggaaaaatagaaggcaagagataataaaagaaactaatatatagaaaatagaaggataaaaggaaacgttggaaaggagcagtaacctaataaaatccgatcgcgaggccatcggccggatcgtgatgagtgggattcaatatgattgattaggatatgtcagagtgcattagacagattgcattagacagggtgcatcacacagacacagacacagacacagacacagacacagacacagacacatactgtataccagacatacagcatagtccacacctgatagtacattgcgataatcaagagacactacaacgcactagaacatacatgatactacagacacaaacacgctgttcccccttcacatgtaaactcacgcgttctcaggcacacacagattgtcgggtacctgtctttcggttgtaaacaaggttctggctgcggtgcccgactctatcgagctactgcgttctccctttatatttaatccctcggccgggggtaattcggcagagaccgattgacgggatggttacgataaccggctgtcgcccagccaaccagccgccagccagccgtgaccaccgcctgatcgcccgcctgcctccttctcctgaaggctcgtgttctcggcatttgtttttcctttttttctctccctctttctcttttcactctgtgtcttcattttctcttctttcctctcgttctcctcgccatcgccacctctttctcgacctctacctctatctcaacctcaacctcaccttcaccctcgaacctcacatatcttcctcctctttctcttttctcttccggattgggtcttgattcgctcgttcagctagtctaattcctatttggaggcaaagaactatctggactaccgtctctgtcgtctctgcttggctttactctactttcctttcacctcgcctttctctttttctctcctctttttccctttgccaggtccggtttccatcaacaaagctacctcccgtcctgttagcttccacatccggctcagacctttcgttctattcaggcccgttcatatatagtctcttttcttttctctcccttatccagataggtaccaggtagatcatcttactgcctacacaccatgaagtttcttacctcaccggccgcttccaccttggccctcctcgccctggggctctcttccgagctcacccaagccgtcgccgcgtcttcacgaccaaagcattcgctcaagagacgtcaaccaatctctacagacgcctctgatttggatggaaagacatttgatttcgttattgccgggttcgtctcctcttctcgtcccaataactcttcttcttgtcctgttgatctaatctcatgatcctgtcctcatcgttacatctttctcgcccgattggtatccctcttgcttacgacattagaggtggactagcaggtctagccctcgcttcacgaatctcggaacacgaaaatctcaccgtagccgtcatcgaagccggaggatctggtgaggatggcgaaatcgacacccgcgacgtcaaagaccttgttagtatctctcctttgtgttcttgcattccttcactcccattgactgaacataagagaatctgaccaagcccgctatcattgtctctcttcttcctccttcctcctcttctagatcgacatcccaggaaattcgtatctccatgggttaacaaacactccttacgattggaactataccactgtggctcagaaggatgccggtggaacgacaaaggaatggccccgaggcagagttcttggaggtagtggtgccatcaacggactcttcctctgcagaggttctaccgaagagtacgacgcgtggaacgagctcaattccgggggccaagaggactggggttggtccgagctcaacaagtacatgatgaaggtttgttgctcatatattcctattgacttgacacgtggcgcttgtttcctttgttttgcccaagcgctgatcgcgtttttggatccttaatacagtctgagaatttcactcctcccacggccgaccaaatctcgtcctcaggtggatttatatacaacgcgagtgcgcacggtgagttctttccacttctgctttcatctagtgtctttccacgctcagccactgatactctttctccttctttgaactccttcatcaacttgattccaggtacaactggaccaattcaggctggtttctcggcctactggttcaccggaaacacaaagtggattcctgcctggctcagccttggatttaacagtattgatggtacaaccggagacaaccacggtgcctacattactccttcgacctgtaagtctgccatgcatctatttactctacagttttgctgcggcgagactcttgacaccgatctgtgttttcaattttccaaaatctttcagtgaacccatcaaaccagacccgatcggactcgaaagctggctacattgatcccatcgccccccgatcaaacctggtcattctcactggctatcaagtcaccaagatcaactggaactcgaccgactcgaccacaggagctgttgcttctggagtgaccttccaggcatccgcaaccgacacaccctacaccgtcaacgtcgccaaagaagtccttctctccggaggaaccatcggttcagctcagatcctacagctctccggtgttggaccgtccgccacattgcagcctttaggcatcaacgtcgtctcggatttgcccgtaggacacaacctacaagaccaccagagtaactctatgtattggtctaccccaactggcaccctcacttggggaaacttgaccaatacgacgctcgctgcaaccgagttggccaagtatgaagcaggagactataccgactcgatgtggacctacatcaacgaagtgagcattttctttcacttagatacccaaccgctcattggatcgagacttattcatcaatttttcgattttttcccaaggccattggatacatttcccttaaggacgtcatgaactccaccgcttactcttcctttgttgcgaatgcgactgataatctggaggccaacgtggacgagaccgctgacgctctaggattgtccgatgctcagaagatcggtctcacagcggttagctcttctcttcttttatcttctcttttttccctcctttgtcatctcttttaacggagcgaagccgttggctcctttattaactgaggtttatataaaacgtttgattcgactgacaatcgtcctttcttgtgtttccttaacagatgtacaacatcaccaacagatatttgactaccaacgttgggcaaatggaagttctcttgactgagttgggatacgttggaggcacaaacaccgtcggcttgcagggtgctttccagcatccctacacccgaggaactgtgctcatcaacacaaccagtgctttcgatcctcctctgatcgaccctcggtactattcccactcgtatgacgttgcaatcacccgagcttgtcacgaatggactcgaaagttggcggccgctactccgatgaacgagctgatgattaccgaaatgaatcctggagcttcagtcacaggcaccgcgctagatacttggttcaagaagaatgtcgtcactgtatgtccatctattttcgcgttcaattctcattctttccaacactgtatgtcagatcgctcacaaaccacagggctggtttttttctcttcaataggagtatcacatcttgggcacgtgctctatgttgcctaaggcttctggaggagtcgtcgacacaacgttgacagtttacggaactacgaatgttcgagtagttgattcaagtatcatgcctctccaggtttcagctcatttaatggttcgttgatattcagacctttgggttattatctgatcaacaagacataccgagttttgttaacgcattctcctctttctatcacaggctcccacatatggagttgctgaaaaagcggccgacatgataaaggtcaagtaccaaaaggtcattgaagttgcctcttcttcctctcaagctgcctctactgcttctactgcatccggatcgagctcggctgcatctagcgcggctactgctggtttgagcggagccaatgccgaaggcggagctactaacttgtcaaccggcgccaagggtggaatcgcagcgggtgccgctgtggctgctgtcgccgccatcgttgctgctgtcttgcttgctaagaagaggaaggccaggaaagcggccgccggtgatgaaaagggatggtattcaaacccaacagagaacgacgcttggaaccccccggtggctctcgctgatcgatcggtcgctgcctcccctgtgggcggagcgttctacagtaacgtcgatggagtgaacagcgcgtctgttttggctcctgctggtgtggccggtatgggttcggcaatgcctgggttctcgaccacccatcgggattcgtacaacacgttggacctcgcccaggccgagccgatggcggctggatatgacagctattacgctaacggttcagggccgggaacgccgtactcggatatccctaatccgatgagacgctaaagatactgccgcctgactttgacctgtactccttgcccatatctgtccttcttttcagtttccttgcctagcttagatatccttcatggcgttcatgctcggatattattcttccatttcctattcgcttgaatgctcatcgaccttccttttgtcaaccctctaatgcatttcatcctgttctccgttttcaaatcctgttctcttctttttcgaccggttggtcgtcctacacgaacatcatacgtagctttttatatattcatctcatcttacacggacaatccaatttttcatttgacttggttcatccacgacaccatttcgttctgccttcctctttatctccttctttcaaaaacggtctacctctatcttccgaagtatctttccattctttacgtacactcctcaactgcctctctgtcctcatcctttcttttggattcaggtctagatctgcggatctaattccttttgctttcctattatgttcttcctgaacagaacttgttttttctttccctttccttgtgtttctctgttctcctgagtatcaatgcgagttccgtgcccatctgtttcagagatttttctatatcaatcacgagttgattctgtttgatcggtaggttgaggttggaaggaatggtatcgtcagatctcgaacggaagagtccgcccctgccgggcttgaccgatgaactaatgagattttggacaggatctgtttctcaaataaccatcacttcaaaacttgatattttcatttctgttcacccgaaccgaaacgaatcgagtcaacgctttcatcagattgattcaacctagccaggtgaagaaggaactaagaaagacagggtgcatacacacatacagaatgggaaacccaaccaggtctacaagtcaggagatggacgaaacgaaggacagattgaggggattgatgggcaggaaggatgatattgaagctgagatggttcgttgctctgtttctatgtttgacgaggtctgaggttctggaaggcgaatgtgtctctgggtcgaaggtggaagtgaaggtagccgagagggttgattgcggtaagacgtactaatgattttataattcatcctgttcttgcctgcgtcctatcgatatggtacattttgatgggtgatgatgacgatgggaagtaggaagggcatcgagggagacttctagctgttcgtctcttcctttcctttcccctttgacacctctccaacatctgtctttcaatagtaattcttcggcttacatccgcttggtttgctcttggggacttctaatcatgatcttttcctcgttcaaaggaaaactcgacgatgaatagcccattggtgacactcgatggtttcccaagggatgatatcgacgttgtttgtccctcttcccctctaggcttcctctcttgctacatgtatgagtattgattttctcggtttatgaggatggctctaatagttggcggtcagacaggcgagggtccggttgattgaactacgaaatgatcgtccgtccttttctttttctctttcgttctccacatgacagactcgagtttcacgtactcacactcaccatttctatatttttttaaaaaaaacctaaaacgtaaatcattccctcgacgtgatagacaaagcagttatgtcagaaatcgagagagctctccatcaagttatcccttcatcttctgatagtcctagatctttgaatcgagagcgccaagaaggacagggtagtggtgtagatggcacggatgtggaaggaggagagccgtttgctctagtgaaaagtgtagatgagaggggacctgctgggaaagctgtatgcgttcttgttcttccttgccttcctcctctttcaagtaaactgtcaccgataaatagctgatcagtcagagatgttcctattttggcatttgaagggcttgaaaccagacgacctaatcgtcaagtttggatcggttcttcggtcgaataatgatgggctcaaagcgctcgccgccttagtagggaccagtgaacatgtgcgatcttgctttcttctcgtttctctactctgttcgatgagtccgtccatacttctttcaagatttgtagctaaccgacaagagattatagaaacctatcgaagtcgttgtccttcgcggagaaggaaacaaggagcgcgtaacaaagactctagtcccacaaagcggatggggaggacgtgggatgttagggtcagtccgaattgggggcttctctccctcttcctatactgagcgtttagtagaacatgcgctgatgcttcctctcttcctttgttcgtactcgtatgggattctccgtagaatgcatgttgtccctctataaatgatattggtcgatagatcacgtgattggagtgtcacaaacttgtaacctttcgagcgaaaccaaaatgtccatttcagatcatcatttgaacttctatttcatcaaccatcccgtcctactcttctttttttgctttgtttagccttacaacgagctagtagaagcgctagatctattaaaacttgaaggtcgaagttacaaaagaaaaatctgaatgggaaagccatctaaatcgcgcggaggaggaggaaacgctagccgaggcggtagaggtcgaggtcgaggaggaggaggaggttctagaggaggaagaggtcctcttcgggataaatatcatgtcgatcaaggaggacgacccgcaagcgcggttgatgatgttggacctcagagatttgccaacgaggctagtagtggagatgaggatgaggatgaggatgatgaggaggaagagagtgggagtggagaggaggatgattcggatgctggtatgttttgatgtcgatttcaatacatggccgtagtccaagcctaggttctagatgagttgaggtggacacagcaaaagactaatatggaatggatggcctttcaccttttgctgctattgcatcctgcgatatagaaagcgacgggtcggatgagttaacaagtatcgacgtacccgtagggatgtgggtcagtctttgtctcttctgttcgaggttgaatgcaccaacgaatttcaaacttgcatgtctgagtgccatactcatcatcggtctattttccttcgaaatgaacaggatttcgaccattgtacgcgtcttttccatcgactgttaatgtggtagcatactttcaatcccatgttcactcttgcttcttgacttatggacgcgccattttcttttgctatcacgctcatataggtgacccgaaacgatggtaagttactcctctctttttcatttcctctggggttttgtattaattatgaaagctaatttcgtacttgcttcatataagttctggaaaaaagttgtctagattgaatttgatcaaacaacttcgtgtgggcgcaagatttagaggagtcgttatgacgtgtgttcatcttcaattctttcttcagaagaatatcctttcaagagaaagaaagaggaggcttacggatcaatctttttccttgtgttctttacctaaaagacctaaagggacgaaaccggtgtcgctagaggatagagatattgtccttgcctctgggttggcagtcgtcgagtgttcatgggctcgattagaagaggtcccttggggaaagatcagaagccccaacgagagattatgtgcgtggttctttgttttgtattttcttttgatccgaggaagaacagggaagattgcgatgaaatgactgacagtctgacttgtatggatgtaaaccgaacagtaccgtatctgattgctaccgtgcgcctcttttcgctttgccttccgttatagaccagcttagacctgacatcacttttttctctccgttaaaccatgatggcaatataagaacccggttaattacggtaaaccgtggagactcgtgagtttcttttgatctcaatgtccactcttcacgaaaatcttagaggatccgaacttaactctacttctctttcatcttttcgtctttttgctcttctggctgatggctttgacctctaccgggtgcttagaactgtgtggaagcattagcagctgctttctacttgacaggattcccaaaagaagccgagctcctgtcagtatatcctctattgtcccaacataatctaaattcttctcatcagacgagatttgacatgtacatatcccgctgactcaaattcaaattcatgacgggccggttggttgagcagactatccaaattttcatggggtcactccttctggaaagtcaacgagtaagttctttccgccttactcttgctctcaattcatgcctttttcatgattttcttatccatcatattcttggatacaaatctacgtccgtatcataacagagaacttgtgacccgatacttgacctgtaagacagcggctgaagttcaaacgatgcaggagacgatcatgcaagagatcgaggatgaagcagaattaaaacgaaaagagaaaggtcagactcctcttttttcgtccttttctttctttctttatgttcttttgttctttcctctcttccttctgttctgctgggtattatttctgatctcaaacttgttataccactatgacattcttcacagagaaacgacaacagtcaggtcagataacaactgagttgatcagggattcagattcggacgatgacttcctcgaagggaacccaaaccaccagatcggaaatatgtggaaacgacctgaaaaggccgctcctgctgctgttgaagaggagaaggtcgtcgaagatgttaaagaaaaggtggatagagaagaggacgaggtggatgaagtggagaggcagctggttgatgatcttggaactctcgttgtttaatccccgtttatctggcctgccctctacctccctatcgtgcccttgttttggttaccttaaaggcctatttggcctagcttatcaatatccctgaatgggctgaacaaaaagaaacaagatcaagacctacagaacgatgcagatgattttcatcttcctgatgtgacgacattgacttgtatacgttcgtcctttgaaattctgatatcaagatattgaagtgatctaatggtcaggatgatagaatagaaacgaaaaaagaacgatgaatatcgacaggtaacggacgtgtaaatcggaccagtattaggagagtcagtcgtatatgattagaagagcgaaacgataaaaaaaatagagggaggagaaaagggatcgttcccattaaattgaaagctgaaacctagataaagaagggaacggagaaagaagcgagaccaagtggaaatccacaaaaagaaagcgatagtaccgaacgtttatcatttatgaatagaagacagaacaatcgtcagggataacagcgaggaaatcaaattataggatcgtgttttttcaacgtagacgctggaataatgattagacctgggcggaatcctcatcagggggaggaccagtaatgtcaacctttccctgtgttccgaaaccgatcgtcatattcaacagtagaaacataagtaaaaggcacaatgataaataaatgatcggaacaagacagaaatgaacgaaccttctcggaaacggttgtatcatggtgagacgctttgatcttcattcttctcatttcttttacggcctcctctcccaaacccagattgtcccttggaacccaaacaatctgttgcccagtctttacagccggatgggtaaatgcatcctcgcgctcgtgaatcgccgagtggtcttcgtgagactttcttttatcatttccctcaaggttaggcggacgtgttcgaagctccatcgtgttcggcgggatctccccaacaggagttcggacggcctcgacgtctccggaaccagggaatggagcgtttgtcaatggtttttgatcatcgctcgttgaggttcggatcgcgtcaagctgctcatcagactcgccgagcgactgatcatgaccttcttcggtaaccataccgtacgatcgatgagcaagggtcaaaggcaaggccgtcttgagagacgcataggatcgattaagaatgatttggtaaccaatctatcatgacgagagagtatcaagagcgtcagcagtgaaagaagagaccgaagtgttggctgcaatcaagaagccacgtacagtgatcacgacgagaacaaccatcaaagcgccctcagggatcgcggaagctttgccgttttgctgttaagtatcaggttggtcagaacggtcaaacatgagtaaatccaaatcgaaaactcaaaatatcaggaaccgaagcatgagaacatacgtcttgagctaagaagaacaaggcggccaagcagatatgctggatatagagtccgacgaagatatgagtgacagccttggggaagaagagtcctccagagtcagacgagggaggttgatcaagaacccactatagtcgttcatacagaaaggtggggcagcacaattgtccgaatggtgagttcagattgttcttggagattgagcaaaatcagaatgtaaatagacagcttacggtgaataggtacttgtaaaccatgtacaagaggaagaacgagaagcaacccaaaccattgatgatcggagagatgatcatgtatccaaccgctgaataccacgagcaagatccaatggaacgccgtgagcattctctctatccaaggtcttcatcattcgagacgctacaaggtgctccccacttctccaagaatagatagaactcactgatgacagccaagagagacatattagggaagagcgttccccaattgacagatcccatactgtatttgatgttgtataccgatctaggcgtacttcccaataagaacaatttaacgtagtagaccaagagcggagagatccggaggaagccagcagccgcaccagccaaaccttgcaacgtgatataactcaagaagaaggtcgacgctttcggcaagttggaagccaagatggtaggcgcactcgagatatcactagcaagctctgagacagacgccaccaagcctgaggagagtgttacaatgaggaaaccatgctataatttggtaagatttgccgacaagaagaaaggcagacgagggggttagcaagactgattaccccgacccaagtcaagacagagcacgcacgatgaccaggaagatgaaatatcgagtcatgagggacaactcgactccagtcttcttaggaataccctcaaacttggccaagactgtttcatggaagacaaagcgatgtaaaaattgaagtgtggggtcagggtacgctcacacgaaaacaaagatgcccaaaatgtaagcaagtattcttacgtcggagaacaataggcaagagcatgaacagcacagcaagcagaaccgtgggaagcactccggagatgatgccaactaccacactaggaagcttgcagatccaagcgagccaagagaactgcgtgcagagcgtactgacattggagatgattccgacgaacgcgacggggaaggaccagagcaagatcagtccaccagtgagtgcataactgatgtactgccggatatttgcctcatatctatgatcaattgagagccgaggatagtcagcaacccgcagcatgtgtttcagaaacggatggaatagaagagaagacgaacggattcatcgacagattgctccagatgacatcttcgggggcggtctcaatgtatcgtccattcatagtgtaaggttgattatgcgtaacggactgaacagccatatgcgctccgatctctgttatgcgacccagagaaaatttcgaacaggatcaacacgagtcaagggacgtcattgatagtgcataaacaaacgacgaacgctggttgaagagaacgaaagcagctgtgtcaaccggaaagaagcaacaactgtcaatgattgatacaaatccaaagttgcagaagagaaaggaaatagaacaaacagttcataggggcatagacctcatcttcacccagtccaggcgaggcgatatccttctcaagctgctgctttgcctcctgcagctctttctcggtccggacaatttcctctctgcaccactcaatagtgtcaaccttttcgcccataaaaggcagaccgaacggtaaccacttgaaaggcttcaatcgatgggacggcctcttcttcttgggcacaagcgtctcggcgatcgatacgtcagcctccaaatcaggtgtctttgtccatttatcctcaagaggctgcccgttcttcttatgtgccgccttttcggccttgttctttagcttgtaggccgtcttgatcagctttgtctcagccgactcaagtttcttacacgcgttgagtcgattgttgaaatgatcaggcatttctttgagatctctgagaacacgtaaacgaaacaaaaattaagaaactaatctgactgtagaggaagtatcacataatcatatgaaatgtgcgtttgaacgaaccgattcaaccaaatgtgtttagcgcctccaggaacatggttgaagagctgcataagaacttcctcgtccaagtctgtgagattgcaaaaaaaccaaccataaccaaatcgatcgaatcaactaaatggatcttcatgccgtatcaatagttgccaaaacgtacatttcttgggtataccagtaaaaagaacagttcgagcctgtggcaacttggagtggtcttccgagacgaggtatcgctgtcggatcgtcagccactctcgcatatgagtttttaggttccacagaatccagactttcaaagaatgagccggttggtaaatacatcgaaacttatgagctttgaaatgaatttgtgatatcttcctgaagttttcttagctcacaagtgaagatccaggccaagagcagatgggctgcataacgggtatacgacgttggggcaacgtttccgaaggtaaatttatccagaccttcttttcccgagacggatgttccagccgcgtcgacaggcatgaggatgacccaagagacgagccagatggggagcaagatttggactatcattcggagatacatcacaaacgcgtaggcgtctagaccattcttttcgagaatgatcttgggatcagaattgaacagcctgagcggccatccgagtaaggaaggtgataagggtgcttcccgcttcctgatattggtaagaggcaaagacagggtatcggtgagcaaagggctatatttacttcctgtgaaagaactggtgaagcttctagcaaccaatccctatcaaaccgcgattcttcgaatcgagcggggctgtttttcttcgcagataaccacgagcaaatatcatcatgcacacccgggtacgtgcaaacaccggaccttgtcgcgcttcatttccgggcgagagtgcgctgacccgcctccttagctttgctcgatccaccaagcctctaatctcgcgtcgagctatctcactagaaaaaggtgaacaagagcaaagatacttacttttcatcggaaggaataaaggtccgaggttcgtagattgatcgaaactgtcttctaagcaaggtgaatgcgagaatttcggctccagcgatggctgagttgagcacgagagcggtgacaaaggagctcgtagtagcggcgttggcatcgtcggcagatctgtgtaagtttatccaggtaaagtcgaacaagtgggaggaggaaagagaacaaggacgggaggaggggatgtaagaggaggacgtataaagagaagtaagcagggcggaaagaggaaccggtgatagacagtctggtaagggttggtctaaatgcgagcagaaacgaacgcagaaggatagatgagacgtacgcagacatgatgggccgatgaggtccttaaggaagggtgtatacaagggttgtggtgggttgtatgcgtcgatctggaaaagagaccaacgggtgtggaaagttgcaagagggaggaaccaaagaagaaagaaagttgaaaaggcgaccttgcgacaatcaaccgatagcagctgagagaaaatgaatgaggctaaccttaaaaagattgtcgagcggccgatgaaaaaggataatattgaaaacatcagattttttagagaaagaatgaaagaaaacaacaagaagactacaaattttcacacacaatgaagataataaattcaaaccgtcccgccccacgctctttcaccattccacccgggcttggaagatgactgcatcctgatcgaggacagtgactgcgggaagaaacaagacaacaaatgacgtctcgtctttccgcctctttagcgcgcgtcggagctttttccgagtggaaaccttcccgatcacctccaaacaaatcagctagagtagctcgctctccctctacctatgtatttcctttgatccggctatacgacattcatcagacctgcccaacatatccagtcgccacctacagctgcccgacactcctcggttagctcggtcggtgacttgaaacgctcttcgtttacctactgttgcttctcaaccctagttcgaccacccccagtccatcccatcatctgcactctcatcctcttcttcgtgttcatccctggcgccactctcctcactgtcctcgcagccctcactttcaaatccagtaggacctacgacaagtaacgaccttctgaagaatgtggaaagtcgctcctcgcccttctcgtttactggtctgaaacgtgttggacaaacttgatggtccacagtttcatccgacgcttcaaccgatggatcccagaaagatgagacggccggcaagtctccgacagtcaaatcggctgtttcggtcacgctctccatcttgatctccatctccgtttcattgactctgtcgtccacctctaccttcggaacaacggtgttgctctcggaagatcgtgcagagatatgatgaagaccgggtccccactcatcttcctctattttcactctgatcccgggcataataactacctccactgcttcttcctttattctgggttctatcaacctctcatccttcggctcgatcgagacacgtctgtgcaggagaggcgcagccgcccagccagattccaagtctaagccgaagtctgagatcgagtccgaatccgaatccgaatccgaatccgagtcgaaatcagatattgagccaaatttttcataaggttcagctttgaaacacggcctgtcggtttctacctcctgcaccgaccgaggtgtaagtgtagttggtagaggaggtgccaaaagctgaaaaaacaaacaaacaaacaatgtaacacatctatgtgagtattcattgatacaatgaccattttactcatttgcaagaccaagagtccttcctctctttatgacggattgtaccaacctgaaccatcctaggaggtttaacaccgagcgagatcttatggagaacttgcgaaatttcggtttcaaaggtcgaagccgccagggcatagtcttctttcaaatcatcagactcgccatccggttcagaatcagagcctaacttgagatcatagagagcttgttcaaacgatgacttttgaatctgatgagctgcttggatatcctgacgcaataacagccggagaagatatcagcatcccgatcggtttactgacttatccggatagggaaattatgggctgaggacaatcctactttaaagagacctttcgcttcctgtctgaagtctttaccggctcgctcaatgatactcagcatcgatttcgcgacggaccgaaacataggaacctccaaagcccggttctattatatacgaatcagtttcgtcactccagctgtcaccgaaagagttcagatatacgaagttgaattgaaaggcaactctcactcacgctcgtatccttctgatcgaatatcaacggtaaagatctgtggaaaaataaacccggccgtgagttcgtttggacgtatatttagtcaaagtcctgaccgcgctcacctgtgtagatgagttcggataagcttgtagagagcgcgatcaaaagttcggacgaccgatggaggaacttctgaagagaatactccacacaggaatcctctccgtaattcaaaaatctcccgatacaggatgagatctatacaagaaaaaagaaatgctcaagacgtctctatactaaacgtatatagtcaacttcaggaagtcttacggttgtcttgttccttcttcactaaatcttcgtccacctggagttccggactagttgttcgagaccgaacattccatccagactcctccgtttttataattctaatctgctcttcatcgtacccattcccttcatcttctatctttccccgtttttctcgtctgttcttgataccacgaggcttccgcttctttgtccgaggttggccccgatgatcccattgaatttgaatatgaatcttttgaaggattgctcgaggtttagccgggcaacctttggaagacgagcaattaggaacatgaaaaggcttcacaaagactggtgatgttgtaacgggccagaacagatgcatataagcacaggcagaaggataaattcgaaaaaaaagacagacgcgtacagagtacgggatctagggatgacgagccgggcggacttgtcaaatcaccaacactctctaatgacaaatctcctgcgttcttctccagtcaaatccaacatatgggtatatgcgcttgggtgtgagcgacgaaaacagaggagagagaaagacaccagatagacgtaccacagcaaaccaatctcgcactctctcaaccacccagccaatttttttttcttcagctccgtcttctgtaggatcacttctcccggacggtctgatcttactcaaggacgattccacctcgatcattacctgtccttctccaccatgtcggccatcattctcattgagttcagtgtgatcttgcgcgggggcatatatctccaagaggcgaattacttgagaaaagtctatggaaggatcgattgcgaatgggaggagcaagctatatcgaagtcgaatccgaagagttgggtagcctttgtccgcgaccactgacaatatcttttcaaaagtctgtggaacagtgggcgagatttgcatggctatatgcgttcggactcaagacaagacaatcaacggtgaattgacgttagctctagtaggtgatgaagctcgagggttgatgtcggatcgacttcacgacaaatatttgtacagatgttagtgacaggtttttcagattgttctagacagtcctgaagaagctttgattgcacaagaccagacgtcagcttcactccaagcgagtagaactgattgttcatatacttctctgccatcgcattcttctagagaatagaagaaggatacatcgctctgttcaagattgctcatatatccatgtcatcttcttctcccacattggctgctgtggctccaactccacccagatcgatcgcctcgttcccaactctatctgcccaatcccttaatgcaccctccatctctttccttagcacacccacaccctctcctgcaactcttaaacattccgcaaacctctccgtgtccagtcgaccgttcagttctgctgtggtgactttcccacttcggggcaagaatgcgagaacgacatgaggtaagtcggattcttcctgtgatgtcagatccagaagaggcgtcgtgaggtggatgccgattgttaacgacaagagtgagtcgagcaacgatattccggaggtgagaagagcaagcgtggtcgcattgatggcggtttgcagcaaagctatcaaaccatggacaaatgttaaacatgaaaaatatatttcaagttgaagcgatcaaaatgaaagaaggcattgagacgaacctccgtccatagaaagaacttgaacgtatatgttaatttcactccgaggataaagctgggtctggatcacgggctcaaatgtgctttccaaagcagcagcgatctcttgtattcgcctgttgagcgattgtttgagaaccgggatatctaatcagactaatttctgatagtagtgtagtggtgaataagagagaagacccacttgtcaccccgtcctcttcttcttcgttcatttccagcccacgagcctacaccaacctcgatgttcaatacagccctgtcaaacaatgtagcacttctcatctttgcttctcgcggtccatggacagtagctataacagtagtaagaccatgagaacaagtagcaatcccatcggcagaggaggatgacgaagtaggaatagagagcgagaaagttcggagctcgtgaggtcgtcggaaatcggatcgaagacctgcacttgtttttgtgagtattggacctactttcatgacgcagaagaaacttgattgcctacctccatcattgagaatctccacacgtgaggaagacatcttttataagaaaaaagggggccctgtttgtacagttgtgtatatgtgttgatgatctgcttttctaatcgggagctgtgaagttgaatgaagttcagtagcactagacgcactcgactgagtcaaatctaatgaggaccaacggaagaagtgagcttacataagctcctctgacgtttctgagatcgagaattcctcttgaaccattcgaaagcaatcgcctactcgctccttcatcgacactcatctcttttgtatctcagctaattttcttcaaagcagatggtgaagttaccttccaccgcaagactcagatttgcgccttctcccacagggaatcttcatatcggtggccttcgtactgcgctctacaatcatctgctagctagacaatcaggcggtaaatggattttgcgaatcgaggatacggatcaggtttgtctcgattcttgtgcttctcatgtcaagatgatgaagttgacaatcgcctttgagtttcttgatcgaaaaaacacttccactctcttgggcgtcatgctcctcaggctaggaaagtagaaggttctgtagacgccctacgacgttctttagaatgggccggcctggattatgatgaaggtctgtaagacacgatagtttacaccatctaagccagagagaaactaaatgccattgatttgtccaattttttcttcttctttgttctcatctttcaggtcccggaacgaacaacgcacactcgtctagttatattcaggcgagactcttgtagttttgtcgtctaaaacgtcttcaagccttgtcgtttgctgagccatagaccttctaatttgggtctctatcctacagtcggaacgtttggatctatacaggcaacaagtcaacaagctcatcgatgtgcgtttatctgtggcttacttaggaatcatcgcagaccatcagatctagctgacaagtttgcgctttcccattgtctcatgtactttagactggaaaagcgtacagatgctttgcaacgcccgatgagcttgctcaattgcgtgcagatactgcttccaactctggctcagctggtggatacgataggcgaggactgaggctgacggaagaggatgtagccagaagattgaaaagcggagagaagtatgttgttcggttcaaagtgagtcctttacagataaacagtcatgtcgtatgtggcatatttggagcatggtcttcatctaatgatatgagatcatttttattgggatgtctgtctgtacctcagtcgtcaccggatccgatccctttcgttgatcttgtttattccggcacgtatgctcacccaacggccgctcaggacgacacgatacttctcaagtccgatggattcccaacttatcaccttgctagtgttgttgacgatcacttcatgggtatcacgcatgtccttcgaggagaagtgagcccttcaacttggcttctaggcggatggtattgaccattggcactgtgtcactgatatttctttcatattttgtatgttaggaatggttcccttctgttaataagcatcttcaattgtatcgagcgtttggatggaaaatcccagagtttgcacatcttcctttgttgatcaacccggatggctcgaagctctcgaaacggcatggcgccgtttccgtaggtgaatacgaggtcaatcatacccttccatccttcttttgtcttaactcatatctagatggccttctgatcaatcaaacatcttactattcaaacacagagagaaggatatgaaccttcggctatcaacaactttgtagcactcatgggatggggaggaggtcaacgaatcttggatcctgcccgggaacctgaacacccaggccatactgaaaacccacatgaaagtgatttcctgacaatggcagagatgattgaacgagtaagcatctgtcttcttatcagacaacctccttcgtcttccttttgaatgcaagtttcgatcagtctgatcagtgatttgccatttcttcccaataatatcaagtttgacatcgacaagatttcgaaatctccaagtcaagttgacaagtctcgactagatcatctccaaaagcttcacgtggactggcgatggtctgtaggtggaccgactagacaagcgttcgtaaaacaggttcaagatatgttcgaggccagatatcctggaaagtaagttcttccatctgaatttcctctacgtcttctatccttgattcttcttttacttggtctggtgttgatcttgttatgtacttatctctgggccatactcgtcaataagtgaatatgtccgagacacaaccaacgtgtcaagatttgtggagtttgaccatgtaagttatttgctcttcgctacattttcatctgtgtatgtggtgagcgggaattagactagtttttgcttatattgacctgaccgatcctttctaccggtcatcatataatttcagctccgagtccaattcgttcatgagctaggggaaaacaatgattggctgttcgtcgacccagacttaacctcagctggagctagacaaatgaagaaagggacatcagattctaattatggtgagcctatatcttgctttgtctctcccctcataaggacccccagttcctcttcatggtcgcttttaacgcaattttttactcttagaaatcgtattgaaccaagcgatacagctcctcagcccgctctcagaggaagagtttttaaagccggacctattactttctactatgaattcggcgaacaagaaagcggcaatgccaagagaacgaggacaggccccggtggccaggatcaatctgtgggtgccgatgagacacgcattgactggacagaaagtatgttcctcctctctatttctcaaacctctcactatccttcttgtcctgacagtcatccatctatctctcaataacgatccaccatgaccgaccatatttgctcatgtgcgcttcgaatttgcctgtgtcgcgcctttcgaaattcgcgtcttccagattggacctagtgtagctcaagcaatcactgttctaggaaaagagcggacgctgagaaggttaaagcgagcattggagttacatcagaaagatactgctgcttaaacaaatagaatgatgatttttgatgatcaaataatggtcttttgaagctggactgaaagtttcgggattatgccgaagtgtgattacataagctcgaaaagtcttgggaaaattcaaaaacctgtttgcaattttatactcacaccatcttgctctcacacacacattcgttcactctcccactcaactctttctcccgctcgctttcctatagcatctctcaagatagtgagatttatttcttcaatctgtacagttttaggtgtcaaaatagctaacctgggatgtttctctgtcaacacagtgtgtggaatcctcggtcttctcctccacgatctcgaggcagcttacactacccaagccgccgtagagatcgttgaaggactctctctgttgcaacatcggtgaggattttttacaacgcatgtgatctctcctatctcccctatctctctcttgaaagagaccaggaaggagaaggtccatgttgtatgttcaaaaagcctatgagaggtggccgagattcgagcgaaactgactaggttcgagtcattcgttacggacggatccttgggaatttttataattcgattgtttgtgtgaatatggcgcacttgtagaggtcaagtaagttaagattttttgttctgtctctgttccatctgctagctttaatcgccgtccatcttgactttgcggtctcaacggagattgttcatgcgaggtcgtcattttgaaaaacgcagtctctgacaaacttttttgttgttggaattttataggatgcttgcggtgtcgttacttgtggtgctcctcgaggtcgattctaccaggttcgttagtcggcttcaaaccttttcataatggtcatgatgtacaaagattgacgtatgaatctctaccctctctatgacatgcatgtgctacaggtcaaggcaaacggaatggtccaggatgtgtttgacaaccgagccgtgtctggactccgaggattgatgggtattggccacggtatgtttgattatgttctcccttttcgagtttagagagaatagttacattccaaatctcatgtatgatgattctgtcctggtggcttccagtgagatatcctacggccggttcttcagcccacgcggaagctcagcctttctatgtcaactctccctacggacttgtcatggctcacgtatgtttaaaactgctttatcttatcctacgcatagcaatcctaactatcgttttcttttccgttctcagaatggaaacttgactaacactcaagagcttcgaggtttcctggacgaggtcgctcaccgacacatcaacaccgactctgattctgagcttctccttaacattctcgctaacaatctgcagaagacgggaaagaagcgaatcaacgaggaggatatcttgacggccattaaggatctcatggctcagtgctctggtgcttacgcctgtaccgtcatgatcgctggcttcgggctcgtcggtttcagggaccccaacggaatcaggcctttgggattggccagcagacagagtgcggcaaaccccgagggaaaggattggttgttggccagtgagagcgtggtctctgatgcttgttcattctctaactgggaggatgttggacctggtcagtctcacgtttcttgtcatagggagattcgtggccctttgtttcatgtgttctgatgttttcccctcataccgtttgttttgtcggcgcgcaattgttcaaccctttggaacaacatctttccccatcatacaggagaggctgttatcatcacccgaaacgccattacccgacgtcagtgcgctccttctaagcccttcgctcccgatattttcgagtacgtctactttgcccgaccggactcgactatcgacggtatctccgtctaccgagctcgaatggctatgggagacctgctcgccgaacaagtcaggaaggaacttgccaggcatggagagacagtcgatgtggtcatccctatcccagacaccagccgagtggcggctactcaggtcgccaagggcttgggtcttccttatcgagagggtttcatcaagaaccgatatgtgggaaggacgttcatcatgcctggtcaggagatgaggtaggtttcgtgtttttgtttgtattgtgtccagaaaaaaaaagcattgcgtggaactcctcaattgacctactactctcggtctctgatgttataggaagaagaacgttcgacgaaagctcaacgccatgccccttgagttcgccggcaagaacgttctgcttgttgatgactccatcgttcgaggtaccacctccaaggagatcattcagatggctaaggacgtcggcgccaagaaggtcatgatcgcttcctgcgcccctcccatccgacactccaacgtctacggaatcgatatgccctctcctcacgagctcgttgctcacgaccgaacggaaagcgagatcgctactgagattggtgctgatctcgtgatcttccagacgatcgaagatctcatcaagtcgtgtcaacagttcaacccgtcgatcgaacagttcgaatgctccgtcttcaccggtgaatacgttaccggagatgtcgatcaggcatacttgcagagtttggtgacgttgagaaacgataacgccaagttgaagttgggaactcaggtgggagaaggcgtgcatgaagtcaaggaggctcctataggttgctctggcccgttaagtaagtgtcgagctttgcagactgtttgctttgtttttgaataggaatattaaatcgacttttctttctcctgactttacaaagacggagctgaaggcgcgatcggacttgctaacggcatgtcgggagtcttcacttcttccggccaccagaatcctaacgacaccggttcgtttccttccttcctccccgtcccgctccatctgttcttctctatttcctccttattttcctctctgtccgctcttgatatagctccaaactgacaaacatgttcacctcgctatgacacagtcggcttgcacaacagctggcacagcgctcacaacgaacaacaataatttttctttgctctcttccctatactctcttgtccacttgcaccctgataaaacaaaaacaaaaaagaaaa

SEQ ID NO: 1430 - DNA, 5876 bp, Xanthophyllomyces dendrorhous
aacaaaaacaaaaaagaaaaagaaaaggagggcacgataacctgtttctttctcattacgattttctatttgtgcttctacttcttcggtgagaagcttgaaccgatatgaaggaggaaccgcaatacagaacaaagaaaaggaattaaaaaaaaattgaaatgctcattcgtacatcatttttcttctacctctggttccaacctatcttcctctatgttcctttcctattcgtttgcctttcttacaataccagtctatgccatcccagggtcttttttcttcttcttttgtgttatgtcctttttttttcggtacttcttatgtccaacctttatctatatctagagaatcgtctcagcctcaacctgagttcaagtttcaattcttcatccttaactttatcccgatcaaaaattcgattcgacaacgcatgtgaaggccagaagagctaggaacaagaacgaggacgaggatggaccccgagattaagagggcagtgagagcaataatggtgagggagagagaaaagatatgattttttttgttgagcagatagatacacatagatgaaagaaaaaaagggagggagaggaaaaggacgtctcaaatatcattaaacccttcacaattaaccaaaaagaagacacgaaacagacgataaggagagacagatgagcaacaagacaaacggatgattgaggattcaatgaaagagaaacaaaaaaggaaagaaaaaaaagagggtggtcgactctcagaagaaggtttaattaaagagggaaaaaaaaggaaaaaagaacaccacgtagagaatggaatcaaccccagatgagatcgttcaaaaatgaaggactcggtaaaccggaatgatccaccgagattggttgatcgaacggtaggtcccacttgtggccgtgttcctgcgtctggcccggtccttgttgtccgtcttggcccggagtgtatccgtattcggagtaagacatgggatccgaaacggtgtcgagtgacatgatgagttggtttgatccgtctaggcctgttccggtgaaactattgatacgttttgtagcatataagttcaagacggaaacggtcaggtctcaatctattcatctccgagcttctttttttgttttgataaaaggggacagaagaaggaagaaaaaagaaacgaaccttaatccaacatccgaggggactttttttttttggagggcaagataaatatcaaccaacacaaccagatgttaacaatgaaattcgacaggacgactctgtatgcgtaagagagagatataacaaataaataaagcgaacggaaacggaaacggaaacacaccaagactaaacatgttttcatcccagactccttcatccttcatgaacggcgtctgatcttcctgttttgaacctgcggaacgtgagatccattctctctgtaaccaagcccggatcatactaggatctttggggaacaacaccggtctgaaggcaaccgaatgacgtcctcatcagttcgtcggctcatgagttcatatcctcggaaagactcggtaaggacgtacggagtatcagcttcggtgtctggatcgacatcggctatggatattcctcggcgtttctgatgcagaacggtggattcagccaagccggtaaggggaagaaaacttgagagatccacaacgaaagaaccgtgttcccagagagaaagaaggaagaaaaaagaaagctatagacgaacctggtcgatggtacgtgagacccagccgacacccgcccaaaggaactgacagttcttgagcgcagaaaccgagacatcgagtttactatccgcctgagagatcacgccgaggaaaaggaaaacaaagaagaaaagagtgatcaacgatctggtttcaaaattctgtcggagaggaggaacgtacgaaagatcgaaggagtttggtagctgtaggcgtcttgaaaccgtccattccacctgctccgccaaacccgttagcagctccgctaaagctggacatcccatttaatcctccctgatacagacctctttgactagcgatcgctcgagcagccgcgttctttgcttcttcgatgagttgacgctcctcgaggaaagcgacggctgagacgaagatcatttggtcggcaaatgggttggcgaggatggctatcgactagagtagatttatacatatgagaggaaagcatgtcaatatgatgaaatggccagttctatgaaatcctgcatcgtcatgctagacaaggacaaagaaaggaaatgactaacaccagccaagtcggcataggacagcatgtttgctagcgtcctagcagatgaccgagagacctccacgtttgattccagcaggacttcctcgccttgagagaagttttgaagaagagacggtcgatgtaactttttgaatggtatttccaggaatgaacgagaggcaaggtaagcgatggttaaaagaaacaagttcaagagaaagaaacaaatgcttacgaccgtgatcttaaaaacgagcgttcgaaagacaaacccgatgttattcaatcatccagcgatcaacaatcggaaagaatgaaacgtacgaccgaatgaaacatgatgtgcagtaagaagaacgtaggcgactgtctcaagtcctgttgagcccatgatgaggagcgcgtgcgacgataccgaggagaaaaccccattggaaaaaaaaagaaagttgaggaggaaaaaaaatgagttctctggaggtaatcaagaaagagacatcaacaaggcatagagggaacggactctgtaatgcttgaaagtatgaatcgagaaatgcaacaccggatccatgctgaaccaagccaaggcaaacgaaacaaagaacaacgaaacaaagctaccaaagcgatcagccgaccgggcgagcgacatcccagaggaaaggaggaacaggaagagaggagtctccttctcggacgtacgcttggtagaaggaaatcatatcaccctgaagaacctcgagcttttctctcgacgaccgatcgagcgcgccctttggggaattcagaacatccgagatccgacctctgaagcgagtgatagcgatcaactgaacgatcgtttcgcaaacaccgcttgtcagttctctaccgcatagtgaaatcaatctagcgaagaaaggaaagaaagaaagaacaaacctccggccaaggccaaggggtgacactcccggccgggccctgaagctgaccggccacaagctcacaatccgcactggtcggtgacctgatatcgatctccgcttccgagaccgtggctgatctgcctgtaccgtacgagatgaccctacagggacgagacgttcgaacggaggatcacgatgaatgaatctcagccgactgtgtcgaagaagaacgacggggacgaggaagggaaggaaaagaagagaaagaaaccccttcccggagggaactaacctatcgaggaagaagacactccagaagagaagtcgacgacgagcgatctcgacatccgatggttcttgctgtatggatgcttccctatggagtccgagatcttgcagcatccgtatggcctgtattccggcgcgcgcatcatacgatcgatcagtccacccgactctttgttattttgttttctttaccttctacacgggaaaagaaagatgccccattacttcaggcaagaatcatgggaaaaagaatcaacacgaaccatcccgctgaacatccacagtccgctgtcccttccacttccaaactctgaccaagcgagaaggaccaggccgacgacggtgtcgacactggggaaactcaacaaagggaccaagatctttttggctgtatcttcgaacggctgagcagactcgtactgtctcttgggagacgcgcggagagggaggaggaggggatgtgttgagaaccgggaggtaagcgcgcagatggcgttcgatatgagcgccggaagagtgtttgctcggtgctgctccaagattctggggagagagagcccggcaagcaagaataagagaccattcattcagggatcaatacccatttgaagagaaaagtgacaatgccaagagagaaggtctcatgttctcatgcaaccattcgccacgagatcatcaagagagatggaaagggaagggaagacgatagaatgaaaagaaagagaaaaaaggaggacactcacgatgcgaccgacaagaacgggaaatgacaactcagatcccgttcgaatatcccaaggagatccccaaagatctcgtccttcgggtacaccccgagtctaccttttccttctcctttgaagagtctgtctctggcggtcgattttcgtttgccgtccgaggtgttggtcgctgtggaagaagagccgcttctggcggtgtcgaccgagggtgccggcctgagcggatcctccggtgacgaataggaagacggggttgaggccgaaggagagaactcagggtagagcatgttcgaagctgggccggccggtgcatggggcgaagacccggagggaccgaccaagggaacggtttcgaccggcggggtcgtcggctgttccagatccgtactgtttcgaagctcgaccttgactcgcttgaaaccggtaccggtgtaggatgtccttccaaactgtcgagattgaggaccgggggggagtgagaaggacagaaagatagatcagcttgagaacactcgcttctcttttcgttttcattcttttctttcctctctctctctcacacacacacatatcaaagatgtaccctgaactccaaaccgtcctcaaactcggtccaacagatgtttagaaagagtgacagcctgccgttccgaccaacggcaaaagaggaggtgaagacagagaagagaatagagagaaaaagagagagagagaggagaggaaacaccgagtgccaagcaagaaaacgacatacccaacgaaagaagggaacctggagcatcgctcggcctccaccgatggaagacgaacctggagccccatctggatcctgtggaccaggtggtggtggtggtggtgattgagccgggttgtgttcggccgagctataagttctcagcggtcgaaccgattcgttctggttctggtgttggctttgattcgagagatctgtggatgaggatggatcggatacgttgaaagcgacccattgttcatacaagctcgactggttttgctggtcgtggtcttcgtaggagacctcctgctgttggtgcacgtgctcgtttgaactagatgggtaagacctggaagaagaagaagactgatgaagctgtgggggattctgttgctgttgctgctgtcgctgttgttgttgttgttgctgctgatatggttgtggttgtgtgtacgccggatcggatggttgctgctgctgctgctgctgttgctgcagcaagttttccaactgtttctgtatatcccacggcagaggagccgaggtggagaactggtcgtgttcatacttggccatctcgggcgactaggaagagcaagcgaagcgagagaagagcacgaagaagcgagagatgacggatgggagatgacctccctcgttggtgtggatgtgggtagatggaagaggacgaaatgaatggaaaatagagaaaataaaatgaaataaaataaattgggccaaacagaaaacaccacgggaacacacgcacatacactctctctccctctcttacatgcttgagaacagatgcccgtgttcgctttgttattgtgttcgttgtatctggggtcagacgagtggccagctatgtactatggacatcccattcacgagcgtcgaacggttctctttcccccccccccc

SEQ ID NO: 1431 - DNA, 931 bp, Xanthophyllomyces dendrorhous
tgtgtgtgtgtgtgtgcgcgattgttatgataatttccatagagttcaagggaggaaaaaaaagggtcaccaaagctcgctcgctcagtcagtcaaccagtcgttcacccatccgacgcacatacacccagagaagaaaagaagaacaggccatgaaacatgaaacaacacactcacctggaaaggtcgatcccagtcgagcgccattgggaaaacaccgagccaggctccgagaagagcacccaataccgggtacaccatcgctctttccaccggtgtcttgagtctttttttcgtgtagacatcgttggtggtgggggggaaaagaagggaaaataaaaatagaaagagaaagagaacccagaaaaaaaaaagtcgaaaaatgggtgtatataccgttagctggtcaagtctctttgcaagtttaggaaccctccgagaagaagaagaagaagaagaagaagaagaagaagaagagaaagaaggagagaaagaaggagagaaagaaaaggagggggccacaaaacaagagactcaacttgacgttcaaaaacaacctgacccagtcccatctagcttttcctccttcgaacagttcgcccaacaccggcggcggtcccagcagggcgaccggggtccagacggtcaaggacgaaagcacgagggagagcaggtaacactcgatctgacggctcgccggggagaccgaggaggtgaacggtcggaggcctaggaggtggataaagaggtggataaagaccgaagagatcatcgtcgtgatgatcgttcgtcggagagccttttggaggggtccataaggtatcggttcaggcgagttcgccaacaaagcgaaagaatgaatgaagggaaacaaccaaggcaaacaccacttggtcagctcaaccaagcctactactactacaccaccacc

SEQ ID NO: 1432 - DNA, 3370 bp, Xanthophyllomyces dendrorhous
  misc_feature (1007)..(1131): n is a, c, g, or t
aaaaaaaaaagaagatggcccgaaaagaacagacctttgactttctcttcttctcgccaactttcctcaacacggcctcttcctcctccttctcctggccgccgccgccgccgacgacgagcttcttcctagcgttcgcctcctcctcctcctgttgatcccaaagatccccgatctgtccggtccaccacgcctcgacagcgacgagaccgagggcgacccagcctgtgaacgcgcctgggtcggccgtcagagcggcgacccagtgccactccggtctatccgtccccctcttgccggccggtccggcgggggaagagatctcgaccgggaactctgaccgggggagggcgaggaggacgaaggagaggaggagcacatgaaccgcggtgagagagaggtacttgcccaacggaaacacggccgagagcgagggaagggggagatctcgcgtgtcgtcccctgcggtcgtgcccgtggccgaggtggtcttcttccgggaggggaacaccggtttcttcggagccttcaggttcaacaacggaggcatggtattgaagccttgttgccctcgtttttctttgcgtgtctttctcttggtcttcttgttgttgttccagctggaaacggtgcgatctcgtctgggtttcttgagtgttgatggaggtgttgtttgtggacgtgtgttggttgggatctagagataattcaagaaaaagaacgaaactcctcccataataaatagataaataaataaataaagaataaatgaaaagcaagatgatgatgaagaatcatcttcatctcctcctcttcttgctttttttggtctttcgatgtgacttgaacgtttcgaaacgaaaaagaaacgacaacgatcgaaaacatcaaaacgatggggaaaaacataaatatatcttgggagttgagcccagtcttagcacacactagcacaacgttccttcttttttttaaggtcaaggaaagagtgaaggaggggggggggnnnnnnnnnnnnnnnnnnnnnnnnnnnnnnnnnnnnnnnnnnnnnnnnnnnnnnnnnnnnnnnnnnnnnnnnnnnnnnnnnnnnnnnnnnnnnnnnnnnnnnnnnnnnnnnnnnnnnnnnnnnnnaaaggaaacaggatagacacaaaaaaagcacacacacgcacaactacaacgacgacaacaacgacaacgaatagagaacagaaatgatacatgctagggtgtgcggttcgttgagaaccacaatgcagattgaatgtgatgagatagagagagagagggatgacatatgaaaggagaaacccaaagagaagaagaagaggaagaaagacttattttaaaaaagaaaattttaagaaaaataaaacaacccagagaattcacctagcgcaaagcagcttaggcggaagcagggtaggtctctcgggcccacttggcggcctggacaaggttgaccaaagcggcctcggtctccttccaacctcgggtcttcagaccacagtcagggttaacatcgagcaagtcggcggggatgagctcgagcatggcggcgattcggtcctggatctcctgctgggaaggaactcggggggagtggatgtcgtacacaccgggtccgatgacgttcgagtagttgtgctgcttgaagacgtccaacaacttgagggacgacttggaggcctcgatcgagacggcatcggcatcgagcctctggatggaggggaagatgtcgttgaagtcagagtagcagaagtgggaggcgatgaaggtcgagtcctcgacaccggaggtcgacaatcggaaagagtcgacggcccaggtgaggtaggcgtcccagtcgacccgtcggagggggagaccctctcggatggcgggctcgtcgacctggatggcgtagattcctccggcctcgaggtcgttgacctcgtctcggagggcgagggcgagctgcttgcactggatctctcgggagacgtccactcgggggaacgaccagttgaggatggtgaccggaccggtaagcatacccttgacgggcttggaggtcaaggactgggcgtaagcggaccatcggacggtcatcgcctcgggtcgggagatgtcagagacgatgatcgggggtcggacgcatcgggaaccgtaggactggacccaaccgttctgggagaagaggactccgttgagcttctctccaaagtactggaccatgtcgtttcgctcgggctctccgtggacgaggagatcgagatcgatcttctcctggaaccggatgaccttctcgacctcggcctccatggccttctcgtagtcctcggcggagagctcggacttgttgaacttgtttcgggcgattcggatctccttagtctgggggaaggatccgatggtggtggtggagaaccgggggaggttcaatcgcttctgctgggcggctcgtcggacggagaacttggactttcgctcaaagtcggagggcttgatcgcggcgactcgctctcggacggcggcgtccgagttggtctcaaagtctcgtcgggccttgatcgaggccttgttggcctcgagggcggccttctgggcctcgtcggccgagccggagacggcgtgggcgagggtggcgacctcggcgaccttctcgagggcgaaggagagccagtcgagctgctgggcggtcaatcggtcctcggaggcgagggtgaccggggtgtggagcaaggaggaggaggtggcgacgatgactcggtcggcgccgagggcggcgatggccttctgggcggtctcggcagccgcggcgaggtcggccttccagacgtttcgtccagagatcaaaccgagggagagcacagtcttcttgtccttgatggcggcgatggtggcgtcgagctgggaagcgtctcctcgctcggagagatcgacgtggatggcgtcgacggggagatccttgacaaagtcgagggacttgccaagtcggccgaagtaggtggtcaacacgatcttgggggcgaccttggagagctcggcgtaggtggaagcaaactcggcaccgagggactcggctcggtcgaggacgaggatgggctcatcgatctggacccactcggcaccagcctccttgagctgggcgaggagatcggcgtagagggggacgagcttgtcgagcgactggaggggctcgtaaccgggggcggcgtcagcggcgggcttggagaaggcgagcaaggtgatgggtccgaggaggacgggtcgggtggtgatgccgagggccttggcctccttgaactcgtcgacggccttgacgttgttgagcttgaactcggtggatccggagacctcggggacgatccagtggtagttggagtcg

SEQ ID NO: 1433 - DNA, 803 bp, Xanthophyllomyces dendrorhous
taagaaggggggagggaaggattagcacgtgcgcagcagcggaagaaatttgcaaaaaaataattgaaggcgaaaaaaaaaaacccgatcgactcaccatttcttcatctccatggcggaaagatcgataccctgctcagggacctgtcgacctcgacccatggcaaaggcaatgtcaaggggggagagtccgtgcttggtgtatcgctcggggatcaagttgaaagagacacagtggtcgaggacgtgatcgtagaaggcaaagtcattgctgtgtgtgtgtgtgggagggaagaaatgggatgagttggtaaaatgaagataaagaaaaaaaaagaaaggaaaaaaaaaggaggcatacgaagcgatgaaatcggctcctcgctccttctgggtctgccatcgctgctgtcggacggtcttggcggtggcctggagatcctcagcagaggtcttgccagcccagtaagcctcgacggcctttttgatctctcggttgggtcctggggaagagaagtaatgggaaggaagaggtaaggagatgggataaagagatgaaagattagatctcggttgggaagggaaatgggagaaaagaaaacaaagagagagggatttgccaataacgaagacgaggagatcgacgatgattggaaaagggaggggaagaaaaaagaaaaaagaaaagaaaaaaagagagatggagatggagacgaaccgattcgggggaatccaagaacggcggaagcgaccatgatgaaagtgtgtggtgggtggtgaagagtgtgtgtgtgtgtgtgtgt

SEQ ID NO: 1434 - DNA, 52985 bp, Xanthophyllomyces dendrorhous
cacacacacacacacacacacacacacacacacaccaatccaaatgaaagaatccgatatccaaataccaaaccatcatcaccatcatcacctcaccatcatcactcgattggaaagaaaagacacagagatcacgacagggagagacagagagagagaagatttacgataatcggtcagaccggggcgatcgaccgattggagccgcccgataagccagccagccagcagccacacaagcacgcacgcaagagcacagcccgtgtacagcttttgctttcacgtgtctacacctacttttgctctgtgcacttactacccatactccaacgtgtgcatgtctctttcaaaaatagtgccggcacaacgattgcctagctctaagcccgggttattgatgcactcacactcacactcatagaatgttgaaccttattcatacaagcatcacacacacacacatacacacacacacactacaaagaagagaaagaaagaaaagaaaaaaagaaaaaaagaaaagaaagactaaggtctccttccaaagctcatccaaagaagcccttcgtcccaccccgacctcactgctcattcacaaacaccgaggcaagacccataccagacccaatgcacatactcgtcacaaacaccttctcgccagatcgcttggcatgggcaagcgcagtcgcaacctgtctcgccccggtcgctcccaacggatgaccaagcgcgatcgcccctcccccagggttgaccttctcaaagtccaaccccagcttcttgacagagtagaccgcctgggaggcaaacgcctcgttgatctcccaaaagtcaacgtccgaagactcgatccccgcgttcgccaacgccttcgggatcgccaccgccggcccgatccccatcaccttcggaggcacaccagcgtacccggtcgtcacaaacttgcccaagatcggaagcttcagcttctccgccatatcccgccggacgagcaacaccgcggcagccccgtcagatacctgggacgcgttgccagcatgcgtgcttccctccttcgagaacgccggcttcaactttgccagcgactcggccgtcatcccatctcggatcccgtcatcctcgtccaccagcaccgtctttgtctctcccgactttggatcaacaatctcggtctgtttcgtgtacgaatcatcacacatgaccagaccaatccaaaatgagcactcgggtctcgagagaagaaaacacatctcacacaactaaccttgacgggaacgatctcctccttaaagtggccagcctttctcgcagcaaaagccttctgataagactttgctgcaaactcgtcctgctcctttctagtcactccaaactctttcgcaacgttctcggacgtgatccccatcggaatcaacacgtcctgggcttcctggttggagagcacatcttccgagatcttctcaggtaggacaccagctccgtagtgtgtcgtcatcgacttgaaacaagaaccaaactcagtcagcgcatgcccagaggagagagtgagtccaactgaaacagattcctctcactaacctcgactccagccccaataccaatagagatctgaccacatgcaatcgagttggcgatctagggtttttatatttgagaaagaaagaatggcatgaaaaacgattagttcaggggaaaaccccaacatcacatcaatctcacatctgagaacgatactgacctgagtgatcgcttggagagaggaagaacactgcctgttcaccgtgttcaaagacgcactgcaaaaagaccgtcgttcgatccaatcaaaagaagagagatcaatgatctgtgtggttccttctccaggaatccaacgaacaagagcgaagaaaagaaaagaaaagaaaggaagagaaaaaagagacaaagacaaggaggtcgtacgtatgagggatccctgctcgaagctgagccattcgagccacgttcgcacctcctccaggcggaaggacatttccgacagcgatatcgtcaatcaacgacgggtcaaccttggatctctcgagcgtagccttgaacacagccaccaggagatcttccggaagcgtatccttcaagcctccttttcgtgcctgaaaaagagacccacagcgatcacaaagactaaaggtgtaagcaaaacaagacgaaaacagaaagcatatggacggatggacgaaccctggttatgggcgttcgaacggccgaacagatgaccacatcgttcgcgttcttttgcaagatcttggactttccagatggcattttcgtagtttgtttgattcgtgttgttgttgttttttttttcaaagaaaggatgaacgaggaagtaatagatgagcgagtgtcaagttgtggttgaaagatgggaaggaggaaggaacaagcgagaactgtttgctttataagtacgagcgtgtgatccggtccggttatatgacagccgcaaacaaagtcgctcgttaaccgaaagcatggtacatcacgtgcacactttgcaccgcctagttcaacatgcacatcgaaccacaccgaaccagcccggttcgcctgaagaatttggtttatcccagaaagaaaaaatctataggacacttctgcgtgtgcttaattcgcaagttgagccatcccaacacattcactcacacacacacacatcaaccctcccaatatgcgacctttaaccgaagaagaaaccaaggctgtcttttccagtttgtccaaactttcgcttccttttgtgtcccgccataaatcactgacgctcttcctttcgtcccttgacccaaacagagcttgccaactacatcgttcgtcctttcctttccacatgctttgtgaacgtactcaatgtcgcctgatcatcatcaccatcctcttcttctgtatacagggaaagaacttggtccatctcgttgatcgaccggaaggcgaggaacactgcttccgattacacaaggaccggttcgtccctctcttatatatcgaacgcgctttcctctttcgactaaagtcgtctcctaacttgtctttggtgccatctttctgtttcctcccccccccttgtgactcccggtttctcatgtcaaccctcactcacaacactacagagtctactatctcccgacaccccttatgaagcaggccatttcgatcgctaggccgaatttaatctcgctcggaacatgcttcggtcgattctcaaagtccggcaagttcaagttggcggtcacctcgttggattacctaggaaagtacgcaaagttcaaggtaaggagtgttgactctttcgatccgttcatatactctggttgactgcgaccaaccatactgaccaacatgtcactgtactcatacaaccacgtcttcaggtctggatcaagcccaatggagagctcccgttcttgtacggaaatcacgtcgtcaaggctcatctcggtcgaatcaccgaagacaccccagagcaccagggtgtggtcgtctacagtatgagtgatgtcccgctcgtgagtcctgccatcttcccaagctcgctctcccgtcgtgaaagaatcgttaagaaacaaaaggggaacacagataactcaatgttcggtgcggctaaactgacatgtatatgtgtgtctccctcttctttcccttggcgcgggcagggatttggtgtgacggctaggtcgacagttgatactcgaaagttggacccgacgtctataatagtattccaccaggctgatgtaggagagtatctccgagacgaggtttgtcctatcgctcactgttgcgaccgacgaagcacaaccaaacgaagtatactgaccttgtctcgacaactcttgcttctctctccacaggatactctattctaagctcttctgttcaatcttcctcaactgaaaaggaaagaagaaggaaaaaaagaaaaaaaaacccctctttagaaacgccttgttggcttttcgtttaccttttccccgacacctttttactttctttctctttcacaattctctcaacctcttttcgccgtgtatagaatacaatgacatcacacgtaaggagaggcgaataggagacgaaggagagaataatctcatgatttcatagtttcatattgcatgtttatcggttccaaaccttggtggccatttgtatagcgaacagagacgaacggcgacagtattgaaaacaagcgggttcataatgttagggctatcttgcgctcaaaccactatcacatttagccttctcgtgcgcccttgcctcgagcccaatcgcctcgggatggtgtgtatataataagctaaatgtcgttcacagagaagctgagatgttcagcgaagggaatagagaatgaaatcacagcaaagtgttgataaaataagaataaaaagcaaggcggttactcgcaaaaaagagttgcactctattggaccggacatattaaatcgcgaaatcccgcacgtgtgttcaccgtttagggattgtctcattaagtactcaacagaatatatccacccatccacccatcctacttccttctggtcgtccaccgattggcttacttctcttttcctgttgtcgaccagtgtctcaagccaaggttctttccagaagcccagagtccgaacatcgactctcagagtcatatcactcagagttgtctcctcgcctcccgctctagtcttccttactatgcccgagcttacgccagccacgacgacgctgcgaccagatgagccgctcccaaagcatcttagaccgtcacatgcttggacgaaactatggatcgccacaaagaatagcttgaacttttatcggttcgtttaattttcacctgtctttggtctcgtcctttccttctctggtcagagcaacatcgcgtgtaagacgggtgggagaaggagctcgcaagattcagaccataactgacgggtcttgtcgttttctacccaatctctgaatgctcatctgggttatatatacaaaaaaccctgttcatcagtgtgcatctgttgttcttcacgatcgtaagtttgttttgatggttcataaactcattcataggaggatacgtcacagaagcgaccaggcctattcttccaaatggttcactccttctttgtggccacgaacgacactctgatgattgaactaatcgagacttctctttctttcttggtcgacttgtcccgtcatagactccgctagtgtgtattctataatcccttttcaatcttccttaatcccggccgtatggcaaactgacagaccgagcctgtttcatgatgtcagttcttctctgcactgatgtacgcctcgaacgaacgtaaggcttttcatatgtctcgtattctttttggatctatctccgtccgactctacgatgttgactgaccataacgaactctttcctttgtggaaatctgttcccgcatttacagaattccatattgactatgtcgactgtcttttcaactgcgtgagcgctatgacgtgcgttcccttctgttttctctctcccgctcttcggtctacgagctacaagccaagcgaagtaagactaacacccatcatgctccctttggactgacggttcatcatgtaccgcagggtttgtggattggcgacaagtaatttgagcacgatgacttcttggcagcagacaatcttgttcatccagatgtgtatcggtagccctgtgcgttcctctttctctctctccctcccttccccactttctccttactcttatttttcattacggtctaatctcaccattgcatctggacacacgcgcctattcctctcggacgaaacagatcaccgtttcgctcgtgatgatcgccgtcagaagacactttttcagagtcaaattccgacatgtgatcgaaacccacagacggaaaaagtcgttgtcggaaaagcgatcgagacgactctcatttttgagcagagccccttccagatggtcgaccaaccctgcaggccctagcggtgctgatgagaacgacggaacggtagcaggatcaccaccagaggcatcagcaggaacatcgacagcagagaaagtaggagaaacctcagccgggtcatcgaactgcgacgaaccagggaaatcaccactgcgggctcagatgtactcgtctggttacacttttccttctcaatcccgagcggccgccgcttcttcttcctcaccctctccaaacgggctcggatcgaaaggcccgttcaagtcgtttgcgtcaatattcaatcgattgagcccgaactctgatttcgacgaagaatcgatcgaagagagaaaagaacgtaagtttgcgaaaaaaacagctagactcgaacaagagcgagctcgaaagttggcggaccaagcggagaaagctcgtcggtccaagggcggaggaggtggtcgagtcggtgggctgcacacctcgatgatccgacgagtcgagggggaggagccgatgctggtcaactcggcgggactcagaggaggcatggctgtagatcgaacggacttcgaactcaacaacatcgccagatccgaaaccagcgcagatgaacacaaccaggcagaggtcgaaacgccaatagagacaaatccacgagcacggcaaggggaagcggaagaggctgagcaaccaacccaggaagagactgaggataggtacaagggggcagaacatccaagactgaagcatatcgggcaaatgacagagtcacctgcgggatcaggatcagattctctaggattcgttgagccagaagaaatactggcaaggtcgaacgcgggccgtccaagaagagtgtctgagcctgtgctggtggaccacccacctcagccgcctcaaccggttcacggtatgccctctgttctctttatttctctaagtctctctctctctgttagagtttgagtatcgtgctggacattctcttatcttgcctgaatcttaaaaaataaaaacgaaatagatacgttccctcgatcgaaaacaattgcattcgatccggaacagatcaatccttcgcatgcagcgcatcatgcctctcataccgggctcaacggcgatcacaattataaccacaactataacaacaacaactacaatcacgggaacgacaaatcaaaaaacttcacgaggacggggacgatcgagttcgttgagggtgatgcagcacgtttgggcagaagaaatggcggaggaaccatgttcgaacgaagtacgtttttccttcaacttttttctccgtgttcacaagaattcggatttcaaagatatagcgaaaatagaagtacaaaggttgatctgagttgaaacataacaatcacgacgaaccggatcagccgcaactcgtcgatccgaaggcgcaggtacaatctatggcccgtccacctcacttttccctcgcaccatgaccaatcgaacagctggcggtcgatcaactaagcattcggggtttggagggttccccatgccacacgagattatttcctctgttgccgcctggcttttcccgaaagcgacagaaaagttgacaagaacgttgacgatgcaacgaacgggaacgttcgccagtgctagaagcgcaggcgctggtacaatctatggaccaggcgggccgaagggagggggaggtgtggtgaagagcgtgccatacatcacgttcgacgcggtcgttggaagaaattctcaattcaaggacttgagctcagatcaactagaggagctgggtggggtggaatacagggctttaaaagttctattatggatcatcccttgtgtaagttctgaaagaagagtcatcgctccttcatcggttcaattttctgggctgacgtcgttcatttatttgctcgtccgcttttggcatcagtactatgtcggagtccaactcctaggttgggtgatcatctggccgtacgtaaacagcaagttccgagatgttttttcggatccgacgatccaaaagcaagatgtcgagattggatggtaagttcattttagttcttcttatacatgtatcgcgaaggacgagtcatagttgactgataaatttaaattggggatggcgatatcaggttttcagcattccaggtggtctcagcgttcagtaacacgggaatgagtctcgttgatacatcgatggtgccttttcaaacagggtacatcatgatcgtcgtaagttactcttcaccggcatattacctctttctacatacactcccaatttgtcgggttttcgtccttttcactgacctcttcttcaacaactgtccgatatggccttgaattggatagtacttaatcttcctgatcctagctggaaacactgcctatgtgagtatcgtctatctgtatgaattgcagaagaaaacaaaatctgacgagggaccgtccaccaatatggggatcgtctatacagcctatcttgtaagttttcgtctgattatgctccaaactcatccggatgatttctgacacttatctgtcgccatgttaactcgtattcctgagttctgcagccttcgtctcacgatgtatgcatcttcccttatgatctggtctcttgtaggccttgtgttgaccttcaagttggttgtttcgtttgggtcaaacttggtattgcagctggaacgtctccaaaattgtcccttcaacctctcggttacacgaaacatgtcgcttcttgctagatcacccacgtcggtgttacatctacctgtttccgtctcgtcagacgttatttttgctgatggtcatcgtcctaatgacgtgagtcatctatccgttttctttattatctgctttcaaattcatttcaactgaccgatgtttgccatttgggatttgaatataatggttgataggatgaccgattggatatcgttccttgtacttgatataggaaccccgtaagcagattattgttaaaatcgaccatggtcagatcctgatgatcaacatctgatctctttacatgttttcatgactggaaatgagcagcgcaatcgaatcgataccggtaggaacacgtatagcgagcgcgttccttcagtcggcagctgtcagagcggctggattcgcaatcgtgccgttatcggctttggctcctgccgtgaaagttctgtatactattatgatgtacgttcttttcttctcttataccttctggtctcttctttcttcgtcatcatatacggagtataattctaagaataaagctaatggcattccttctataggtacatctccgtctacccaatcgccatgtccgttcgagcaacgaatgtgtacgaagagagatctctcggtttgttcggagacgaagatcaggaatcgttggacgaggagagctttgtcaaggtagggggcgagtcaagaatggctggtttcactcgatatgtctctttccatgctaggtatgagctttctcattcccaatacatagttcacatcgtacaccgtccgagattattttgtcttttgttcacaacaggcgtcagttggctttcgatatctggtggctaggtgagctatgtttatctcgttgtcttcggcgtttttttagaaagtatctttattgacaaatgttctctcgtctccaatctgttactatttacaaagcccttgcgttgtggcttgtgtgtatcatcgagcgagggcagatcaacgagtcctcaagcgagagctatttcaatatcttctccatccttttcgagctcgtcagcgcttacggtacggttggactcagtctaggattgtcattcgtaggtgctataccctatatatatcagaataatgtcgtcacattgaagcttaactacgaattctttttctttttgatcatatgcacttggcacatttgaataggataactactcacttagcggaggattcaaagtcctctccaaattggttgtttgcgcggtgatgatccgaggcaggcatcgtggcttgccagtggccattgatcgagcagtaatgctaccgaatgagtttgccgaggaagatgctgaggttgccgaggaggaaagatcgagacagagcagacgaggcaggtaagatcttccaatttagctgaagccaggtagtcattcgcgtttaaattttgttcaatcattttttaactgggtttcctcagtacatactccttccgacaagggcctatggatgtctcgtacggccacgtccataaccgtcgagcttccactttctctgcgcatgttccccgtcctgggccacctcaaccgttcttccttccttcagccacgagtgatctagaatgcgctgttgacgacgacgatgatgatgataacgaatatcaacgaagatccgctgatcaaccggtaggaggttcagctctccctggtgttcattcagttgattggacaaaaccccctgggataggtaggttgggtggaggggcaccggggagtctgacacctgtgaaagagatgatgagcagacgacctagtgtagacacaccttgagtagactccgtctcgccgcctctctcctctcctccctccctttttgcttttacacggtttttatcggtttcaaaccatctcattcgcaaacgctccttctttctcgtccttctctgtacatcacgcctagctttcatcctttctgtctgatttctttttgcttctacatcaaacagtccaatctgagacataacatcatcactggatagaacgaacctcgtctgaatgtcttatcatctcttcctgttctatcttgacatacagctgcaatcttatctttctttctctattcgttcttctggtcataggtattgtactttgttcatcttcaactacccataatcaaagcaatctttgatgtcatttgcatcgagctttactatccggcataagatatccagggttaaatacacacaaattacatcccacgaaacagttatctactggaagagaaacagtccgcatcttctctcattaaattcgatctacacagcacaacagtgagcactcagcaaagtcgaccccccacatcacttatgagactcaaaatctctttccgtttgacccactgagtcttctgctcaatcgtatctttcgcacccagaacttcaaggttcggacccaatgtcgagccatgatagggtgacaagtagagacagagtgccagggcggaaactagtctgtatactatttgattgatgatcggtttgaagttaggaattgaaagaaaagtgaaaaataaatagattaatcatgctttcaagttgagtgcttcctctcgtatcgcgcaacgaaaagaaaagaggaaatcagagcctacaacgtaccaacatcttccgatttgttctctagcttgatggcctcgacaagcacgatgacgatctctaaagtccaatcaccttcctctgccgactctatatccttttcaagctcattcaatgagtttcgtcgatgtctcaatccactgacattgaatgccaaaccagcagctgagcttttcaacgatacatcgtcactgagaagattatccaccatgagcgtcgtaagaatctctcgcggggaagaagcagatgatgaggatgaggacaggttggcgagttgatgtgttgtggagaggacgagcgatgcaagaggaacggtagtgaatgcgttcgctaaaaatcgaagggatgtaagacagaatggtcgggagagggatgagccatgaccggaagaggacgcggagcataagctcaaaagttctaatatgggagggagggatgtgttggcatgatctctggggatagaagaggacgtgacaggtggcatggtactaaacgtcgacactcttcgatctatgatggcgatcctccaaagatcaatgagggggaatgacgcttcatagccgacgtttcgaataacttgtacagttgctttgaggaactcccctaggagatcttccagcttgatcccatctgggacagcctttgtttccaagaatggaacaagctgtctttcgaccaactcgaccaatcgtttacgttcctcttccccaagcgttccatattcactctgcccatccagcaatgatccttttaatctttctatcaaagctggatatttcggcgccgcgccgtagagaatcgggtttactgacacggcctgaacagcaggtaaaggccatgtggaatgagggtggggcgggaacgcctggtaaagaagaagatcgatctttgtctcaagttccgattcatttccacctcggagctcatctattttctcttttccaaggaaaaagacaaacgacggagtcgcacggatccctagttcgacagcaatctcacttccccgacccaatccgatatcaacggtggtgaacgcataagatttagccggaacacctttgtcgtgcatttcttgagatttcgattgagccagacgctcaaatacgggctctatgacacgacaaggagggcatgtacgtggtttggtgacaaacactacggtagctccatgggagttgaggatagagtggagagaagcagacgaagatgcaatctggagaggagaagttagcgtagatgaaccgtttgccgaggaagtcaattgaggtgcggagcccggggttgtagaggaagcttgagcagctacagaattcagaagagtcgaagcaagaccctgatactgggcgggtatgcctgacggtatgttcggccgagcctgagacgatagagggacagattgagttgggacgtttgatgaagatcttcgtgtgggattaaacatggcgtctatttgaggccttagggaggctccaaaaggagtcgagaggaagtccgagggaagatctgagttgaagatggcagaagacaatgataaactttgtacgcaaaacaaggaatggagatgttatacaagcaaaaggtctcgcaaacaaactcactagatatccaacttggtatggtacccccggttaagaagccaattgcatcggcagtaaatgagttgcactggatatgtacgcgcacgagacgatgggagttgaatggttagcgcggatttcaagatcaaacaacggacagcctggcatgcgtacattaaagtctagcaaatgatactacgagagggagtgttaggatacagcagcactcgttagcatgttgtatcgtaatggtatgatcacagtccttcaaaaacgctctcaccttttccgccgtccaatgatctttcaagccgtccaggtattcctcccaagtttcctcatctaaagcggtctcgcccatcgggatgatcttcaagggagctccgtgctgctccacccaatttgacaatgacacatgttagctttacgaagcgagcgcagatcaggaagatgtggatatatgagattttacatgagtggaagcaggctttgatttcagaatcccttgtccgtagtatacttcctggccgaatacaacgaccgaggtatctaatcaaacggtggacaagggtgaatacacacaatggtttgcataaggagacgattcgatgttttcaggctctcacactctacttctccacatgggatagccacttggaggagggagacttgtaaaactcacgccatattccatcgatctgtttgcctgttagtggaagagaaagcgacctggcgagaccattactgagatctgttccacaagcgcccggagcggcaaccaagacagcgatcagaccaaagtcaaaatcagttttcttcatagagatggttgggactatagtggaagagagcgaaccgtaaacgtataggtctactttggacgacatgtttgatgagcgacgaatagaatgaatgttgatggaagtagtagagagaggtcgggtgtatgcgcctcaacaacttcgtcttgacctccatcatcatcgtacatcatcatcgttctgcttctccttttattcggccgatcaccttctcgatgacattctctagtaaaaacctcaatcggttgctttttcaatccttatcgattgctcgtccaacaccttctctcgctctatactcaacaacctcacctatcaacccgtcgacaccttcaccctccgctcggaagagctcagtgaacccctcagaaattgctcatttctccaaactttcctctcaatggtgggatgagtccggagagctctcacttctccatcgaatgaacccccctcgacttgaatttcttcgcgagaagcttcaggagagtatgtggagggaggacgtacgggcaaaggagctcccaaaggcaacttggctcgaagggaagaaggtcctggatgtcggctgtgggggaggtctactttcagaggtttgtctcttacatctgttttgaatctgcccgagagatgatgatgctcactctttttctctctccctttggaactctttttttgttgaccctgacagtccttagctagactaggagcaaatacattaggcatcgacgccacgcctaccaacattcctctcgctcaatcccacgctgctctcgacccgatgttggatgcccggttagagtaccgacatcagacagctgagcagttgttggaagaacagaggggctcattcgacgtggtctgtgctctggaagtcttagaacatgtcgatgagcctcgagctttcttaaacgatctagccggtttggtcaaggtgcgtttgatctatacctatccttccgtttttctttcaatttccatcgatttatatctgacctacgactagtatatacgtatgtttctctctatcagccgggtggccatctcgttctatccactatctcccgaaccgcacttgcccatcttcttactatcaccctagccgaaactgtccttcgtcttgtatcccccggcactcacacatcctctaaattcgtaaaaccgacggagcttgacgaattctttgattcgttaggatggacaggtccagagagagagagtagaggtgtgatttacaatccgttgattgggaaatgggtgttggtcgcgaagaatacaggagagtttggcaaactggcgaactatctgtatttcgtgaggaaaccgttggatggataaaatttagctttccttctttgagaaaacgcagagcaagattgagttactatcatcgatgagcatatgtagatcatgacaatggagaagaagactatgagaggaagaatagaaaggtggacttagaggccaagcgaaatggtttacaagacaattagacacgatgcatatatgatttgtcaatggaaagggagagtcagtgcagaggtgaaacacgcggaaagagcatgcatatgcgcgcaagaagaggaagcaaattcaggtctctgaatgagagatgtctatgatcaaattatcagcagagccgaaggcagagagaagagcccaatgagcagcagagaacccagatcgatgataaaaattagaaaggttacaaaatgatagggagaaaaaacaaaaataaatcgaaaccgaaacgagatatgcacaagcacaagcaggacgatgggagtcaagccacgacgaattgcggaagtcaggaaggacagaaccgaaaacaaaagagataatggaggcagtaaagaaaaggtggggtatctagattataccggaaatgtagacaaaatacgaagacgacacttcataggggatacatgatcaagaatatctgggaatagaggaaggaaacatgaattaaagaacccaaggacaggaagcagttgatggagaaagcaaggaagttgatgtattttggaggaaatgtgagtggtcatatgtgatcttggaagtcactcgaggtctgttcgttcacttctcgtgagaaaaatgaagtgaaccaagaacagaacaaagacgacacttatgactaagtgattctctggcctgccccgccgccaccaccctgtacatttctgacgattgttccttccctcgccagctctcttctcaacacttcttctgctccacttcctcctagactttctacctgaaactcatcatccatcggtggagaatccctctctgaatctgagaagaatgtcggatgtgttaatgcctctctgtaggcgtttgagattgaattcgcgtcctctgttgaaaagggtgacgcgacgaccgatcgttgttgacccggtgaagtcacgagtggtcggaaaggtgtagttgtgattggggaagacaacggaagatgaccctctctgtccatcgattggtttgagtatgtgaacgtaggagacgtaggagcgagcattgagtcatcaccacgatttgagactgtagaaacagttccagcagctagggcacctgcctcggcactagccagttgaagtgatcccaagtcattggaccgagcatcttgttctcgcataatgggcgcgttcgaattcacagaggcccctccttttggcgattgtcttctgtgagtaaatccggccaacattggcgttcgagttcggagtcggcgaacaatcaagtaggctatgatgagagcggctatcaagaccaaggcactgaggacagaaacgaggacgatctggtttgaaacgacaataagaaggatctgcatcaaaaactcttccatcgaaatgtacagattcagtaaagatccactcaccgcccatttaggaatagctagaccactagagcttccttgtaggctccccccaagtccactgccggcaaggatacttgcgcttgagctggggtttgcttgagccaagctgagcaaactgctcacactgagtgttgatagactgcttacgcttgctcttgatacagaagacaacgttgttgatatggatgttgacgtgagtgtcgcaatagacgctacagagagagatgactgagaagcgatagaggcggtcgaggattgagacgccagagattgagaggctacggtgggtatggccgtttgacgtgcaatgaaagttgcctggtgcacctcggctccagtaagttgatctgaacgaatcaatgcacaatatcgccaagtattgagcacagaggataagcgaacagagcttgttgatcctgaagagaaaaggctgaagtgaagaagggagaagaaacctaccgccaccggggacaatcacaaaatatgcttgccaagaccgagtacccgtactgcttggcaggacgcttgcaccgtattgatcttcccaccaagcgtctgatggagaaaatgccagctggccttcctcatttgaaaggctggtccatgaacgaataagggtatccgatgaggcaagaaataaatatacatctactaggttggagcttgcgataaagagtggatagttaaaattccctgaagacatgcatacccgaacacactacgtcagcttcattccgcgaaaaagcagatctgacgaatggtcttgacatacatatcaacttggaccactcgttttgtattacgacagtggaatttgtagggaagcatgtcaactgatcgttccctacgtccgaacaatcaggatctgaggacaagagcaaacgaatatatagaatgagcgatgcgccaatttcaaggcgaaaaagaagcggaacgataaatacaaacatccagctgccacgggtccggtagatgttgctcttcctcctatttcatgctcgactgataaggcatgtacagatgagcgaccacgaaaaaaggtttcattcgatttgagttgtctgagcggtgggtcatgacgtctttgcttaagatcgaacggtagacttcttcctttttgatcggaagaggaagaagaagcggtcggatgccccctactggagagatgcatcggaaccgaggtagttgtcaagatgaacgaagaaacagcagaagtggcaggtgtagaaagaactgtctgatctcctgcagtctcaggctgaacagatattgaggtggatgatggaaaaccaacgacaacaggagctgctggtctgggtgacattcaggatgaggatgatgtaaaaacaagaagattttttgttttgttatttccacagtttgcacctctcatccactctcctttaccaccgtgttatctttgcttacgggctcattccttcgatcttccctaggtcatgtctctcaacaaactggtagagctactgatggtctcctcgatatctttggtccgagccctgccgtcagctcactactcagaaaacatgatggttccccgagcaacgtcggcctacgccgatgctgtctctggcggaggcagcatgcttaccgtgcgtctttccttctcattccctctagtagcgttatgttgcatgcatcgggttgtctagaatttttacctaatctgttgttgtgttgcaaacatcttgcccaatcagatcgttagtggaacgtatccggcggggttgggggaacctcttaatatcatcatttcgggtagttcagatacagacgttttagtagatgctctaacagacggtggctttcagaactacgctcagtttgtcgtctgtttcctctataatcgttctgttgggaaacacctgactaagatttggaatctgggtttctccttgctgtgtatacttacatcaggagcttgaatttcagcacgcaatgcctagacagctcgcttaccaactcgaccggccaacaggccaacctaggtgacggacagaacgtccgtacgtatcagttcttatttggtgtatgggcatcaaacacactatgggggtacaagaagatgactcatgatcttaacgccttgtttcccgccttgcagagactgagattgccacttttcgatataactatggggatacatttcttgggttagttcttatacttggtgtgcatcaaaactgtaatctttgctcatcagtctgtgcttttactctgtttatagagcatgcaaagaatctatcgtcggaggcaatcacttccgatactggaaacaagccaacacggacgcctactttcttgctgcctctgtagagatgaaccttacatgtaaggagacgactgcctccgctttctttgtgcgcatccgcgaagattgctttagaatgctaattatgtttgtttgtttcttctgataacatcgtttgtggaacagtgagacacgatattcagccaaatggttataaccttggccgagattggtttgttggtaatgcgtcgtcacacactgtggtggacacacactctctgaccaatgggtcatatttcgagggaacgagctcctcggatgggtgagtttattcagcactgtgaacaagaatcatctcctctcatccagttatcttggctggggtctgtcacaatcagatacacctatcgaacgaaggttaactacgtgtctggacttcttgcaaactcatctggtaagcaagaattacgtgagctttctcaagtctagtttttttcccacacatgaattcatgtgtacaccttgctgtgaatttggaaagactctataaaccatgccgataccgtttcggtcaatggtttacccgcaatcgacggcctcgtcgccgtcctgaccgtaacgattgatactcggccttctgggtccgatgcgaggtgtgtcccaggaatacattactctatcgtttttctttgtcgaatttttttttcagtacgcgcttaaagaaactgatgttatgtgagggtttattcgatgtttcattggggaatatctagtccgtcaagttcttcgactcagagcggcagcctccgtatgacgtctgtaccaaagatgctcggtacgctgaatggtctgactgctgggttgattgttggaatctactttgggttcacattctcctcttgatagaggaatagatcgccatctttgtcgatgtgctgattagatcatccggtcggatccgttcgaccatttttccattctttatcttctctccttctctccttctctctccgtacttgctgttgttggacaatatgttatctttctatccttaccttatgtcgctgtttatcgctgtatgtcttcctccgctcgttgtaatttctgtacgctcttttcacctgctgatttgatgtcttgtccaatgaatcgattgaattcaagaaatgacgacgatttctggatgatcgagtttctgatcgatcgaagaaattctaattttttcttctcttttattcagctcgagttgtttcagtccagtttcttcctcatcaacaacatccatattcgcacttgcactcacagacctgtaaatcgctactcgcaatatgaccgctcatgatatctcccagaatgatccagagcttttagcgatcgatgttaccaacatgaactttgcgtataaggaagagcaggtcttgaatgatatcacgatggagattcctcagggagaaaggtatgtcctccgagtttacgtttcatatcagtatgatagaatggctcattaaatgtctttgtggtttcatatgttccagagttcttgtcattggagccaacggaggtacgacgttaacttacaagcgtcattctatgccgaggctgatctctatccacttcatctctttcttccattgaatcagccggcaaatccactcttctcaagatccttgctggtaagagactaacccccggaacaaacgcccggatgctgggaaaagacgtctttagagcacctcccaagggaatcacatatctcggcacagaatgggcgctcaaccctgtcgtccgtggaggtatgtgccatctctcattcttacgcatagcgtcttgatttgagacgaaacactacaacatagagttttttttggtcgaactagatattgtggtggagaggttcttggattcagttggtgggtataggcacaaagagcggagagacaggttgctcaacatcttggatgtcgacctcgactggtccgtttcactttgtttatgtttcagggacattcattcacttgaataagagaggcggaaggattagacagtaagcttatcattacattctgttacataggcacatgcatcagatctcggatggagagcgaagacgagttcagcttgtgatgggtctcatggtttggcttcttatttcctactgccttccaccttctttgcattcataaaattccttaccgttatttctgtttttatttatttaaaaatacaggaaccctgggatatccttcttttggatgaggtacacgttcagcagtagtctaagttctggcgttttgtactaattcttttcctctatgatcaggtgactgttgatctggacgttcttgtcagaggagatcttatggatttcttgattcaagagagtaaagagcgcaaggctaccatcgtttgtgcgtctcttcgcctcttctcactcatccgtctcttgcgcttagaattgaaccgactccctgacttctgcaaaaattgctatcataccagactgcactcacatctttgatgggctagacattttccctactcaagtgattcatatgcaactcggttccatccctcaacagcctgtcgcttggcctcctgccagagacgattcttccatcgcgggtcaagacaagagagggtcggatctgttaagcgtcgctttgggttggttaaaagacgacagagcgctcaggagaaggttggaggtggaagctggaggtcccaaacgaggagccaggggcacaaccgatgtgggtctttcaatttttattccttgagccagtgcgcgttcatctgtcctcacaaagttattccttatattacagacaaaggatgccaagacgttctacgaacgatacgagtacaacgcccctgaagttcgatagaaaccctttagacttctggacggtgtctgaccttttctttccatccacatcgctctgatattacctttgattgtaccacttgactctttgcaagacgttcaacacgcatctgtacactttttctttcacattaccgcatcacaaccaacctgtttcgttctaggaatctatcatttttgctcactagacttccctcttagatcatcgcaagaatctttatatcgattatagctctttagatcaatggattttttcaacattttttgtcgatgggcacttgctttgaacagcatagaaaatcgatgtaagagacatttatatggtaacgattggaaacgacagcactagacagaagaaccagaagagaagcctcaagaatacaggtctaagagagaagtgaagggagcaaacaagcaagaaatcctttttgaagaatttttgatgaaagaaagaaaagacaagagaccattcatctaccttttctcctcctctttcttctcatcttcagctccagcccccgcttcaacagcaggtgccttctcatctacatcttcacgtaaatttgatgtttctacaggcagctgttctgggacgaacaacccatcgataaacgtgggcaagaacctctctgtcctttcgactgttgttgcccagaaatctttctggactgccgttctagtatcaggataagtcggttgaagcaatcgattcgaagagtggaggacaaggagcaggtttttgaaagattctggcacggcttcgtactacagaaaggaaagagtatatagatctgcatcagtagtgctaatcttcgacatatgatgtccatgagagtcgagatacgtacaacctgatctggtttttcggagttcataagtctatccaagcattccaggacctctaaccaaagttctttcaaggacttatctctaccctctgctccctccaactccttaaccttatcagcgtcatcgacctcactcaagaatactaagaacactctgcagattaaccccatcagcttcagcctactctcttccattccttgaggatcctgtaagaagacttgaggtttcaaaagctcgtcaagagtagggaacaagatggattggaaagcgagatgaatcgagggaaggtcgtggggtacagcaggggagccgggtagggcccgctggagatacgtgagggcacgcgttcgtagcggtcgagacgggtgagggacaaggtgggaaagagctttcagcggaggaagatagaattgtgtaacagctgatagttttgagaaaaaccacaaatgagtacaatttagcttaattttgtatatgcagaaagagagcaaaattacaacagaccttcttcgaaagaagacttagagttttcaattaagttcatgattggcttcttgagctcgaacagcgtgtccacagcgtgtaaagctcgttcgatagctggttcacttttttccgcgaaaagtgatacccgaacgtgtacaaagggtgagtgatttgcatactcagcatccaaaggaaaagtcaaggtcaacagagcaatatcacatactgaacgtcattttgaaggccccttcgtcctctttgagacttgatgcttactacacccgagtaatttgcgaactcgctcaggattccgacgatgcccgcaaagttatcagacgtcaatccaggtcctaactcgccagcaatgatcttatcgatcagtcctatagatgttttggaagcctcaggatgagagattgaacctctaactaaagcgagaattaatccccattcggtttgagaccttgacaaagctgtgtgtttaacatgtgatgtacctattattcttattgaatgtgcagttatcagacttacttgattaaactagcatcttgctccaaaatcttggcgacgccggccatcagttgctccgagacggagttaagaattggtcccgggagactacgcagcaagtcaagagagacataaagctgatcccgaagtgagggctagagatatatgatgaatcaggagtttagcccttagttatcagttgagtgaaaaggaagaattatgatatcacctcgatagagatcacgacgcataatcgaagcaatccaacaacggctcgttcaatcaacaatatactatattggctagcagaactcaaaagaacagaaatgtgctcgaatgcaatcggcctgcaaaaggaaaagatcgtcacccgaatttgtatcagtttattataacaacctttgtatatgatgtgcagaatggaatgaaaagacacaccaaacctcggccacatgagctcttgcctgacttgtcagactgacaagcatctccaacaaaaacaccgatgcaggatcgtatggcaaaggtacttctttctgggtttgagcaggggagtttcttcctgaggtacttccgtcccgggttgaattcattcgtgcgtgagacgacgcacgaagatgatagactcgaggagtcagccgtcgatcagctagatctttaatagctcgaagagcacaaagaagagactccacttcaagatgtcttttgcggaagagtagaaattcccaattcagtgctttttatcagcttataattcacacgggcacagctgaagtgcaatctaacgggtacgtacgtcagttggctgtacaattcctcaaatcgacatgatcctaaacagtcgattgttgataaggtggcctcaatctcgtcctctgtacaggttggtacgcccaggttgtcattactggatccatacgggcttagtaggtatgaagacagagtggataacaatccaacatccgaccgtcgttctcgagcttcgacaggaggagatacttgaagagggatcattgattgacctcctaggaaatcttccataagaagcatgggtgcaggcaagagagagtgaagaaatagcgtttggtacatctcgaagatctatgttaagttcacgaccgatgaatcaatatcaacaatacatttgaagttgattaaaagcaaagcaaaacaaaaatcagaatgcatcgagctcacctgagaccaaccctcacggatggaatctccatttccatttgcaattgtgaacaaaacaacagcggccaattgggctttaaagtttgtaccgaatcggacagaaagcgctgagacagtcagcgattggccttctacatcgatgaccgggttgttgatggacgattgagagagctctcgttcatccaacagtccagtagctgagaaaggttgaatcgcaaagctccatcagtgtgtatttgacattgtatttcttttcagagaaagaaggttgaacaggtgcctactctgagaaagagccatgacaacatgatcgaacatgtcgggcagatggaacgctccagcgatagttgcgcactcgcggaatccagtgatagccttttgaatgatataatcatcattgaacgtggtaaaccttgagcgaaaagaaacagaagggtgaagagcgcgtgagactcggcaacatttgtttcatggtacaaaaatggttgtcagatgatacttacgcataggcgatagcagaaactatctgcttggagaccagctggaacatggttcgatcaaaccgagcggtattgcaagacaggaggggacctgtagaaggagaagatcagtggatgagacctcaacaaagaagtacactctcgtcggtatgatcaaaaaaaatgaaagaacaaaccagctttgggggctcgagacaaaagttctttccatgcataatcgaatccaagctgccctgtgtgttcttctggcatgacaatctctcgcttcttgatcgaatcataaacctcgctctatcgtcatccacagaagggtgaggtgaagatacaacaagtagttcagaggggtttatccatcaaccacaaacaacatcaatgaagagagacacttactaggaacgagtcggagaaatcgaccccgtcgttaacacctctcaaatttcgcttatagtcatcaaacgccatccgttttcggacctgaggtgagaagagatcggtattcagcataatgatggagtaagcgagtacatagactgcatcttgcgacttgatctcagctgttttgaataattcatcacggacgaacagacagaccacacatagtcagatgtcaatgattaatgaattcaccctcgaacgatagaatatacagtcaacatcaacataccgggaccagaggcgaaatatatctcggcgaatgtttctgtgatccgattgatctgttgagactctcccggtaacctgaaagcttcgagcagatctcgcatagcctctgccacgagtttctataggttacataagagacacaaaaaagatagaatcataccagaagattagccgagagtgaattagctgatagtgtaacgatgacgacactttctcgatgtctcctatgagaactagaagaacgtatttgacgtacacctttaaagtcgaacatttctatgaacgccttcagtacctcgatgttctccggccgactgatatattctcccagaaccttcttatctaacctcggactactcttcaacaagctagcaattgcctggtttctcgaaagaccaggctcggtgattaacagaccgtgttcctctaaatatgtcaagccggtcttgggtttggtgttgaatcgagaggcaccgacgagaagaattcgtttgcgctccttcgtctctgccaggaattcaaaggaagggaaagtctgatctcgaggggttatgaaattaattcgcgtggtatcgatgataataaggcgttagaccagaacagagaggaaaagccacagaagaagatgggattgtcacactcacagccggccaagtctccccttgggattcgattctagcagccatactttgtactgccgaaagaagaatttgaagacagattgtttgggagtctgtctgagtatcgggtcctagacctggtgttgtggggtatactccctgtgtttggttgaataccaacaagaagattgtgaggaagaggatggaaattcaacaatcgacacaagaatatcatgagggaaagaactcactctagtcaagaatgcaacagttctttcaaataggtcctctctgtccatatcacaatcataatttatccaaaggtcgactaagaagctttctccttgtctgctcaattgagcgagcgcttccaacaggagtcccctcgtctcctcactaacggtcatgccaaagccagtacctgagggtttagaccccgtagatggtacatcccctgcgaccgatgatgccgatgatccaccggccgctcctggttgagatgatcccgtcaactgtgacggatggagagctgatggaggaggggctagtctatcgatcaagtagctgacgaatagttccaactgaggctttaaatgaacacgcatcgttccaaatagaatgccggtgacgcgcaaactgctagcgaaaagattggacgagtcgcccctggtcaattggaacagatacttgcatccttcgtccgagagcatcgatctcatctctggccaagaaccgacagttgaaccggcggtctcgagtgctgcaccaagaatagaaagtgcagcgagtcgcatcgaatcagtgtgttgtatgtcagccggatttaagagggtgatgagaacacgaatgagttctgtcggcgtggcagagccgtagggaacaaacgggccggttgaagcgggctcgatgggaagtggttcagctgctacctcctgagttgtcaactgatcgactggagtcaacccaacagggtcaatgattggtggtccgtcagtcactggagcgtctgaagacccgttctcctggactgctgccgcttgcggtctctttatcgattcagaaagagaggcgggtccggccgctgaaacagggatcgtcttcaagtaggtaaagacggtttttaccatcgactggacggtcgcttctgctgtgcgccgtagaagttctgtcaacgagaagcaatcgtaacgacaatggttccgcaaatgatatcagatttagtttatcaattccacgcgagctcaatacttagaccgattggtgaaatcgttggaaagaaaggagaccacactcaccagaaagtctcatttgacaacataagcctagtccggtttcgagcatttcacagacctctttgtctcctaaagcgataaagtctcgagatcctccccatttatcgactagcaggccgataacactaagaattttaagcatgacaacctcgtccccctgagaatcggaagcctcaaacttgcagtgagtcacggcatgggagacgtcagagagcgcaaatggaaggtcgtcaggtagagagggtccagaggtagggaacagcgagaggatggatagcagagaggtcagggcatgggaagttattggtcctgtcgtcaatggtgatcggataagagccaagaaaggtgcgaccaaggcgggaagcggagggagatctgtcgaaaccggcaacgaaagaaacggtcgattagctatgtttccgagttcagtacataaatgctaagatagttctcctcggtgtcatgtacgtctatctgtataagggaacagaatgtcgttgtgaagaatattgatataggaagctcggaacaaataacaaacctttcgggttctccaacactgtccttctcagttcgacaaagccagccatgagttcttcttccccttcaaatcctgtctcacccctgtcttctccgataacaggtcgttttgtcctaagatcgcttcgtccgaatgatcggccggagcccgagtaggacgaggcacgggcccaccttgagttctttctcatagctagtttgttgagtcataccgttgtccaacaagagaacatagcagggaaacaaacgattcaacattagttctaaatctttgatattatgagaggtatctgctattagaaagaacaatcgaacccgaggtgacattggtgatgttcgatatgacgagatgggtcggagagagatccatcttgcgaataagtataaaacctcctactgggctgtgacgaggatgagtgaaactttatgactatatagggtctgtataaagagacccaaggagtgaggaggagagatagaaaggaaagaaggtgaggagagaccgagaggaagatggaaacgagagggaattgacgatggaaagtgaaacgctgtaagatgttgaaccagcgggaggacgtccgttgatgtgtttgaagtcagttttcgaatagagcgactacaaactcatgtactccatgtttttggtgggtattttactgacacaatctttacatggtgcatatttttctcaatacttgatcaacacacatgaaactcaaatacagatgaccgttcagtcacagtcgaggtgactacatattgaccattgtctgaacaagccttggtgataggtaagactatgaaggacaacatggtcgtttcgtctaataggaaaagggtgaaagcctgatatagagaacaagagaaacaaacatttgtctcgtcaaggaacgaggtattgcttgcttcatgtagcatgggtcgacttctcctctcttcctgatgattgaagtatagctaggaagaagaaagattaggtaacctaagaacgaagtaaaagatgagactagaatggctatagaggaagactgaacagactacgaaatcaggttacatcatcaaacctctcccgcgaggaaagaagaacaggaaacacttaagaatgtttgtccaacttgccagctcatccggatccatcatcgctcctctttgtttgagctcatctattttctcctttttctctcgacctcacctctccgttctctcttttctcactctgtttttgtattgacccattttaatcagaaaagagccatgctcatatcaccaacatatctcattctcaatctatccttaaccgctctcgcttcggcttcatccttctctaccgcctctaccccttattcgaacccactcgcaggagtggattccaaaccacgatcaggcgtagtcaagaacgtcctagagactaagccagatgtcaaagggtactgcagtgtgagtttgcaaattaggttgatctcaccgctctccaggttcattctctatagaccatcgaagctgacgaagcacatgttcatgcagccatcgggtcgaatagaaaataccttgtgcgagtacgagacgctcgaagcggttaactcggaactctatccatggctgcatcgtttggtccagacccctttcttcaaatactacaaggtacgcctcggacctgtatagattgctttagtgttgcgtacacaccattgactgacgagttggcccccctttttgaaaatcatatttatggtctcgatcatagatcgacttatacaaggagtgcccattctggtacgagaacgttttctgcatgaacagagactgcagtgtagagactgctaacgaagtgagtcataaaggaggctatgtcgttcttcttgattgcatgcacatcagcgctcatctccattacttttatgaatttttccgctatcttagtcagacattccagagaaatggagggtagcagcattgagctctatcactcattccagtgaatctgcctctcacgttagtccgatcatgttcttttgctctatcaaacatctcgaggatgaacccacaaccaacattccaaggctttcttctgaatcggctcaatcagagaggagaggaaccaggatcttgtcattaccgagaccaggatttctgccagatagacgacgaatctcaaaacggtgaataaagaagccttctgttatcatccttgatgcttttcactgtacgcgcgcacgccctgacttgatcttgcttaatatacttctggtttctctatactagagggccagtttgttgacctgacactcaaccctgagcggtttactggatacgctggtctctcagctgctaaagtttggacagcaatctaccaagagaactgtttcggtctctctgagctctctagcacattactatcgcaaagctccactagcggcactctgtcttcaaagccaagtctcggattgggtggcctgagtgaaggtgttggaacggagatgagatctggtacggggtcggaggaagaggaatgcatagagaagagagtatactatcggattatttctggtgagttttcttacactgtcaaaaagccctctctgtctatcttgagcacacaggtagcttaattgaatgagagccggctcctgaatacaaacaaacctaggtcttcatgcttcgatttccacccatatctgtcacgaattccttgatcaagaaactggtctctggcatccaaacctctcgtgtttcatcaatcgaattgcctctcacccagaacgtcttcaaaacatgtacttcaacatgatcctcattcttcgagctgtttctcgagcgggaaagtatctcgaggcttacgatgtatgcactgggatctcttttcccgagggactcgtgccgttggaaggtgcggccaagtgtcggccggaagagactgtacaagaggagaaatatggagatgcctggacaaagattggcttgagcaaggtcgtcgagctcagtagaggtggtggaaatggagaaggtagacaagaggtatttgatgaaggcgagcttttccagggaggagatgccagagtccgttttttctcttccttgaaagtctgaggaacatcctgcgctaactacttgcgcatgtttatggacaagtgtagattctgaaggaagaattcaaagagcgtttccgaaacgtttcgagaatcatggattgcgttggatgtgataaatgtagactatggggtaaacttcaagtcgccggtgtaggaacggctttgaagatccttttcgagttggacgaatcttcattagagcaagtcttccagtactgaacctcgctttcaagtttctctctctgttctgctgacctcgaatcctactttttctttactttgtttcgaaataacagtccggctgtcaatccgaacttgctatctaggtcagagatcgtagcgttgatgaatacgttacatcgatttagcgagtcccttcaagcggtggagacattccgtcagatgtatgcaaaggaaaaggaaactgctgtcgagaagagttcaaaattcaaagaagagagcagtaattcggtgcgtcgttttctgatttttgtctggccttcacaggattgatatcaacttcaattgcccaaatccttttcgcgattcagttgacaaatcaatcgaatttaccccgctacccaatccccacatcatctttctcaacactattggccactcttcgccaacgcatctttgcgggtatcgaggtgatctctcgacatcttcaatcatggctagagttgttgagaaggacgagcgtgggaagactgggcagattgacggcattttgggaaaaacttagaggggagctctgaaccaacttattttcaatatagattgatgaatattcttcctttcgtatgattcgcatgcatttagtgatgccttgataaaaaattgttctcagacgggttgttaagttgccttttgaagataaattttatgtttttttttttttggctatctctcgaaatctctcctattggcatattctctagcaaagatgggagcagaaaatcacgccggctttgaccgtcagaaattcgatttttgattgtgacccatcaacaacaccatcacagttgtgattgcaagtcataaccgacagatgccccctacctctcccatcccactgttcatcaatcgaacccactcttcacagataaacgctctctctttttctcctagatataaccgatttctgtattccggcgacgcagatggctgggttacaatcatggacaccaggtctagacggacgatcgtcagttggaaagctcatgaggatggtatccttggactagaagaatgggttgaagcgagttgtctactgacgtttgttccgcttcctgatctacttcttcggcctctacttgatccttcagaagaaagacaagccagtgctgaacttggttctttccgatatcttgtctccaggtcaggaagggacaataaattgaacctgtttgagcttccggaaacgcttcctattctcgggaatgcctcgtcaacctcatccttaccatctaagagctctccacctaagttattgtacactatggatatcaacgccttaaactactgccggttttcattactggatattgaagcggaagatgagagtatgaaagggaaagcaagggagaagagagaagcttgggttgcggtgcctaatttgactaattcagaaacggttcgtcttttttcgttttgagtccttcttcttatctcattctgagaggatccttctttgcgagctctttcatgttgctttgttttgggttggtcaactttcagatagatattttccatttaccatctcaaacaagaccacatgctgctataggcttcgtttcgtctgatcctgatacgtctctgggtcgaggagcgcttgatcctgacaaaacaggtgttgttttacttcttgtctcgctttacataaactaatttagatcaacggattctcacagtttgttcttctttatgttgatctttttgcaaatcaccacaggactcgttatgttcgttcatttgttaacacctacaactatactggtcggtacagaatcaggccacgtcttatttttcgagtatgaaggtagggctggagatgtaacggatgccagacttgatgcgcatgccgtcaaatcaagttctttgggaagaaaggaaaagagcagatgggtgcgtaggtggaaggagaaaatacacagagaggccggtcagtggcatctcgtcagcttgagattctctatcgtctgagctgacatcaggttaggaacatgacagtgatgggtttggcagtgtctccttcaaaagacttcgcgttgtccgtatccgcagatcatcaggtcgttaagtattacctagacgttcgtattcatatttcatcccttcctgtaagaacgacatatgttgctattaaggattggacatctcaaatctgtgtatgtatctactcacgatagccctactgcccagagggttcatcgaggttcgagattttcaagattaatcagctcggaaattcctcaattcatatcaacggtacaggcagggtatgcgctgttgctggctgggacggaaagtaagttctcgccctcctctgttctcagaacatcataacgattgcttcaaacgacagcttgtagtccattgttgttcatttttttcttgttctttttttcttgcgtacatagcgtccgactgttttccacgaagtcattcaaatcgctaggcacgctatcatatcacagagacacttgccatatcctctctttcgcccataggtcgtcaattcctacgaatttcaacgcaactggagtacatgcgaatcttgagatagattcaggaactgaaaatggttcctcggacgaagaggaggacactgatgagtccaatgaagggggaatgagaaaaatgaacaggcaggctcttagtagagaccactggttagccaccggtggtgtcgacaaaagggtggctgtttgggagctcatggactttgagaagcgttctgtcaacaagaaatccacgagatagatgaatcttaaaggcattatgatggaaaaaggttagcgcaggagatgcatcagaaggtgccggttggttgattacagaacggaataaaagatgcttgtagtctgagatttgcacagccttgcttctgacgagatgcttaaatggcttgtggcgtctggcggctccccactcttctgggtgtctcttgctttgttactttccatcatctcccaccatcaacagttgactatatttgacgaggatccccctttcttgaaagagatgataggcttatctgtctacgagatcgttctcgccttttgtatgtatcaatctgttctgcctgatgttgctatgttagcctcgtttattcaaggcaaagacgaacttattttgatatgaatgatacctacgtaacgtaacccaatatccctcagggtgattcgttgttgacctcttctttagagagatcaagcctcgaggagcttacaacatccctcgagaagggccagtcttgttcgttgttgcgcctcacaataaccaggtgagctcttccaggtgataataaactcaatgtgaaggattttggcttatggtgtttccggtctatgtttttttgtcgatgtaatgcttctcagtttttggatcccattttagtcttctcggaaatttatagagagacaaggcggaaagtcggtactttgatcgctgccaaggtttgttccggttctcataagacagtctttaaattatatagtccaaatatgacgggttgagtgatggaaggcgtgaggtcgattatatgtccaatacttacctctttgcttgcttcctttggcgtgggtttatgcgatgggaacatagagtttagatagagccatcatcggtcaagctgcacgagcaatggatagtagttcgttcttacctctataatttttctccttactttgtatcgatcactaagcttcttttcaacttcacgcgcctctatacaattccagtccctgttgctcgagcgtccgattatgcttatgctggttcaggaaagatcagcctttcatctaccgaccctctcctcatccttggcgaaggtactaaattcatcaccgacatcaaaccgaaatcgactcttgccctaagcaaatccctcggaagtgcatctgccgagattgaggaagtcatctctgataccgaagtcaggctcaagcgagagttttctattcctgcaaaggagggtggcgctggcttgagggccacagaaagagttaggaaagaaggagagaacggtccactgagttacaaggtattgcctcatgtggaccaacatggcatgtacggagcggtctataaacggctgaaggagggaaaggcgatctgtatcttcccagaaggtgtgtgttgggtcttaacaacctaaatgaggaggtatgcgcatgttttcgagtactaaaacacatttctctttccttcctgaatcggatcataccaggtggttctcacgatcgaacagatctcttacctttgaaggctggtgtgacattgatgactcttggcgcgatggccgctgatcctactgtcaaagtcaagatcgttccagttgggttgtcttattttcatgcgcacaagttccgatctcgtgcagtcatcgagtttggtactccaatggatgtcccgcctgaacttgttttggagtttggaaaaggaggaaaggaaaagagagaagcgtgcggcaagctattagaaatgatttatgatggattaaagacagtgacgctccgagcacctgattgggaaactctcatggttcgtgttcttcctccctcttaaactcctgacactgtcgttttccttataccgatgtcgacgttgatctgtatacaatacacctctaggtcatccaagccgcccgacgactctacaaaacgcctggtcaaaacctgaccttgggtcgtattgtcgagcttaataaacgttttgttgaaggctatatgcattatgaacacgagccccgtgttcaggcgctccgaacacatattatccagtacaaccgacttcttcgagatttagggcttagagatcatcaagtcgagagagcgacgagagctggtttgagatctttggggctgttggcttatcgggtggggctattgggagcgtggagtgttttggcgctgccgggagtgatcctccatgcgcccatcttcttaacagcgaagtacatcagtcaccaaaaggcaaaaggtaactttgaaacccctccgattcgagctctagaaaatcatagtaattgactcttgcttaaccttctaccaaaaacgatgaactacgttctattagtggctctggctgaatcgaccgtcaaattagcgggccgagacgtcctcgctacgtggaaagtaattgtttcactcgtcctgactcctatcacttacgctttctgggccgctctagcgacgtatttggcttataggcgggatgcaccatcgcgatgggtttggtggatgcctgtttgggtcgtgcttggtctcccctttactggaatgagttcgttgaagttcggagaggccgccatggacgtcatgaagtcagtctgaatttgactttcctttgaatgttctttactgcgtgactgcaattaaccttcagaggatcaggactaatgtgaactgactcgctgtctcttttcctgatgttggaatggattaggtctctgcgtccactggtgatcaatttgattccaggaaacgatgttgtcatcagaaaaactcgagatatgagggttgctcttactgaagagcttactgaggttatcaacgtacgattttctcttacattcgtcaaagaccacaaatcagtgaatgtatgttaaccaaggtaaagactgcatttctcataaaatagcactttggtcctttaatgtacgaagacttcgatgaaggtcgaattcaacctgcagcgaccgttcagcccgtttcggctgatcgaagtcgatcaagtactgcgcaaaacatcttctctcacgtatgtatgtttgtctcatctagtcatcgtagagtggatctgaaagtgggctctatatcctctatattctcgaatcactacagcccatgagttggatcgacgagaaactttttggttggtctgccgcttcttccgctgaagaccgagctgcccgtcaacgaagacgatcgaagagtcaaggaagctcccgagcggaaagtagagtcgaaagtacgcaaggaagtgatgtggagaaagagactgtcgagcaagacgatggtgatgctgattacgaccaggtgagtagaccttactatcatcactttttgtggttcgtttatctctgataccttttccttacaaatctcaacgattttggaacacaattatgaacgagaaggtgattggaattctccatcatcatgcctcgtccttcaacaatactgccgcgccaaggtcttcatttaatgctgggctcgaatcatctgatcaacctagtcagatccgagctaggcgaaacggacagacttacgccgaattacaaagtgcaaagaaggcagctgcagctgctgttgctgctagcggcgtggaaacgaagtcgaaacaagaattgaaggaggatgcatagagagtgaaaatgaagggtaccagatgataatgctggggaagtgggagtaagacggtgtacatatctttccctggtctttgattggtgcttcttctctctctctcctttgaactccgcatctggtcgtctaaatcttaaatatctaatgtttattgttttaaaatgtgcgtttttttcatataatcaacctggtttggtagaaagaacgatcagataatcgaagccgcaaaaacaaactctcaaagctaggagaaagaatgaggaccattggttcacacaagagaggatcagtccttctcctcttcttcctcgccatcatcctcagctccacctctacgattccttcgtttccgagcttcacgatgccttctcttgtactctctcgtcagttcgagatgctcggtctcccatctttgttgggcttgctctctgaattgatgatggacgaacagccaaatcaacgtggatcaataaaccggctgcaatcaaaagtgtcaaatgaacaaaagaaagaaaagatagcagtgaaagaacgaactcggtatccaccctccagaacccgggaacaggtcttggtttcccactctctacttccaagacgctctttgcctgaacttttggtccttttgctctttctgtctgttcgagatgaaggaacgggaaaaagtaggggacctcggtgtctggtctaaaagacgcggttgaaggtgcatggcttgaggtttgattgttgacaaaagtcgccaatcgatgatggctagtggacaaggaaggggcaagaggagcgggtgttggtaatgaagcggtcagagtgggatcctcagcttccgcatcaatgtcaagatccaaacctagagagaaagatgtagctgtagaaagcaaaaaaaaaacaaaaaaaaacaaagagtatcagtcaatcgcaaaactcttatctagctgcctttctaagagtcttgaaatgaagaacaagagatatgatgaaaggaggagggacttactctcctcagcagaaggagcaaacaagcccttcaactgattcaccttgactttgacttttctctcttcttcatcttccatatcaacatcatcacctgctcctccccgcagtctcatcacaccttcgccttgtaccacttgttctcctggttcttctaaatcatcccagcctctgagctctctcatggccaactcaattgggtccaactcctcctcctccccctcttcttcttcctcctctctaatgtcatcctcagatgacgaagatccgacaaaagagacattcttctcgatcttgtcactttcttttcctctaggtaatgtaggaagtgggatcgtgtcctggttagagaccggattggcattatgtttgaactgtttgttaaccggaggaacaataatattgctttgctcctcttcagtatcgtcctcatcatcatcgtcatcatcccaaggaaggatgaccttcttcggcactaaaccggtatcttcctcaccatccgactcaaaggacagtgttcctcctccactcgtactctcttgacccttctgcttgatatctatgtcttcgtcttcgtcgttgaacgaaaacccgagagaggaaagaacgttgagtccttgtttcttctcctgagcgatctggtggtatagaggatctgccttgtcgatcatgagtggaagtccaacaggctgcttggggttggatccggaattagtatcaggagtagatttggaagccggcgcagaagtaggaggggaaaccacaacaggtttggaagtcgagatggttggatgagtaaggttggatggttttccatcggcatcgtcgacgatgtcctcatcgtcagatggttgactattgtcagacatcaaagattccatagtaggttcgggcgaaaacgaatctcgaaggagagatcccttctgttcgtgtatatccgcatcttctcctagtgggatccaatcatcttcttcttcgtcttcgtcatcatctccgccctgtccttcaccgttggaaagatcttcatagacttgagcgggtttgatagactgagacggtgtgatagaatcccacctagaaggctctcttccatccggtcctgattcatccaagatcatactcaacaccaacctcaaccgctcctgtctgcccactaccaccttctcctcgtgatcttgattctgatcatggcctatgttgatccacctgacaacaccgtcctcgccttcgatctcctcacatacccactgggaacgtttgtcgaaacattcatctagctcgggatcgcctagcatatgttcacctaagtgggttctattgtatcgtctaggatcaatgactacggttcgcgcgcgtttcggaggatcagctgactttctgccagaactcgattttcgtttgagcggcgtcgtgcttgacgtagggagttgatcagatggaaggtcggatgaaggtcgaggtagagtaggtcgagggatgggatgggatggtttaagaacgacaggatgaatcaagtgtccgaggggagtgatatgccaatgctgttttttaatcccgttttttatgcaatcacatcagctactctttctgccctacaatcaagagaatcaaggaaagaacaggcaagaaacgctgaaagaaagcgaaaaagatgatgattagagacgaactttcttaatctttgctttttcaacatcaaccacttccatatccttcctttctatcccctgaacgcctctcgatagttttattggcacaatccctcctttttcctttctcgcctttctccttttcctttccttctccttctttttctctctctctttatctgtcagtccatcggtcaagccttggatgacagcacgctcggtattcattctagagacatatgactgcttggcttcttgaattcgaagaaccatccccttccaggtcgagccggtgagaatggaagtaactctttgtagttgaccggatgttatacttaagttcatatagacgaaagatcgtggaaatcctgtatttccgtccgttcgttcgttcgttcgttgatgtattcagttttaaatgtattttttctggtgagcaagttgaatattaataaaaacaaccccctaatgaaagcatacgaaccattcccatcggtcccaacaccttccaacccatgtacgacaccaaatgaagagaatctattggtaagatcctgatgggtcaatgaggggtttgtcaggcctgcgatatgaagtctcctgacactcggtgtttccttctctgttgatgacatccttttctgcgttctgctcttttgctttctatctcgattttcttgctcctgaatcgttcagaaacggtgtgcgtcgtgtagttgcaagaaagaaggaagaggtagagcggaagggtggatgagagaaagagtaagggttgaaaggaatcgaaatttgaggtaactctcttaacacgtgaaacgcggccaaatttcttttctgcattacatggctagactattctcaaagattttcaggcaaatctgtttttttcctttgcattctttatgattcagatttacaaccacatcgtcatatgttgtttcatgcgaagcgtgtcccaagaggaaaagaaacggtgtgatgagtgagggtgggaacgatagatgtgaggagttcatcaaagagaaagagaaagcgtgacataagagcaaaaaagaacagtcgatcatagggggagtgtttttgtgaaaagaaaaccttctcaggaaaaaaaagacaacaaagagaccgagaaggaaagaataagggacagtgcttctaacgtaaacgagaggctttttacaaatggatctaaactaaggacaaagaaaaaagaaaaagacgagcagagaaggtcaaagtgtactccctcggagtttacttctcctgatcaggtcggagctgtcggacggtctttccggcgatccagatctcctggttgttgatgacgtcgagctccttctggagatcctctcggtaagtctttcggccgttgaactcgagcgatcgtcgggtctccgatccgtccttaacggcggcgtagaggtccttgaacacgggcttgttagcctcgtagaacttgggggcccagtcgagagctcctcgtcgggcggtggtggagcaggcctgagagaagcgtaggcagatgagatgagtctattgaagaggaagagaaggatgaaaactaaagacgctagagaaaagatagctcacgttgtacatgtagtccataccgtacttgccgatcaacgggaacaaggactgggtagcctcctcgacggtctcgttgaaagcctcagagggggtgtgtccgttctctcggaggacctcgtactgggcaaggaacattccctggatacctcccataaggacacctcgctctccgtaaagatcagagatgacctctcgctcgaaggtggtctcgtaaaggtaaccagatccgacggcaataccgatggcgacggccttctccttggccttaccggtgacgtctgtggattagagaatgaaacaagggcagcatagtcaggtcattgaaagcttaatagaaagagagggaggcacacgtaccctggaagacggcaacggaggagttgattcctcgaccctccttgaaaagggttcggacggttcggccagatcccttaggggcaacaaggatgacatcgacgtcggtggggggaacaacgtgggtctaaaggtgaaaggaagaaattagctgctattccgaaagatcatagattgagagctggagtacgcaaagagactcacatcatccttgtagacgacggagaaaccgtgggagaagtagagagtctttcccttggtaatgaggggagcaatctggggccaggtctgggactgggcagcgtcagaaaggaggttcatgatgacggttcctcggttgatagcctcctcaatggagaaaaggttctctccagggacccagccgtcctcctgagcctgcttccaactgtgttgtcgagcgggaaagcacaaagggcgaggcgagggaggttaggatttaagctcatttttattttattttaggatgaagattgatctagccacgtacgattctccgttctctcggacaccgacaatgacgttgataccgttatctcgggcgttcaatccctgcccgtgaccctgggatccgtaaccgatgagggcgagggtatcatccttgaggtacctatcaaattgagataatgcagaagaaagtggggaaaggtcagaattcaagctccccaaaggaaaaaaattcggccgcggtttgggaaagaaaaaaaaggcaagagaaaaaaaacgtactcctggagcttgggcaaaggccaatcggctcgctcgtaaacggtctccttagttccagcaaagtcaagggtcttgactcctcgctgatgtgtggtcgatagagatgacagataaagacgtccaggaatgggtaaggaaggggaagaaaacaggagaaaaaaaagtaagctccacgagaaactaggctgaaatctcctgctatttccttcggcttgacctcccaacctcctagcaacctctcctgctaccccacagtgaaactccgggcgtctagagacatcctcgaatgattctggaggtagcgattgcaagaaagaaagaaagaaagaaagaatagaaaggaggaatagaaaggaggaacgaacggtcatggtaggagcagcggcggcggcgtttcggatggcaggtctggtaccagcgagaacggtggagaatcctcggatggcaggagcaggcctgacggcggcggcaagagcctttcgggcgatagatctggggatggccattgtgatcaagatgattaagatactttgttaggaaagatgtgagtgcgtttgggagtgatggaagaaaagaggaagaaaggaaaaaaattggaaaatggcctaataagcctcgcgctacaggccgagtcacccatatttttttttctttcctccttcgggcgttaccttttgccttctgcttcggccgaaagagacgattaattcttccatcgtatgttgggataaagaatgtgcttgttggtcatagatatggctgtcgcaatagatataacacacacgtaggatacacaatgttctatctgcagagcgttgaggcaagacagagaatgaatgagtatacgatgaacgttttttatttatttaaattcacctttcccacccgaaatcgttagtcgtctgaacgccagtgcaaggagaacgagaaggtccatccgatataaagtaaagaactactagacacacacacacaccgaaacagagatggaacaaacaagaaaggaagaacggagaagggagagatgagagatggacattggtcgagagaacttctttcgttagaaaggaggaccgggaataaactgccaacacacacaggcacacacacatacagaaagctacacgagtgaagaagaaagggaagagaatcaaacaaacagaaaccctcgaatctctatccccgctcgacattgcccgtcttcaactctggcgaactggcgacctttgggtttccaacgctgctcactccatcggttgagagtgtagactgtgtcggcctaccggcaaacgacaacccagagggcgtgatcgtgttgctcgacgtcggctccgactcatcctcccgctcggacgccgagccaggtgagttgacgatttctgggtggctcagtcctttcccatgtccaccttcttttggctcattcgaaccggtcgatgacgaaacctgctctccctcctctttctcctcctcctcctcctcctcttcttcctcctcatcatcctcctcatccgccgctctgccacccagaactaggccgccggatggagagaacgagatgccgctgcctttgagaacctcctgaagactcattccacccaacacccggttgccggcctggccaaccatctgctgcagtgacgcagaagccgcgttcgggtttgtcccactcgacggcgtcgacgctcccgggtgtcgatcgaccggagcagtgttgaacacatgggggacagagagcggggtatcatgtccgaccttgttgttcacccggctagttatccattctctccactcggcttccgaccggtcacccagaatggccacaatgcagaccgtcatgttatcgcacccgatcccgccgatttctgaactcggggcaagacacttctccatcatatcctcacaaatcttgacgagtgaatctccattagcaatagcccgtcgggtaaagtcaacaacctgctgagaggtcaggcaatcccaaattcctataaatcgagggaagtaagcacgaagagatcgatcagcaaccacagaacgagctagctcacagagcaaacgcataatataaggagtggcctcagagacgaaccatcacaagcaaccacaaggaactcttcctcgccggtccaggcgtgggagatgatatctggatcgacggtaacaacctggtgttcggcgtccaatgaatggttctgcttgaattcaaaatcccccacggctcgagacaacgcaaggttcccattcactcggttgtagtcgacaaatcctccagcagcgacgattcgcgcggtctctttctcatttgtaggcttgtgatcatggcttagcggctcctcctttccaccaaccgagaggacagaccgtgagtctccggcgttcgcctaatgataggtaggatcgggccgcagaagaacaatgtcagaaaggtgtactttccgagttcttggggtaagcttgtgagaggaaaagaaagaaaatccacttacacagataaatctattatcgggtgtaatcaacacggcaacggccgtgcagcctgaagggtcgttcacaaactttggatctgatgattgagcatatggaagagatgaaaaatcggtttatcagcatgttgattgtttgcagcatgtggatgagtttccttgtccccacaacattctagacgagataaattgaagaagacgaaccggctcgaagggcgtcatctgtgcccaggaaagccttcttgaaggcgacctcgtaattcccctctgcatattcgggcaactcgctcagtcgagtgtgtaaagtggagccggtatattttgccacggtcgaaccaccgtgtccgtcatagacggcgaaaaaggcggggtgtttagcatctgtagaagacgacgacgaggggggcggaagggaaaggatggtggcgtgggcatcctccatggctgtttgaatagagccgtcgagtttagaaagagaaatagagcaaagagagaaaggatctagatgagcaacgatccattgggagagcaggcaggcagatgaaggccgaggaaggagaaagggaaggaagaattatgagcgaggtgaaaagggattttttttgttgttgtttattcatcgacggtttgaaacgtatcggctgagccgagtcgcccgagctagattcgtaggcgatactggatgctacctcaactccaagattgagggaaagcgatggattgttggctgacgcgacacgaacacaaccgatcaagtatataaactcccatgactggaatgaaaaggggccaaggcgatggttctctctctatcttccgcatcctggccagttgtataggtgtgaaaacaccgacgagggaagaaggagaggagggaagacgccaggaacgtacatatacgccagccttgcatctcactgatagcataagcaaatcggttggacgaccccttgtcggtatgtttttcgacgactgaaacaagagatacaaagaaggaagaagaaatacgaaggaaggggagccagtgaagtatagacacgataattggatgaagcagggttaaacaaattcaaccgaatcagtgaaccattaactatgactacgtggaggaagaagaggggagaaaagatagggggaaaaggaagaaaaaaaaaagaaaaaggaagaacaagaacgggacgaacctggctctgaaagagtttgaccctgtagtgaccgagaggagaaaatattcgaacataagcgagcgatacaggtgtatgattccaaaggcaagacgacaagaggaaagggtgaacgaagaggaaacacaagaggtcaggatcagatgcacgtgagcgagtgatactatcgatccatctttccttcaaacgcccgtcgattggtaacagagagtagataaagaaacgagacagttctcaccataatgtatgtatgcgtgtgtatgtgtacgtgtgagtgagtgtaggcgattctaaaaaagaaggaattctaaaagagagacgagatggagaagaaagggaaagagaaaaaagacgagatgaaagtttcgactgttcatggcacaggtggagaaggagacgatcattacaaaagctgtaatcgcgttattagacagagttgtagtctgtgcttttgggcatgatactacatatcctcatagttgtcctactacggaagattgtatatgtctctgaatttgctccatattagagaacatttgaagtatgcattacgaaaccgccgcctatttctataatcaaaaacataaatcgcaaattatccctagtatttatcacggaacttgtacgattgtctaatacaaatttcacccttcggctacgtcatcagttctaattcctttccagagtcactgctctctctcttatccttctctgttcatatctatcactcaatcatcgtacactcgttctactgcatttctctcttctatcatcgtccatgccctttcaaaagacattccagctcgctcgaaaggcaaagggagctcatttagtaacggatgaagtcgttcgagcactcggagatggtctcaaagacgttaaggttagtgttgctagtcttcgtccaaccctccctctggttcgtatagtcattcaccgtttcttcaccttttgtatcttcttctcctccttttttttcctcactctctgcagattggaatgttgttcttattcatgtaagataccccgtctcttgtttggctgatgaccggtccgtctctgtctgacttttctctcgtgtctcttcacttttattcagtaagcacacctcggcaggactcacccgtttgtctatatcttgcattcatctgtctatgttgcttgacaacatcgaactcattctttatgattgtttctcctagttaacgagaactatgacccagatgttcggtcggacatgacgatggcgctcgataagctcgtcccagaatctttaccttggcaacgttcgtctctggtgctcttctctcttcgccatacaatttcctcgattcaggaggagaaagactagacctgtttgagacctgacggagcattgacttatctaattcagatgttgacgagggaccggacgattcggttagtcatacaaagaccacgctcgtgggtaacacgatctccatccctgttagtttttttctttccttaccttaactcgctgtttgtgtcttccctgtctcgtgaggattctattgttgagacagaccacctgctttacagatctcgaacgggaaacttcaactaggaacatggcaaggaatttatctgatggaattcagacatctctcccatgtccgaactgtagtcgctactgtattgtgagcttcttcgttatcgcgcaagatctcttgctcctgtatcgctctttctttctttttccttatatcactcttcttgcggctttccgacgcgccatcgtctttcgtcatctctcacaggggtgaatagaacagtcttctcttcttcaaattaaagagcaagacaatagacatgatttcgtatctatcaatcgttaattccatctgaagtgcaagtcaagaggatgatgaggagaatgagagaaatcgttcaagaaaaaggaggagggacagagaaaccatgaaagattgcgctacttgaccggatggtattatattcggtggtcttgcctcctgcttccaactcgcgccgtttctccatccttctcgtcgtcatcgtcgtcatcgtcgtcgtcgtcgtcgtcgtcgtcgtcgtcgtctttgaaggttgactggacaggttgataccctctttgtctcttcaaaccttccatctccatcgcctcatcctcttcaatctgttcccctgggtgagtgtgtctcccgttcatgactcccctctcaacagattcagaatcagaatcgaagatcacttcggaattagatgaagagttgagtgaagaagatgatgaagcagaaagaaacggtccgccgaacgtatgggatagatagacgttgatgagcgaggtaatcactaaatagatcacgaatgatagtgagaagatcactaaatacatacacatgtatatgagagaaacatttaaagagttagttttcattgggagtcgtgagaaaatcaaagtaaagaacacttgagaaggagcaacgaacagagcatgtatgtaacagcgtcgacattttgagagtcaatcaacttgagttcttcgtccgttgcgcttaaaaagacacatctgtttgtttcgttttcgtatggttttggtgtcatgaaatttagttgggtgtctcgctggaagtctcagaagagacaagagaagaaaatggcgcaccctatgagaacaaggagatatggctgcattccatcgtgagaaaaatacggctgtcaatctccaatttcgatcggcaaagaaagagaaggacagagacaaacgtatagatgttgccagcccctgacaccccgtccgccaggtccttctccactcgctctgtctttcaacacgaaacagatctctacaatcctgacgacacctgccgctcccagggaaaggccgagcacctggtgtaccatcgtggctgtcatcgtccgttggacgtggcccgaaaaggcatagccagtcatgatgaaccttgatattcgattttgtatttacacaatattcagagtgagcttgaactataagttcagcagagacggatatagaggacagaattggacaaacaccatggccggtacaaaattccgttttcgaccgagcgacattaacacgcccaacgacccaccagcccaccaaagcactcccagtgccgtatgctggaggtctgatcgagagaaaagaagaaaaaagacgaaagacgaaagacatgacaaaattccatgtaagcaaagataacaagagaagacggaaacacaacaatcgaacaaagtttacctttatgagaccatccatccgagtgtctcatcgagaaagtctgaagagaataaacattgacccggtaagattgaatcagtcggggcataagtcgactgaccgcaaaaagaagagatggacatacattgatgattcccttcatggtcaaacccagcaagtaaagccttagaatgatcgtcagttcatcgcgcttctcagcttatagccggacgaaagagcagcagaacaaaagtagggcggaacgtacgaaagtcgtgatcatcaatgagtcctatggcaacacaaatcttagaaaaaaattaactaacttgacacagacaagggaaacatgagatatgataaagatgaacgtacgtagagctcttggctgtgacccactcgtttcatccaacttgttccacaagacatcgcgatctatgcgagtcaacgcacacagaaaccctcttcagtcaacaattcatcttgatcctctccaacgagcaacctttctgttcaaaaagcaaaagcgagaaagaagccgccaggctagcctaagagtgaaatgaatgggaaaaacttaccgctaaaagggtgccatataaaataaagctgaccccgaacgtctgttacatatgtgcgttccattcaccccgtgatatagaaagaagcagaaaatatatcatcaaggcgcgagtttctaagatgagggcttgagtcaaaaacatacatgatgcgcataacattgtaacttctcctctcctctgcagaaccccatgtaagtttgtattccaagaagaatttgtgtccagccgatcaaagggtaaagccttccgacgacagcatggatccaatgtggaatattccgaaagcgagcaatatgaagcttgagatatactccggacgacgtttgctgtggtttcctcaggtagaaggatgtatagagacagtgtgagaatggagctcaagaagaatgggctggaagaaactgagagatagacggaccagaagtagaagcaggatgatgatatttgctaagactccgtcttgtgaatcctcaaagaaaccattgcgaacgcgtcagtctcatcagcttattcttctttttgatgttgattcaattccagatacagcaaagaagaaaagattgcgtacggaactgtgttgggtcaacgaaccaagagaaaataatcagctcttcactccgaacaaggaattcgataacgctcgagtggcaaggatgattcaggcccgtcctgcccttctaaaggagaaagtaaagagagacacactgaagccggatattgtctccctccatgatgatgacctgctctctcaaagaatgacagaaatagattccacacacgagtatacctttgaattagtcgaccgtttcctcaaaacagatagaaaagcgttcttcacgtttggagaagtctttttgttagaacgaacagaagactgatcaggatgggactcgcctagaatgtagccagcgctcgtcaagaccatcgatgttgtctgcgaagtgaccccggaacgacccaaaagaaaggatgatcagtcatttcggtctaagactcaaagagaaagataaatcggcctttcagtagaaacaaggagatttagacaaacctgaactggaatatgaaaccttgactttctagaaacgacccaatcaagccgcacgttatatacacacaaatgtcagtcatagcatcaatttactttggataatacacgccccgctcatcccaaccaaacggaagaggaaagaaaatgactagaagtcacgagagaaaggaacagaaacctacttgatcccgagcaccattcccagaggaaataatactccccaaacactcgcctggaggaccgcatgtagttttatcccggtcgagtgcggctcagaaagatcgaccgccgatgctgccggatgagagtgtcgttgggagagatgatcgttcagcaaaagatccatcgttcgtctctttcgttcgtcctattgttgtctcgtttggctgagttttgtgagatgagacaaatggaatgaagagaaacgatttagaggatgaagtgaatcaatgaacgaacgagcgagcgaacgagcaagcattctctaattcccggcgcgtcatctgtttgaaatgcgcatttgatttcctcggtcaaaagagcaacaacctggggaagcacaaagaaagattttttctcctctccgttcctaggaccagtatgaacaatccattcaccaaacgcacagaagaactaaatagattttacaataagcaaaatgataagatagagaagaagaaaggcatgtgcatcgtagacgagtaggaatgtggaaagtgaataagagatcttgcaagatctgtgtagttgtatgatgtttcaagatagagtaaaaagattgaacgaaagaatagatgatgggatcagaaaagaagagacagcgagaaagaaatcgaaaaagtgttgcttgaagggtgtaagcgaaaaaagacgtgagtcaagaaactcgacccgggcggacgaaagatgaagaaaaacaacaagtggcatagcgagccctatgatttttaaatgaaataacaaagaaactgataaaagaatat

SEQ ID NO: 1435 - DNA, 21591 bp, Xanthophyllomyces dendrorhous
tgataaaagaatattatgtcgaataagattaagaagcaggaaaagggaagagtcaagatacagataaaggatgttatggaaatacaaaaaggagaaaggaacaagaaggaaagaagaaggaaaagtggaaaagagcgagatgagaatggacaggatacactctgattcactcatcagtctcaccgccctcgaaatctaatccctctcccaagattttctcttcgttctttctcttgcccggcccccgacgtctgataacggaatcatacgtacaactcagaccgcgtttgacgcagtgggcgcatgttggccgagttgcatcgcatctaaaaacgtaaacaatgtcagggaacacccggggaaggcaaatcaaaccgaagcgagatgacaacacaggacaaaggaagatgatgcccacctaagtttgcgacctcgacagaaatgacaagccaagctgactttctttgttccctgtgctagtgatctgtccggccgaccatcaacctgctcgctagcctcaggttccttcagatcattcccactttctgcgacagacgtcgccgacgacctactaatcgtcttttttttggaacactttcgatcgatcgaagttgaacctcctttagttgagtggttcgtctcctttctctttgcagtcagccccttttcggagccactcccaatctcatgaagttcgacttttgtcgccctaaccacggcccacgttggatccttttcgttgtacgtcatagagctgctaccgctactgctcgtcgctgtccagttgaaggcttgatgagagtcttctccagtttgctcgaacgaactggatcgggatagttcgttagggagatcggtaggtaacgaagcgttcatcatagataggtttgtcaacccgacacttgtcgtgggtgggtaagatcccacctggaatgatcgaggttcgatcgtcgccgctgctaacgctgccgtcgtcatcagtggtaagccatgggtttctgacgaacggcgatgatccgatgcaaacggggaaccaaccgcagtcaaagaagacgccgaggccgaagaggatgatgactctggtgcttctggagtgaaacacttctgctgggcttgtagccgctgttgtccgagtagtaataacctgctttgctcttgtgtgatttgaagaccgatcggatgggacgcgtaatcgttgctcgacctgaacggcgcagtgttggcggagtacggagaggatgaggacgacgaagagggaccaagaaacgactgagccgggatggatgaagacgaagatgaagacgaagacgaatgggtaaccccgaggggtgtttgttggtgagcaggagatccagatggcagaggtgcgtacatcagagacggattgttcatccaatatcccgattgggctgattggatggatttgaggtgattattgctgtcagtattgagatcagaggagggcactaatgaactttctgtcgtccaagagcccgagatgtcctgaacaggcaagcagcctttatatcgataaaattgatattgggaaagacaaaaagtagtacgttgattaactaaacgttcgtgcggtcaaggtgataaatatagagaacctatggacttaccttcctggactgtcgacaaggttgagcttgttttcggcgtcaaacctaatgatgatggcaaggatgaagtggacggggaggacgaaagagtcgacgaaaatcccgacgcaggcggattgtgaccgtaaggaaaccgagacacatccgatccagaagtctcagatgggccggtagggaagtgatgagaaaacaaggcagaactagcctggtgtggccagagtttgacgtccgtgatagatagtcttctctgatgattttgctgttgctgctgctgctgctgctgctgctgcggataatgatggaaagaagctctgcgttctgagtggacggcaggcgtggaggatgatggcgaaaacaccgatggggcgatactcaggtccaccgaggggcctgttgtcacatagtccttcggcgcccctgtagacggcacagcgcttgacgaagaggcgatattaaagcgacgttcggatgcttgtttttcgttaaacatttgctggtatcggttgaatgtcgtttcctcaaaagggcctgtagcgacgaacggcgcgctcatagcttgttggtcgtgcgcagaagagttaagctgattgttgaccgaggatgtagaggaagatgaggtcgaagagattggtgtggggatgagatttgagttgacaaaggaactagtgttgtgagactgtctcctaaacgggaatcggtaggctgaagacgacgatgacgatgacgatgatgatggggtgaacacatggaatagatggacgggtcgggaaggtccgacagccgggttttcatatctgttttcagtaaactcctctccccaaatagatatcccatcaagagcttcgccttgatcgaccaagaacgtgctgtctaccgaaggttgttgagccaacagagccgactcgatcgatccagactgatccgcccaagccgttgaggcgatcagaggtgaccaatccttcgatcgaatatatgtcgggccagagttgggctgttgccggccggtatagtctgttcgccctgacgaaggaattgctttgttttctgattggttatcctgatataaagggtagtaatggtgagcatgatacgtatgtggttgatcgtgtgatttccagcctaatgacatgtcgttgatattgttgctgttactgctgctgctgctgctgctgctgctgctgctgctagtagtattggggttgggatcatggttgtacaacggaacgccgtgtgtcggaggaaacccgttcatagagcaaggagcagagggctgtttgaaagggtgagctggatgtggagaacactgaaaggcagttgctctcggagggaggtaagaatttgcgtgaaaagattgtggaaaggctgagagttcaaattgagagacctccgaagagccgcaaaaactggagtgaagtgcggttgaacaggtttgcatagacagaacgaagccgtctaccattctttccgagggaaatagatagtagaacagaggcaaggaaattagaataacgagaagcacgagtgttgtgagtaagagatctctgtgtatgtatatatatatgtatatggggaatagaaaagaaggaagaaaggacaggtgccaaagatctgagaagaacgaccgatgggttaagtaaaagaagggagggaccaagaactcacggagaaaacaccgctacgatgattgatgtttacgtcaaccgcagatcttcgagatcgaaaagagtcagctatgtcgaacaacgtgccgcagtgatatcgagtctggagaagaaagaaggacagagaagacccgaggaaaggaggggaggtatcgttgcaaaagagggtatagactttagccggtagaaacaacgtcggtggttaagaataaatgcatagttaaagaccgaaattgattgtacgtacaagaagaaagaaaagagagggcgtaacgtcgaagagcgtgtggtttaaaagagaaagggatgcaggactgattgatcgaatggggcgtttcgaagaagacttctcaatggatgagaacgtgcttccttcgataagggatatcaaaaatcagcgagatgggaacaggactcttttgagggatgcatccaggaataggttatgtgttctgtttagttaaagtttctcttaaggagagatgaccctcgacgaggggcttctattatttcggccaaagagcttgaaccactagactgaacggccaatgaacagggacaggttcagaaagaggtaagaacaagagccaaaggatgtaacccagcggcgaggaggacaaggatacaagaaaatgatgaatggggtgaagataacgaaaaagagggaaagaaagaaagatgggatcgatcagtcgagagctcctcccaccacgtgtttttgtatctgaccacaaaaaaaagacggacaagaaaagcgaaaaagaaatgtttgaaagctctgaaaggaaaggttttgcccttttcgtttgccattctcccttccctcgccattgtcttgcgcctgtcgccttcatgttgatccattgcccagcccaagttggatcctgcccgttgcatgtgtcctctccgtcggcgggctcctgccgtcctgccaatttgtgaagaaatatttgatcgacagacttagtcgaaaacaccgaaccgtgtttatcctatttttgctttctcctctgcccttgcttgtctgggtcttggagaaagcagaaggaaaagaaaaaaagacattatattgatgcttattcctccatcctcttacccagtaggagaagccttgtgttcccaaacaaaacatacacagacccaagcacgttcataccccctcagttagacgccacaagagaccaacaaaacccgaagaagagaaagagaaaagaaagaagaaacaaaaatggggagctccaacaaggaaggacttcgtatggagtgaaagaagtcgatagagaaatatatctaaagaggaagggagacagagaataacgagaacatacctgattattattaattttcgtccagattcgatcggttgatgccgcaggattttgaagagaccgactgcggaaaattcagaagaagagatttacagacttgcccgtacccgcccgcttaactccgtacccgcccggtccgctaaatgcgctaaatgcgcctaaagccaagggaagatcctttagtgtaacttcgagaagaataatttgaataggtaactgaccccgctgggctcaggagaaagaagagaaggaacaactcataagacagctgagggtaggacggcaagcccggttacgacctgctatgaccgtgatcgcccacgtcggctatttactgattgggcccggagttatttatcatctgttcttctcccctctcctcgttttctgctcttccagtcacacaatcagcatcgacttccttccttactgccgccagcagtcagacattctgaatgagaacaaagaagacgaaaagagaataaagaagaagaatagaaagaaaaagaaggaaataaagaaacaaagtaaacaacaaatcgagaaggagccgaacgcttaaattgaagtacaggaaagaccaaacgtggaaagaaataaggggggaaatcattttcagccgatcagaagacgactcccactgtgggaaagagagagaagtaagggtgatcgatcgatcgatcgatcgaaggatgtaaacatccgaaagtactaaagaacaggtcgcgacgaccttaacatattcaaacaaataaatcaatcaacaaacaaacccactcgcttcgcctacatcctccctcgcgttatgtgccatcatggtcagcttccatttaccttccttctcatttttctgatgatgctttcttctttataacgatcatcatcagcatcatcatcgccgtcgtcatcatcgtcgtttcacactcttttcgttttgttacgttacgttacgttactctctcctctcatctttctgcctgaatcgagatctgcaggtttgtttgatcttccttgtacatatacaacaatccacgtgggtcaggaaatgaacgcaaaagggttaagaaccaacccatcttttacgttcaatttagataaacaaatagaaacaaattcaaccgacaattacacgaatacacatgcatatgcatagaagacgaacagatatgcgtgattcaaacgaagaaggaaggcacgtggagtttgtttggatctgagtttgctggaatgccactccactcttctttctctgggttttacgctagggagagacgaaagagagatacagatccacaagaggcaggaattgaggagtatagaagggaagaaaggaggacagagcgcaaaaaaaaaatctcgcctccctagaaggaattaaaatagagataagatcgctgtggacacgattgaggatatgtgtgatgccagaacaggcggatgatcctttctttccctacctgaacgtcctatagttctatctcttcatgttgtctctttgcttacttgtttctggtttgttcattttttttaaaaaatctccgtagatttatcgagaccaacaaatctcggaatgcaatttgttgaactcggctcatccttctcttcttttcgttcttcctttttgcttccgactctcacacttggatagatttcattttatggaaaaaaatcatccctagtcttcgtatatataccaaaaaaaatcctactctttttgaacccacaagatgataatgttgtttttttgatcgaaaacttgcaagcaatgcggcgcaaacaatcctacaaaagctcatcaaatgaggtttgttcagtccgcgctactgtcagccctaagctccccacaattagaccctttcgatttcctgtgggaggatcaatcccccctgccgcttgatttcgtccagaatagtcatcacccggatggacgtttggtggttgttccgaggtgattccaccgagcccgcgaagatctgtcgaccaacttcgtcctgttcgaaacacttcagaagagaaattaaacgaagaaacaaagaataatgagcgtcgaagcgcacgtatgcgtgtctcctttgttcatcctgatggacctacgaaaccgaaagcgttgtccgtgttggggtcagaacactcgaccgtttcctctctttcatcgttgtatttgattttgtatcctgtaggtcttgagttcgtttatttttccatccgttacaaagcagaaagagcacgcatatttgaaatcgatacgttccggaataaacaacagcggttccgactccgacagttatgaaaatgagaagaaagaaactaaactcacgctaccatcacaccagacactgtcaaagttccttccgaaccttgaactactacttggttgactgttccagcggccatacttccactaattacagcctgtgcgctaggtagctcatcaaatgataatactgccgtggtgtgtaagtcgactgaacgactgatcgtcatctggccgacgatctttgggatcgacgatatctcggcaggatgaggaaataaactgcggaaggtcaataatgataggtcaatgaatcacctgcagaattgagtttactttggatggtggagaaatagagaaacgattgatcaaaaatgacaaacgttaaaagcgcccaatgaagcgtatatggcatgaggtccaggcttagatgacatgttcacatgtttgtgtgtgagtgttaatgtgtctattatcatttacctttggacgatactgatagatatcaagagcaaatgtaacgcttacagagctcctccaccgagagaaggtgcgatcaatcgatgaccatcgtccatatctgtggaaatacccggaataatacactatcattagatcaggtctctagatcaaccaagagaggaatcagggcaaggaagacactctacaaaccaaaggtcttgaaatcttgtgcaaggtctgcaaacacccgacgcacagtcccaatctttcctccggcaatcacctgcaggaaaaaaaaaggtagaagaaattgggaaacgagaaaagacgttgagaagcccacgcgtcagcattgaacattttgccaacattctgtgtcgcgatgtctccaatcaaccttcgatcggacgaacttcctggatagctatcgtagcaggaaaaaatcttgaccacatggcttccatgaggaacaaccttttctcctcagaaattcgaacgagctcttctgcctgcttggcattgatagtgaaacctttctcgcacagaacgtgtttgctgcgttggagatatgtagtttgtgtcaacatgatatcgacaagagaataagcagatatgaagaacccgcaccctgctagaagggctgctttagaagctggataatgattcgagttgggagtcccaacgtacactacatcaacgttctgttgaagagagattcgatcgttagtgatcttcaactctttctatctatttgattcttaacaaaaacaaaaaacaaaaaaaaaccaaggggtacgaacagggtcgttgaatagatcaacggcagatccgtatcctttagcaatgtcaagtccgagttctctgataaacgcgtccgctctgtcctttgaacgcgatcctacagcgaccacagcgtgcttatcgaggccagaggaatgttcatacatgtacgattagtttagtctgcgctcatatacatatgtttaccataagtttctactgaccttaaagtcttgtcctcgggtggatgcatcgatcaagagatccttagtaaagttggtgctgatacctaaagagaacatgaaagaacattggtcttgactgatcaatagaaagaaatctatcactgagaacgaacgaaagaaacgaaccaccggtcgcgagaataccccatcttagtacctttgtttgaggttgttcggtcataatcagagcctgaagatctgcagaaaaatgaggaaaagttaggtaagatggaagttcggagagaagaggatatgatctctcagttgacgtcaccaatccgcacgggaagggaggtcaggatcccggttagggttatttgagctcgaggggatcttgtgtcctgctctacatgcattacaggatgagtccactcgattcaacctgctctctatcttgtgcagttgttaagttattcattttgttcttgttctgacttcagacaatgatcaggagatctcgatcaggctctctttatccctgtcgcctaggtgttttcacggcggggcgaattatatattctcgaaacgattgcacatctatttgacaatgcttccatgtccggatcaaccgatgagttccccaagatggaaacacaattcataactcaagtgttcgagatacgatcggattgatggatgctgaatgaacgattgttcaagaaaagaggacgaatgcaaaatataatgaccaagcactcccggagcggttcaccttattcaaaccttctacacaccggtatccatcgaaccacagctcatgaccgcatcttgtctgaaaaggtccactaagctaacaggaagtgatgctccgctccgcaagccaatctggtctgctgactgtgatcctagtaagaggatagatagagaaagaaaagaaaaacaagaggccactttgcaaaaagaatacacgtttcaacatctcacggacaaatcagtatatctcaaccagccagcaccatgaaatataaggccacttgcgacccaagtgcgcgctttgtgaacgtgagcgtccctctgcagcaagagccggctggagagcgaaagccaacgaagaaaagtcagatggaaaagtcaggcaagtcgataattatcgcgggtgactaaccaaatatcgttcgtgggccgccgaatacgcagcgagtgcttgcccgtggtgtcttgggaagaaaaaccttttccctctcggtcgtcttactctacgtctccttagaaaatggtgagaataacggaccttacagagctctccttcgccggctgcacacctagacgacattccagtatctctcttcccagaagttaccgacaaaccgacagaccgatacgactcgatgttcattgacaaaggatgggggcgagaatgcgtggtggtaatcaggtggcggtggcgagttttcgattcaaagaaaaaaccttgagcgtttcaatagaaatcgagtggttgggcgtttcgaggtatcgacacagtgtcagggagatgagattagtttggtacccaagtcaactctagcatcaatccggtccattcatcagaactcagaatccctatccttctccccaaaaatcgtgcagccggccgggatctcgatctatgtttcccccttcatatgggggagaaaaaagtactcatgcaaaactcttttccttttcttgggcgtgatgattatctttctagactctcgctgttgatctcctcaacccttccatcgagtctgaggcccgacaacacaagctcaagaggcttgtgcagagccccaactctttcttcatggtcagtgtcgcaattttttttaccttacaatcgttcgcgtgaccataggtcgaatggcgtaaatctgaatcgagttattggttatcttttctcttaatatccttgggccatccaacaacaggacgtcaagtgccctggttgcttccagatcaccaccgtgttctcgcacgcttccactgccgttcaggttcgttctcttttttcgatcttgtaaacagagaccataacttgtcagctgacctgttgatccaacaaccgccacgatcagtgtggatcgtgccagaccatcctctgccagccccggggaggaaaggctcgacttaccgagggtatgtcccatgatttcttcatcataaaaacagtataactcacgatgtattttttttgcctttcctcattgtcgaccactcataggatgctctttccgacgaaagaactaagtttctgttatcggatgatgcattcaaataaaagtcatgttctattctcgaaatctgcttcgctcggatcgatctcttttcgcttgctacaacaccccttgagattcactcccatgatcttctcgtaccttttggcttgatccaggggtgctagtcttcaggatggtgaacaggatgtgaaagactgatgttggcttattgacgatctacgactatttgctgtttccttccctctgcttgccaacaacaaagagacatgcgttctcaaagtcacagttcggctagggattgactaatcaaataggcttcgagattttggatcaactcatagtacatcggctcttcgtttcttagttctaatgcgtgtgcctcactgaccccgactgcttacaaaagcgtccttgaaataagatgactatcgtaaccatgagtgtacatcacagctttcatttctctttcatttctagcgcaagatccttcatatctcggggacatcttgtccgaaacgactcgcatcgttttggtttcctatctagtcttcttgaccggaggttgtcttgcctctttctctggtttatctgacatagtagcgaaatcctgcaaatctctagatgatgcagtcttggtaggatctcccaaaaacaaactactttcgcacaagcgatggaaacctgaagagtatgtccattttgtatgaagaaaacgtcctagacatacgatctgcatacacaaaaacggtgaacgaaggcgagaagatatggcagtagatgttcatccatttattctagatgacgacacaaggaacaggaacaggaaaggaagatcactccaaagcgagagccactagtttgagaatctcctcggttgatcttccttggttcgatagatccttggcaatagattgccatactggtgagtgtttcggactcgcagcggtgcagagatcgatgacgtgttgtcgacgttcctgttcaacgtgagagaatagagaagaacattgtcagtacagtggcaagtgataaagaggatgaaacccgagagagatgaatcacaggcagagaaagatgaatcacaagcagaggcagagaacaagagatcgaatacataccatctctccgtgttccatctcgaatttgtaccaccaaccccaagaatcacccagatccttgttcgcctcgaccgctcggccaaaccaatgtctcgccctctcgatcttcctatcagtccagaacaaacgagcgacaagagtgatgatgactgggtcatcgtttgtctttttgagggcgtcggccgctcgggtctttcgttgctgtcgaggttcattccagatattgattgcccataatcgaccagatgtcggacattcttgaatacctatgcaaatcaaatggttgtcgttgttgaatgatcagcaaatcttcttcatggaagaaaccaaaagagaaggtagagtttgaaatgtaaaagaaaataatgaagagaagacgaacctcttgaaagaacgacttttgattgagctatacttcccgctcgttcctccactcttacactctcctcccataattctggattctttgggttcagcagccttgccttttccaacaaactacgagctttaatgaccacgcctgcatgttcttctaaacgcgaagaaagcaaccaaagtggaatcgagtttgggcaagccttgacacctttcgagtatgtttctcgggctagaggtaattgttgagtagccgtgtagatctgacctttgatcatgtaaagcttgtcgaacgtggggaacttctcaataccttgtccaagagtggaaagcgcttcgtcgagcgcgccttgttgacgctcgagcaccgcggacttcatccaaatctatcagggccgaaaagagcaaaattaaaggaaagatgtccacacaagacaagcggcgaatcagttgactgcttgataaagaagagaagaaagaaggagagaaacacatccaagagttcctaccttgtccgtaccagcctcctgtcgagcgtttgccaacaactcttttgccctgttcaacgctccattctcggcttccaactttgcggccgctagccagatctgttcagattcggggttcgcctggaaagcgttggcgaggatgtttctggcgccgggtacatctccgtgcaaccatttctccttagcggccatcagccagagtacttctgctcgtggacaatgctgaaccgatttggccagaagcgcttgtaggtcgtcactaaagcgggagatttgtataagaagaacgaaggacatcagcgtcctcctgacaagtaaaagagaagagtgatggtcgaggtataagtcatcagaacacgcactaggtaccatgagccttttcaaactgagcggccgtccaccagacctgcctcctatcgggaaagacgttgatgaggtatgctctgaccgctctgctggtttcgatgtgacccctagcggccgaagaatcggcgtcatccatccaaatcttcatacgttggtcttcctcgacatcgatgtgtaatgtcgctttaacgatcgctctggcggtgatgggcgaaccttcggattcacatctttcggcctccctcagccaggcttctctatccatcatgacctgttggtctgccaactttgccacaccggaagccatgataccttctaccttagaaacgtcacccgtctgttctgtcaatctggcagcggcgatccaaatctcatgagacgttggaatcgtctttcgggctttgttgagaaccttctgagcggcctgaggagtctcgagtcgcgcaagcgtaagccaaagatcgacagaggtcggaacaaattcgaccgctcgagcaaggaggatccgagcatcggcagggtcggtctcaaggttgacagtctctttccataaagtaaccgagttcggaatagtctccacagctgttcaataaagtcgaaagaagggaatgaagtgttctcttgaagtatcagaaagcgttgcttatgctcatgagtacagacgagagggaagtctaaacgaagatgagcgaaccttttcttaagacgttcttacgtctgttgacatcagtctccaaaacggctgctttcagccaaattttcaccgactgggggagctctcgaacggcattggctaagatccgcttcgcattttcaggaatctgatctccaataaatacacaggaagggagaaaaatgaaggcaaagtggtaagatcgagacatacgcgctgcaaaggctcggcttgtgaagatcccgagacaaaaggagtccacgtacattaagctctgccgcctgtaaccacacgtcttcgctctttggacacatctcacaacctttagcaataattttcctggctgccaccatctttttggcatgaacctctaacgcggcagctgcgatccaccctggagcgtgcttggggttagtcttgataactgaatcaagtagggcccgggctctcttgatgtctctgtacgatgaatgtatagatgaaacgagacacataacgcgtgatacagaccagataacgaaaagttttcgaaaagataatcagtctcgctggtgtgtcaatgatggagaaaggaatcatgaacctgaaaggacgaaccctatctgagcatcggactggacgaccatgctgttaagatccgtaaggtagcctttagaatcgaccgtagtggatgatccatttgacgtgtctgccgacatctgagatgcacacgcacaatcggatggttgatttttagtttctcctgcggacattgatcaaatcatgagaggcccgacaaagcagagaatctattgctgacctgatcgagtttgagagacaataccttgtctcgagcgttaccgatctctaccaaatttgtcatcgccccgctctctgatgctccggcctgtaaaacgtttggttaacggcaaaataagagtagagggaaaggcgcatcaattgggtagcgattgacaaaaagattggaggaaagaagggtagaaactaaccatctgctcttcgcttaattggccttctgtcgcgttcgatgccatgtttgtcagtgtcacactgtccggtacggcgtactccctatcgaatctcgggtttcgcttttgttttttacccgtcatattggcaacttctggtaggttttcccattcggagtccgtgacagcggtgagtcctcgttttaaatcagcgaacctgttttaaagtatgagtgtgagtgtgaagaagtatgtttgaggcgtgtaacagaagaaaagagaaagaagaatcacaagagccactaagatttattataataaaaaaggagaagagaaacctttcaaacagagaatagacggactgactgggtttgaatctttggttgggccaaccgatgagccttcagttgttcctcctccgccgcctctctcctcgcctttctcctctggtcgatcctctcgtccacactttcccagattcgatctgcttcttcatcatcctgttcatacacggtaccagcaaagatgtttgtctcctcatctggatctttgaattggtccggatcggcggtgatctcttcacctcggcctgaggcagccgcgtcctctgaaggaccctgatctcgagcaggaccgatatcggatcgagtggtgaagccggaagctctatgaagaggaaagagaaacaaagaagcgattgagagggcgaaatatgaatagaacagaacagaacagaaaattaacagctcaagcatgggtccgaaagagatagaggccagaaagagaaaggaacgaaccctcgaccgagacctccgacgtaggaaggcggagctgtcatcgtcaaaaaggctagcttgttgacatttccacccctggaggtcgagttgatgacctggaatgagttggactgcatcctgtagagtgtgtcttccctgaagggactgaagaggtggagagagagtgaaggttaatggacaggttgatcaattgtgcttgccaggccttacaatctttacgaaggactttctatgatatcgtactagaagcattcatagtatatatagataacaaccctaacacacgctctttgttagggaaacaagctaggctggtcgcggagaaggttacgagctgtgtaaccgcagtggttttcgaaatgagcggtggggagttcaggctctgagactggaattgatgaggacaggggtgcaaatagacaagatcgttatatcaaaaggatgagacacaaggacggggcacgagagtaagacagaatagaatatcaatagaacatccgcgacatgaggttttcgacgggagagaacaggggaacgtggattaacaaaggatccaggcttgggagcctatgttatgaatgacaaaggaagccggtctcatatgtgaccctcaaactcaaacaactaagcacaaaaataaacaagcatagaacgtgctagaagaacctgcgctagaagactatatacttatatgtcagtgaattggaagaacagaataaatggagaaggagtagatgaagcgaagcaacctaaacagtcgtggattacagacatgtaacactcaggccacattcctgacgctttaacgcggatgattcagactccattcgagcagacaacagatctcttgccagcataattctctgatctcatcctttgataccttctccatcaagttgacccgtccttccaaagactgaataacattgaccctcttttttgcttcggttcgagccgtccggacatctccccttgaattagggtaggctttgacgagcacaggatgattgatccgatcgaaccaccatttggcgttccaatattctgaatgaccctccgtccgatgaactagcgcgtgatagtaatcaaatgtgccatacagctctccctcgtgagcttgagcgattagatgggcggaagagtagtcagagttgagtagatgaagcgcagggagcgcagagaggggtagggtggtgcctaagataagaccaaaagagagtaataaaagtgaaagtgaaagaaggaaatacgtcaacggtattctttcaaattcaattttctaaggaatatttgttcacagggacaactaggaaagaggcacgcgcacaggcatctatcctagaggttaacgatttgtcgaaagggttcttgggattgaggggcccgggtgcccgatcgagtaacaaatggaattcggttgggatcttggacgagagcgattgaagaattgctcttgaggaaatttctataggctccatctgagtgagcagagaaagagagtggcaacctctactatgtgcaacagaaaaccaaacaggatggcaagaaggataatgaaggtgatgatgatgacgatcatgtgaagagctgcttagtcattcaaaaccctaacaagtgccttcgtcggtccgcacaccttcctaggcaaacctggacagaaacaggacaatgcaggttgaacttgaggcgcacagacagtgggctctctctttctgagtctcattagagtatacatggatatatgtagtttctgtctttacttttgatcgtctaattactattcccaagttctcttggcacgatctcgcttggcctagaggaacgaggagtagagtataggagaatagagtgaagggagtagagtgatcagttaaccatagtaaagaaagagacaagataaacaagtcgttagcctacctttctatcctcgaacgcttgatccttgattttcagcttttccgcaaactgctctgctttctccatctgctgaattgaccgcttcttctgcttagagctcgcttttgccttgacggttccctgtccacctaccgtctttggagactgattttttttcagtcggacctcatcagcaggtgagacagagtgcttccctttattcactggtggtggaggaatatgagggttcgatgaggttgacggcaagtgagcgaccgatcggtgagcaagttcttgaagagtgctgtcaactcggtgtttcggtgtagggactgttaataggagagcaagtgagtatttgaacagggtgatggtcaggatgttgtttataatatggctagacacatgtgtatatatcagataaagggaaacctaaaccaaccggacatcaagaagcaagaaggcgagagaaaggaaaggagagagaaggtataggacgaaggcgaggcgggagaaatgaacgttgctagtcggggcgaacgtttgttcgatttacactataaagcatcctattcgacttgacagatgtatcataaaagtttcatattcaatataatcgatctttaccaggatactttatactacaacaattttgtgtcccacaagattagttcattagagaattttgtatcatcgtctatctatcgccatacgaaggctgtgcatatgattcgactgtggaccttttataaacactaatagagcgaatcattgtcaagactagaaagtcggataatacaaccttttgcacatatcactacaactcttgtagtcagatttcctaataggatacagccagcgcatacatccgtgtgcttctcccgtcagagtcatatgtttcgattcctcctccttcttctttcctcttgaccacgactttatccaaagccagaacctctttcaggtttcccaacctccccccccctttgttcccttcttcttttgaagactttgccttctgcgtccatagaagcaagccttagaagtagtcgaaactttctccccctccttcaggttcccccagcagttctttcagcaggccttcagtggttgttgcacttttctcagtaaaagaaaaggaaaaaaaaaacatcgagcttgccaccctttcgatcccgtcgtcctctttcaaaagaccccatccgttccctctcctttcgtccccctcctgcttctcctccagacgaatcagtgctcgtcttctcttgatccgaatcaggtctcttttgcctttttttctcaagaaatccgggtttcttcggatcgtcaagaggtgcgcatatagtcatcctcccccttttttccatttattcgtctttcccttccttctggccacccaatcgccacgcttcactctatcttccctctgatctccgttctcaatcactgataacgtctattttactcataccatacagtctttagtgtcgtagtcgagcgttttttccctcctccctgaaagaaaacaatcctccctcaagtctctacaaacccgtccaccttctctgccacccgaaacaaactcttctaaacctctcctctccttgggtccccttcgaatttcctcttgctttctctcaccgaaagcgaatcgaagagaactctgtccgtctttccctttctctttcccagaaaggaattcggatcctccaactcttttctcgaccagtatatgaacgccccttctactacctacggctactcgtcccagaagatggctccctcgatgtcgtccccgtaccgagcgcccttccagatcttccatcagcaggaccagcagctttccgcttccaccctcccagccgcctactcccacccctccttcaatccctaccaccaggtctgtcagcagcaggagcagcacgccttccgtcctgccccacccgctgcccatacgttgcctcacccaagcttctccttccaagctcaggtccagaagcagcagcaggcccaacaggagcgtgcgctggctacggctgctgccgctgccgctcaagaggcgagtagagtcaccgcccctccttctggtgaatctagtcggccggctttagctccccaggtggcgtcgtcccttccgttggctccgttcctggccgatgcggtctggtcgctactgaagagctcgatcaagtccgagaccgtggagaacgctggattcgaaggtggacgagagagatctcgaggtcggaagcgatccgaacgaggtgctagagattactggaatgatgaatcgtattcaacgttcgtcccctttccttctttctctatcttttcctcttattcaggagtgctcatttcccatttccttatatcaacctctccacctatgctcagtgatgccaatggatactggatccagacctctttgaacactcctcctcagatgactttggacgactttgaggcttccccgatcccactctcttatcgaacgaacccttacaacctcggtttgagcgcgcctgattcatttgtccggttcattcaccaaaccctcgcccagaccttgatctctccgaccggtgtcatccttgccctctggtatctcaccaaggcccctcttcacgagggcggcggtgaggaaggtcatttgtttagacaagagctccagacgttctcggattacaacggtgaggaggtcgccaagcgagtgtttaccctcggtctccactgggccaacatgtgtctcgatgacgagacgttcaccgctcgatcttggtcggacgtcactcggatccctatccaagagatcaaccgactcggtctccttgcactctccaccatgggtttcaatattcacatcgatgttcctgagtgggccacttggatcgagactgtgtacctctcggcgaatgacgagatcgctagaaaagccctgttcgacatctcggacgccttggccaagagcgaggcagccagggagagcgaatcccagcgggagcagtggcagattgcccaattgcagcagcagcagcaacaggctgccgaggagcagaggcaacgagatatccaggaacaaatggatcgagagagagagtgcaacgagcaattacgcttggaagctcttcgagtctcgcaggccgctgccatttcgatcaactgggcccactcttcatccacctccggtcccgccccagttgctcccaagcaggatgcctggaacatgttcgactcaaacacataccaccaggaccgacagaccatgcagtatcagcagcagcagcagcagcagcagcagcatcttccaacctcgtcgacctcccagattatcggccgagctcaacaacatgagcttcgccaggtccgtcgacatgagccttacgctcggtcccagggtcctgctaccggtcaccaagccgagcaggcctacccggtctcatttactagacacaccgcctcggccccagtgctgggagccggctgtgcgcctttgcagcaccaggctacctttgggaacgttggcaatggctcgttcggtttcggtacgggcatgcctcagttgatgcgaatgcctaccgcgacttgttggtagagaactggtgtaccggatattctttctcatcacttccattccatcttttctttttcttcacttcttcttttcaaaaagagaaaataccaaaaatatttccttcttttcctcttcttccttttccgttacattctagctgcctatccgtagctatctcttttcttccatttatgctcctaccccttttataattgttgtctctcaaatctccttttgcgcaaccgttcaaatatttcatattcgtcttctctttttgcatttggcaatacttcatctgtcatttgcgctcttcttttaatctggttttctcctcttcctctttaaagaaaaaaatacaaacaaaaaaagacttttttttcttgtttaccttccctttcctttcatctttgctctgttttcaacattttagatttttagaccgactctttcttttttcttcaaaaaaaaaaatgtgagcatctttggcttctcccttttgactggcataagactgaccctgggaaacacttcaaaccacaggttcccgagagatagagacgatcacgctggtatccgattgtttcctctttactctctggaggctcggccgatggacgtctctctttgtggatcatgaaggagaaaaacgactttttcggattctacaaactttcaggttgtccctccccccctcgccccaaacctccttgctcccaaaaacaataaaaaaatcgacaaaatcctttttacccattacccaaaaaa

SEQ ID NO: 1436 - DNA, 9911 bp, Xanthophyllomyces dendrorhous
tttttttcccctttctgtcgtcgccgtcgttttcattggcaaatcttttctccttttcgagaggtgggaggtgggctttcttaaggagtcaaactctttcttctttatgatccctcctctttctctcttccttccccctttctatgttcccatcgttgttttttttgctccttggcctttttttgtttccccttatccgggtcatgttcgaacccttgtgcccgatcctcggccggttccttttgtcctctataacatcctttgcattggtctcctacgtatatttctgatatccttgaaggattcatcagtttagtttcagctttgacgtagactagctcagttccttagtctctgttcttttctcctttgctgtaaacattcctaacgtagttttatctttgggtgctgattgtggaggacgagaacccttattgagatgtgttccgaaccccagaaagcgatcgcacgagaacaatggaggctactgaagagacaacgaaaagttgtgcatgacttacgctcgtttatggtccgagcgctataccgatgttgataggtctcaacggtgatcaatggctgccggtgaaaaatcacactcagcatcaccgaatgaaatcaggtttgttaagaaagaaagttcggcaagcttggaggaaccaaggagagtttgtttgagcgttagatgggttcgtatagtttgtagtgaagtcagatggtctctacatgattggatgtcttgtgccacgatagcacgtctgtctgctcttatccaaccgagagatgaacgggtataagcacatatctggtgtccatttctttcatgtttccatctcgttcttatcgacgaatacaaacaaacgaatcaagagagaagaataggaagtataacaggaaacagaaagaaagaaagttcaaagctagatccgtcgaagaagtttctgataggaaaaaggaacaccttgatcgtgtgagagagaatgtgattctgatagttggaatataacttgaatttttttaaagagcagaaaaaaaggctcgaacgagaaggaagagtcagacgaaaaacgaaaggggtcgaagacaatgacagtgtaaagaaaaagaaagaagagaaagcaggatgggagtgtccagattgatgaatagatgaggaaaaaatcaagataaaaaagagacagaaaagaaggaggaccggaggaagagaacatatgttttctacgggtatatctgttgatgagctacaaggcggcgaatcgtgttcctttccccatcaagggagtaaagaaagtgagaatcaaggtttgaacgtagccgcttacgattcaactgagagagataaacaattaagagcaagaaaaaaaaaggggttgactccctcttcctcacaagcgatatggagagaactacgagagataggacaagatggagaattgagtgcatcggaagtaaagtaaagaaagaaagaagagaaggacccaaatagttaaaaagacaaaggtagagaaaaagaaagaaagagaaggagcaactagaatccggtactggactctctgaggacaggcccagagatgtccgtagcgtttactggtcttctctgaactcttcctacccctctcatccctggactggcgaacctatctaggaatgggttttcatttctcccctgctgctgctgctgtcctatgattccatgaaagtcagcatcagccatgtacgttagggtatcaacgaatggattcccacgttgttccatcactggctgctgctgttgttgctgaaggatcgatgggtgagctcgctgctgagcctcgaatgaggtaggactcgtaggcgaatgagagccgatcccagcaagcgcccggtataagctcgagaaccttgaagaagcagggccgatagaatgagagtcagcagatgaagacatggcgtctgggtgggtatgtcgctcattgcttggtggaccgaaagcgtagaatgaagagggccgagcatcagcgtcgaaagagccagatcggccgtgaccatccgcatgatgagctcgctcagacatcaacgttaccgcggccaaatttcgaccagtcaatgtagggttcatgctcattctccggtgaatatccgctttggcgttccttcgcattttcttgtaaatgtaaaatacgagcaacaaccagagactgcctccgacggagacggtaactccaatgatgatatctcgcttggttgtgttgctggaggatgaatcagtcgagctagatccactgctggacgcggctgcagcagaaacgagcgggtaggcggtattggctaagtcagcgatttgactaaggatcccagtctggttgtagaacgcagagttggacgccttcatctgagactgaagatgcccagaagaagaaggaaggaaacgaaaacgaagtagacacgtcagcacaagtctctgactgatctgagcacttcatctgcaaaagtcacaacagtagaactcttactgaaagatcgtcgaccatgtcggaaggaatcgttccctgccagagcgtcaacgcttcactggccgttccactcacactggctggttggcttgtttgttgtaaagaaaatgacgagtaagaagaaggttattatgaaaagcaagcataaaccaagacatgctcaaacagagaggagtacagactcactaggctttcaaagcgaatgtagagactgcagtgtcgttcagacctaaactgtcttgaacgaggacagggacataatagatcaactgagcaatcaggtccgtgttgttcgctacatccacccaggtcagacttcctccaaacaagatctcaacaagggtttggtcggctgagatgtcactactagaaaaagtggtctcatccccagatgtcgtcgattgggatgttgtagaggcaggcagaatgacggacggcaggtcggttggcaaaggcgagacggtgactgccttggatgtactagatgcactcagagagctcgagtccattagagcggacgagctagacttgatgatcgagctcgcttgaatcgacgtggtcttgacggtaggaacggcgagtccagtttgactgggaaggaagatgtcgttggttgtggatgagctggcagaggatgaaacagccatggaactaaaattaatgctgtcgctggcactagcactggcgctggtggacggagtgtgtgagtttgccgttgaactcgattgggaagactcttttgaggaatgagacccagaaagggatgcactcgatggctgggcagaggcataactgctgaaggatccgctagaatggtaaaccgaggatgtagtatcattcccaacactggcagtcaacgtagcagtcgcaaaaggatcggacgctgtgctggtgaccgagacatttaggccggcaacagatgtgctggaaacaacattggacgtatatatatttgacgcgacagaggaggaaacggaggctgcgctgtatctagagtctgtggtggtagaaactgaagtggagcttgagacggaagacacggcagagtcggaagaggagggagcggagaaagtcatcgaagcagttgaagaagaccaagatgctgaagccgtggcagtggacgaggtcgccgaggtgatgacagaggacgaagttgccaaaccggtggatgaggtggagtcggatccaagctttgctgttgacgtcgacgttgacgtcggcgtaaagatggaggtagagaccgagatactggacacactacctgcagagacagtcgccttagaagtttctgctagtgctacagatgctgaactagaggagacaggggtagccgaactaaaggtcacatgctgtgtggacgaagagtccgccacagtcatagaagtcgtagccgtcgaagtgacggacaatgatggtgacagtgatgaagctgaagttgacagcgacgaggacgagaacaaagcagccacagaggcttctgattcgctggacgtggctggggttggagcagaagtctggatggaagacgacacgctggacacactaggcgcgaaagacgacccgacgtacacagaggtcgtagtggaggcctggagagttgcctgtacggcggttgatacactagacacagaggactgctcaacaggcacagacgtcggcgaggcgagagtgacaggtatagatgagtctaccccaatggacgaaatggtcgagacaacggccgacgaggtagatatgatcgattcagatactgctgtcgaggaagctgaagcgagagaagaaggactttcgatcgtgctcgtaggaatatcactcgaagtcatagtgaccgtatcggcatacgctgatgtagaggttgaatctatgggggatgatgaggctagggccgcagtacttctagaggaagtaatccagacggacgagcttaagagtacttggctagaagtgggggtgagcgtggcagttgcggtggtcgttgctggttcggtactagtgccggtataggggatgatggtgacagtggtgacgtctgtagaagcgatcgagctgacatcggaagtggtggtcgcaacgatggatgagctggatgacaaaaacgacgtataggcagactctgttgtagtggtgggagagggggtgtatgctgaggcgctgccggttgagaaggtcgatgcaacgttcacagacgatacgctcgcgaccgaagcgacactatagtcactcacactcgctacagatgcagtgctataggtgctcacgctagcgacggactcgatgctgtaagatcgtgcgacggtttctataatctcagctgtgtgagagatggaaataagggaaagccaaaaatggcaacgcaagaattaacaccgcgccggggttattttgattagcatttgaggatacattctgaagtataattggtcgaaaacatgatacgaagaagggaaagggcacgaaaaacaaggaagaacactaaccgaggtcgatttcactcgatatctcggtagcctcgctgaaggaggattgcctcttcgctaaacgggcatgtttttgggtgcccgctcggtgggagaggtgagagagcgcagcgctttctgccgagacgagtgttgacgtattggcgagccatgaggctagaacgatgagccatggaagcggtcttatcaggtttaagcgcatcatagagtggcgaggaggaacagagaaggaagagaaagagtataaaaagaaagaaaggaccggccagcggaggaggaagacaggaaagaaagaaacgtcagaggaacttgactgtgggtgtgtaggagatactgcgatggagggagagaagaagagaagggagttgaagatggaggaagaagagaaagaaagagaggaaggagaagatccagagaaagatcaagagggaagggacaggaaggaaaggagaagatgctctctatcggattgaccgtcttgagaaaagaacgagagtgagggaatgaaggccagaaggtgaacgagagtaggaagagggacaaccgacaacaattacgacagttacgcgtcagttacacttgagtttcacgctacccccctagaagtttcagggaacatcgtctgttatccgcagcaaagaaagtctagaacctatggaaagaggctcagggcgccgagcccagaacgtttgccgaaagaaatcgaccagaacagtaagctagtgaggttagagtacaatgggtgactgggtgggtgtacgagtgtgttgagtgattctacgagtcattcaatcaccccagttgacgaacgagcaagcttgtacactcaaatcagatggaataagttgcagcagatcaagaagatcttctcaagctcatggcagagaactgctataggcagaaagcatgtgcgatcaatttcagtgtgaacacatacgcacacacatattaagcagatccattcacatctcaaaaactctcttctgtttccttgttccattatccataccttcaaaccctccctcccgtcgttccactgcgtacttttttttttacgactctactcctttaccatacctaccctgagccactgtttatcgcttctgcatcttcatctgctgctttcgttgctgcttcttcttctccttctcctccaactgaaggtcgaggaaagcaaagcgagcatgtcagcaatatacctttctttttcttccaaacacccatcagtcagggaacctacctttgctttctccttcgggctaagcttttccctctcctccttctttttctttcgcctatcctcctcctccttttccttcttgctcagcccgccgtttgcgtccttctcctcttcctcccgctcctttgcccacacgccctccaaccctttccacgcgtctactcgcgtccgcttgaactttcggctgatttccggctgaatcttcaacacgttcggcccggatcccaccaacgagtctgccaggttgcataatacgtgtaagtaagacgccgccaaggcttcattcacaggcaaccgtaacgtcaacgtaattgtcagaggcgccgggtggttcagcgcgtattttggccacttcaatggaaggtcagagatctgaagagaatatagtttcccaatatcagtctcggtcgaccgttctatacctctatatacacatatacatccagaacagagagatacatacaatcaaactcttgaacacctttcgagcctccgaatcgatcaatagctcgaccaaaccagatcccgcattctgcccgagaggagacagaagttgagccgtcacgtccgggtgctcgctcatgatcgccaggtcggaaggcacaaatgatgaatccgaagcaagtcgaggaaacgtctggttgccaccgattcattgtttagttccttagttcagaacatctatgtctttcttttctctctcttcacatttccaagatttacaaccagatgaagagaagggggaggagaaaggggaaggtactcacaagatcccatcggccggttctagcccaattgagcccgtacttttccaacaccgcccaagtcccacttttcaacccgttaccattcgatgcatcatctcctttgacaaagacacccttctcaacttctttctttgccgctgcaagcttacttccagggggtaacagcgttagcatcagacggacttcgtcttccgggaccgggcactgaacctcccactgtctgaacaggaagaacttccagagcaatcggaacggatctggtcgaggaatcaaagagagtgtagtgtgaagagaaagtacgtttcgccggccggatgcgtacgtcaaaaacgttgaggtcccgtcggcgatcagcggatcggctgcatttggagcaggagagagtagagtgaactgagattgaatcgtcgagagactagtttgatacctatgagcatgtacattttcgtatgtatatatgaaaggagacagacgaggcataagtgacgagcgcgaggcataggattgagacgatttgcagaagaacgaaatagacgaaccatctcttggcgattgttctgttagtatttcgtccgacaatgtaccatacgaaatatccaaatacggctagcaacaaatacggctcataagggaacagagaaggtctgcacggatttaggcagagaaccagaagacagatgtcagctcaaggaagaaagccaggcaagaaaaagcggaaaagagatgtagatcgtgcgatctctacaggtgagatatccagagatggaagaatgaaaaaaaaagcattcgaacctaaaaacaagattcttccagatgacaaactgagtaccggagaaattgtctgattcccttggctggcgtagctgaccgggagcaatggcatgacccaacgaagaaaaaaactggctcatcacgaatgatgaacttaatggagtagtgggggtggatcgttgttgatatccaagaatcggcaatggaaaagctactatcaaaaagtaacaagtcgattacacaaattcttcccaaaattcatgattgtataaaaattaagccgactctcttacattctttcttccttccctcattacaacccaatccacactttcattccgaccgatatgcctccctcttcagaagcttcaggctcaagatctgacagcgtctctggatcagaaatcggctctcagcgagggtcctcctcgtccccccaaccggaggatgagatccccgccacctttgcctccctaggcgtcaactcactcttgtgcgaggcctgtgatactctcaacttcaaagcaccaacctcgattcagaaagaagccatcccgtacgctctccaaggaagggacgtcatcggacttgctcaaactggttccggaaaaacagcggcgttcactatcccaattttgcaaaaattatgggaagagaacgcgggtacaccgtactttgcctgtatcattgcgcccactcggtgagtttctgttcgatgttatgtatcagtacgatcgtagtccgacgattccaagcaagacaagactgactgttttgaccattgctacatatgtacctctttgcttacttcatcagtgagttggcgtatcagatttctcagcaggttcaggcacttggcgcgcccatgcaggtccgctcccaggtcctcgtcggagggatggacagcattgaacaagctcgggcgttgaagggagagacaggaggtggtaagccccatgtgattgtatgtactcctggaagattggtcgatcacttggagaacaccaatgggttctcgttgaagaacttgcagttcttggtaagctaccatccctactttccttgccttggctacaccgagacgttcgattgactaatcgcttcttaaataggttttggatgaagccgatagattgttggatctggattttggaccgatcttggataagatcctaaagatcattcctaaagagcgcaacacctatctattctcggccactatgacatctaaagtcgccaagctacaacgtgcatcattgaataacccggtgcgcgtggaggtctctaccaagtaagtttcaacctttgtttttttttctgtattggcttttgtgcaaaacgttttcttgtttctctcagaggtatagaaaccttgtcgttcaagttctaacgttgtcttcaaaccaggtattctactgtgtcaaccctccttcagcactatgttctctgtccttacccaaaaaaggacgcccacctaatttatcttgccaatgaactatctgccaattcgattatcattttcacctcaacagtccatgacgcccagcggttatcgattgttcttcgattgcttggtttccctgctattccccttcacggacaactcagccagagtgctcgattgggcgcgctcaacaagttcaagagtggaggaaggagtattcttgtagcaactgatgtggcttcgcgtggtctcgatataccttgtacgttccgtttggttctgtcactacatgcaccttctcattcaatctcagctatccgttactcatcgaactcttctttggtcaatcttgtcattcaattccctctctatagcggttgatatagttattaattactcgatgccttcgaattcaaaggactatatccaccgggttggtcgaaccgctcgagctggtcgatctgggaaatctatttcgataattacacaatatgatgtggaaattcttcagcgaatcgaaggtgttattgccaagaagatgaccgagtttcccatggatgccgaagctgtcggtctacttgaggagcgagttggtgaggctaccagggtggcgacgcttgaaatgaaagatctaggaggaagcaagaggaaacgaatcggggaggatgaagggggcaatggagggggcgagggcagaggagacaatggaggaaagagagg

SEQ ID NO: 1437 - DNA, 434 bp, Xanthophyllomyces dendrorhous
acatactcgagtgtcattgccatcgctttgccctgtgtgtctttcggtgcgtttgcgatgatgcttcttctgagatgtttgccttctgcagatctgggaagggcccgaagaagagtaaagctccacgactggtcactcgtgttgcattcacatttgtatttgcatgtgcgttcgcattcgcatccgcatctgattctgagatgtctgatgtcattcacaatgtccacaaactgatccagctgtgcacgaaggtcatgagtataatcaatctctatcgagtccaagcgctcatacaatagaaactcgcccgagaccccttccagtcgatgaacagacctcagaacgtccaggcactcggccgatgtccggcatggcttcagcctcttagcctccgcgatgtcgatcttggtgtgtatccagcccatgactgtgtc

SEQ ID NO: 1438 - DNA, 1507 bp, Xanthophyllomyces dendrorhous
tgtctgcctcggccttggaaaatacatcagcatatgctgtatacttactaggcacaacggggttcgttgcggggtctggaacggaagctgggtcagtattatcagtcatttcagggttcatagccagatcagcagatgctgcctgtacgaggacaggagtcggaaccccaggaggggaaatctggagcaaaacaggaacaggatgccgactatgtcgcaacagaatggtgttggcaacatagtcgatgccaggattgtggcgtcgatgccagggaatacctaggatgatgtccacagaagcggttgcagccaagtgcaacgggacggtttcttcgaaaccacccagaccgagctgtccgaacagaacagagtcaatcggtccagtagtcaagggtgtcccatccacagttgttgctaaccgcggggacgaaaggatgtcaatcttggcagggaggctggaggctagcttatggttgatgatgttcagttgagagccggagtcgaggagtacacgaacggaggtctgagtgttgcctgtctgaagtgtacctaagaggatgattcgcttctcagagtttggctcggatgaacggagtggcagagatgttagttcgacatgcttgtctcgcatgccgtcagggcaagaataatcagacacatgtataggaatcaactgttgaaagtgatctgctgaacgggtcacaggagaagtagagatggaggctaagagaggagatacaggggatatagatgtgatggaagactcaacgcgagatttgcttgagaaaacggagtcagtcggattgttccgagagcgagaagtgtccgtatgagaagaaacatgagaaggagaacaaaaggaagtaaacttaggagactgtgcctgagcgattggctcggaccggttgaacgatacgtggacgctagagtgaggatgacccagcagaggacgacctactgagtcctgactttttccgagtcctcatccatctcatccgtatcgaggtagatggttagttctgccatctgagacggttgatcgttctgccggaggagagggcaggcgttgcgatggtgggtggcatcgccacagtataggcataggttctcccgtcgtcgtcgttgcttttcagctgcagaaagagggactttgatgatgttgggtcgacttacccctgcagctgttctggaaacaggatggaatgtgggagctcttccgtaagtgttctgtttggcggccggtgtctcgacgacatcaatgtccatcgaagatggcccatcatctacaggtctagcaacaaatccacaagacgcaggaacaaacggacgagagtaagaagtaggctgtcgaggcatactgtttgtgtaataaggatatcaatccttctgttggtatctggtcttttcggacagtagattgtccactttgattgcacttgctcgcaactcttccagagtggtcgactcctcgaatctagatagttcggccttccccgcattcttcagg

SEQ ID NO: 1439 - DNA, 639 bp, Xanthophyllomyces dendrorhous
ttgttgcgacttggttggttgtagagttttcagatgaggatgtatgtggaaagctcaggctctcgaggatttaggaagatgccaaagtcataggcataggtgtaatgatagataggacgaagatgacagaatccaaacttgagagaaaagagaaaagagggaaagaactatggggaaagggaaagcgacgaagtacttgtatctccccgtcgctcggcatgtatgcaagccagaagggatgcaagacggaagggatgcaagacggaagggatgcaagacggaagggatgcaagacggaaaggatgcatgcaggtatcgaagtgtgaaaaatacagagggtaataaatacgtattgttgagatggtatgcagatacatacaagcatatactactcggtctgatccctgacagtaagatatactactcggtcagacccctgacattcttggtttacttatgtttatttttctgtttgtgttttgggtgatgccgttgtttccgtcgtatcttttacttcttttgttggtttcgtgaattctgatggctttatttattttgcttgtgttgtttgttttgcttccagtacttcttcgatctccggtgatccttctcgttctagcgcaaccgcatacatctggt

SEQ ID NO: 1440 - DNA, 40646 bp, Xanthophyllomyces dendrorhous
atgacgcgtagcgggttgtaatcggtcgatggagtgttcgtggttgatggtcggaagagtgttgcaacacaaaacagcgcagtaccttttgtactctggacggacaagtgtccagacagataagcgggctgacaaacaggtatgcggctcggtatataggtcgatgtgcaagtagagcacttacagaacacccggcctgatcacttcatcgacgcgacaagataggcagacagatcaataggtcgaaaggtcggcaggtcattcgctaggtaaaggactggcttggtacaagaagaagtcgagacatctgacatgaacagagcgaaagatcacaagagcgggaccagctagcgcgtcctgagggcgagcgactgtccggacggccagctagccaccagactaggcatgaccaccctggccatcggtcgtctatcactgagaagcaagtcaaagaacagagtggaagatggcatgacacacagagatcaaacagagaacagagaaaagagaacagagaggacaggggaaacggggaaagaaaagaaatggagtaatcgaggaaaacaaaggggaaaagggactgcgttctgtacgaccaggaatggcaaacctgcgtatcgtacctggccaagctcacaccacacagctcggcggccgacgtccgggtacaagacactcgatcgcttgctcgtccgttcgctcactcggtctgtgtctgagctctcttcgtcaggcagactggtagatggacatgtgtggttgttggcagcagcgggagcaggaacagaacgaacgagcagtcggatcgagacatggtcagcttgtgcacaagagaaagcagaggcaaggcagtagaacacatgaacatccagaggagaaagccatcagagtgtcagagtatcagagcaccagagtgtcagagtgctagagcatcaaggtatcagaccgtcgggaggtcaaggtggacagggatgtcagtccagtcagcgacgctgcactctggaacaaccgaatgagccgccgacaagagatacagccgacaagatctttgcccatccgtcgcaagcgagtcagttactagccatggtcggtacatgcagaatcacaggtactatcacaggagcctctacgggcactgatgctggtattgacaccagcacgggcactgggtaagtgaaacggagatggaggcttgccggactcgacgaccggatgtagtccagctagtgaccgcgactagggatgcgatcgtagttacgacgactgtgcctttcaactgtaaccctaatcatagtccggtcgtacatcgagtatcaggccatccacaccacgagacgacgactcatctagagaactatcaaatggcatgccatctcgcgaaggcaacctcgcttgaccttgaaaaaccttgtctgttaggtcttgtctttaccctggcatatattatatgtctcttttagatgaatgcgcaattgatataagaaagaaattcacccggcgatatacatttagacaaaagttcagcatttgaaaatgttgtcaggagcagcaaattaaatgatacagaacacgtagatgtacaggctgtaggccttgtgaaagattacactgtatggtgacaatttgcgtgaggagagagattctacggacacgatgggaagaaagcgaaatgataggaacggcgcagaaagccttgaacgcgcgaccaactagttcgtcttggcaataaggagagatggccaaaagaaaacttattcgtgaatttgtatacaacaatgataccacaggatcagcatgagagtagaaaatacatgtcaaagcgcagcacgagcccaaaaagcagaatgaaaggctggaaaaatccaaaagagggatgaacacggtgtagaaagaagatcgccgtcttattcgatgcgaaccattgctacacctagctcaacatcacctatctcacgcaagcctccctcatcctcatcctcattcaattcgctttcctgctctacggctcgagctgaaatcaattgagtatcctccggcattttgatgaaaaccgacaagtatatagttcgcgaaggtaggtctgctaatactcgatcctgaacggacaagacacttattgatgaatccactggtgccgctacacccgtaggattggtgagttcgggtgtcggatgtattgagaacagattctgaagaacagatggcatttgtgagggaatcagaacaggtactggccgtttaaaaggaggtttgattggctctataggaataaagagagaaataggctgaagagagtccccaactaaggtcaggactgataagattatcggtataggatattaagacaacctcgatgattaaagacgtacacataagtgtttccagtcgaaagcggctgtattgatcctcatgttcagctggtcttctccggtggtgacctcccataagtcaggtgttctgcccaatgatatctcttttgttgcccttcgcctttgattaggtacgaagagtgtgttgggcatgccaagaaagctccgactatcgagtccatcggatgtgaggccagaactgttcagtaggtttgctatcgctcgaagctgagcactattggcacgttgaatctcttcacgatcctctgtagagatgttaagagataacagatggctcctaagacggcgccgatacatataatttctggtcaagaaacctgttgagatcaggagggacgcaagcgaggagatttaggagccggtcgaatgatgaggcgacatcgcaagagaggggctgtgtaaagacccggaactacacggagtacaaaccagcacataataaaagaaggatggccacggtggccacgaaagtctattgacaaccacaggaactgggggtcagtcactgctacaattggtctatggcccggatatgaacaaatcgaggagttgggataagataagagatggagggtcagcaagggcagggttgaaacctacgaaaacatagagggtggctgaaggcctgctcgggctacttgaaacagtagtagctattggagataaggtagaagtagacatgcttcgttctccaaaaagttgaagagtgtcgaaggtcaaagacggaaggaggagagacgaagttgatggtagggcataactggaaagcatcgctcgggatccttgtaggattcttaaaacgatgtaatgcgggtcttattcgcctttccttgttttccaagccctaaatagcaaaattgatcttcgcacttccctcatccatcatctaacaatgtctagatcttttggtcagaagactcttatttcgttatgaccatacgatatagaaacgacctgaccatcatatattaatttatctgatcacaatagtctttgttaccggaaacgccaacaaactaaaggaggttcaagtgggtgtgtttgttgccggatgttcactcttctttgtctaggcgtttctgaccacccaggcatgagcggttcgttgtattcctaggcgatcctttcggtggatgccaatgggattcaggtatcctccgaagctctagatgatcttccagagattcaaggcacaaccgttcaggttgccacagcaaaatgcactgcggccgctcttcaggtcagtttatcggactcaacccaatatttcccagcatactttttcgtttgtctcttgagattgagatttctatgacgactgatatatctgatttctgtagattgaaaaagcttgtgtgaccgaggacacagcgttagccttcactgctctcaatgggctccctggcccatatatcaaagacttcatggaagctgtcggtcatgaaggtaagtatctggacacaacgtattttctgggttacagatgactatagattatgatgatgaatgtgctggttaattacttgcaggactgaacgcgattctcgctggatttgaggataagtctgcgactgcaatctgcacatttgcctactgccctgggcctggacaagcgccactcatctttgagggaaggactgaaggaaagattgtgcctgctcggggtgcaaaggtctttgggtaagcaattagcaattttgaatactctttgtggtcatacaggaagttgcatctctccggatgtttgttgtttataaaacgaaaggaaacgaccacctggcttgagttctgactatagcattctggttgcttcatttccttcgtatattcagatgggacgcagtctttcagccggacggattttttgagacgtacgttcaacatcttactcgtcctttctctctcgacgccgtaaaggtatcgattcctgctcgtttttcgtttgacatttgcgcgagggatatttctacaaaacaaagtattaacgacacactgttccaaatctctgtattctcacacttttgaaccctcttcgtacaatagatacgctgagatggatcccaagaccaagaacactatctctcatcgataccgagcattggcgaaactaaaggatcatcttaacagcctaccagagagctcatagatctagatcatgtatggaatcgagagaacctgacagattgtgtttgaacattcttaatacaaaatgcccgatgtgcatttaatagatttctcatattcacgttctcctcttggctatcgcttgcattggatgtgatatatgatcctttctcaagcctatcaacagttctctctttgttgcatgacctctcaaacgaccctcataagaatggttgagccgagatatgtactttgtatttctttcaaagaaattccccaataatgttgaagaggccgtacatcttcattgatatatccttgatctcttcaacactattaacgtacccaccactccgactgtgatcccacctaaaacaggtaatgtccctcctaaccaacttgtcagtcgtttcccggttttccagctcttggctctcaacttgccccatgttgagtcgccatacgccacgtcttcccaagctcttatttccccagactcccagccacctagtacagcgcgcatcatcggctcatccatctctgccagctcgtccagactccaagtatcacacacgtcaatcatccagctcattcgacgtgctcccagcggaccacccacaccaggcgcaatctttcttaattccgctcgaagctggccggtcttcaagattgcattctcgatgttgtcaggtaaagataactcgattcgttgccgaatagcggcagctaaccggggtcctcgaccggatgtagagaccataatttgaaggggacctttccgaatctgagagccaaagtaaaaatcacacttttggttgacgaaggaaagagaatttgagatcgattaacaattgcaaatattgattcatgagaggaaatcggaaagaagagacttacctgagggggaacatcggccacatttaccggtattcgaagctttctagataacgaacagatccttgttgataatgggttatcgtcgatggctgtcaagatcatgtcgaaccctatcaatcgggttcgcaatcaatagttttggatagaatatacagaactaattaacatcatgaccatcgttcctacatctgccgaggaagctctcagaaacaaaaagatatattacctgttaagaactcttcctgctcatcctcttctgcccattctctctcaagataacagtcaactaaaccttcgacgtctactcgatgtttgacttcgtccgttaaaccttccctaggtgcaatcaatgtcaccttagctcctgcctctaggaggtagtataaacgaccggtggcgactaccccacctccaacaaggagaactcttcgaccatttagtctccaagctgaaagaattgggtaaatatgatgtcagtattgagcaatccatccacatatcaaagatgaactgaatgatgaacctagcatgaaggaagtgcccggcacgatcggaggaatctcagttttactatcagacatactcaggtcagtcgggtacaaaagtttcaagattcttatgtgacttgtatggcgagccttttaagatgttgaaaagggtgaaagagaaacgactgaggatcaaagattagggatgaatgacgaaataagatatggctctgaaagaaaagatgatcgatcgatatatttcgttaaccctaacaattgcaactgaaacattctaatcagtatcgatgtatggatgtatttcaaccaaatttaacctcaatcaaaaggtagataaaactagatttatgaacaaatagatgacatatgtatatcaggaatctatcctgtgttctttatatctttggcactctgcctttcagcctggccttctcctcctttcgttcctttttttcctccttcttctcggagtttctcttcagcaaacccatcatcgtcgtgttcttcctcgctagatctctcttaccaatccgatctctatccatagaagcagcgcctaccgtcaagcttgtctgtccaccggacgaagggttcagatcgaatccgtcataccgactaggatccccccattctttcggttgacccatcacagccatcgtcggaatcgcaggaggctgccaatcgtcttgttttgaagtgttggtcgaagtgtgtgcagtgacctcaggcatggagtcctgcgaaggcctgtatggcctctcggtcgactcggtcgatggccgataagactgagatgtaggcagtgattggtaggttcgaggcggggaagaagtttgaggtgcatacaggcgctgcagggtggctttgctctgtgtctcgatataagatatatcttctgccaccgcctatagatttagtcaagacagaaccgccattatatgagtactatgaaacggtcgaccaagttcaagaagaaataagattacaaacgaacgttcagctggatcttgtagccgaggattctgccatccgtctgatctagatgaagaatgacttgatcgatggcctccatcaccttgctgaccccatcgtccgcttcaagcaaggaatgaatgctggcctatagatgtggaaaatggagtatatcaacggacgtgaagaaaaagaagagaaggaaagcggacaaagatctttaaacctctccagagtagttgcttacctcttctaaagcttgcagttctgctcctagtcgtttctccatctccccttttccatctcttcctatcctgccactgtccgccctctcgcccgccgattcccactcccagccgtccaacaactcttctacattagcgagaattacatcttcctcctcgtcattttcctcttcttgttctccgatcagacccccacctgtaagcggcgtgagaggatcgttggacagaagtagcgcacgcgagaacgatgtctcggtcttgagcttgaaaggttgcggcggctttgctcgcgcagagccgttcggtatagaggccatgtttgttgagacagagagagcagcaggcgaggctggtcgtagggacgtctggggtggtcgaagaagagagggtggataatttggctccaaaacagaagatccatttgatgtgatgacggatgccggtgagacttgtggctgactcaggctaatgatcggaggggccacgaaggtttcgacaggcggaacacttgaagatttgaccgaagctggaatttgggtgacaggaacaggtgatagattggtggtctcggcagaggttggcaaatgcgtggatgcagggtggtcaggcctggaggcgaaatgagagctcgaggacagttgatctgcctggtgtgataatacagctaattcgaattgagcagaatctgctcttagagtagttccttcgccaggcttctttcggatctgccgcgctctggaagagtccgtgttggcggattcaatatcgtcgctgggggagagaataatctcccgaccaagccccgaaggctgccgagcaaggtcttcacggactgagggttgcgaagaggtagacgtccgatgtggtagttgtgaggaggatgaggaggttgaacgagagggtgtgggccggactggatgattagcagaagaaggaaaaggcacgtttatactggctggttctacttatcgcaaatcgcgtactttatcaagtcgagctctgagatgggtgtttccaactaggccaagagcacgtaccttgttctccttctttaagcattttcaaatctatgcctatcaacctgggcattcgaccattcatgtattggcggaagatcttgatgctggcctcgatgaaagcagcctgttcagcctcccgctcggttgcgtaccggtaggtcttggacatcgtcaatgaaaagtgtaagggctagaaggatgggccatggagatgagcgagtcagcttacatccgcatctgtatcagagaggcagagaagaagagaagggccaagagagaacgaccgacatctacaacttcaattgtccgtaaagattctagaccccaagttttccccttcgagaatgttccgttggaatttctttttgctttgtgaatgaagcatttttcggactgagtagaagctgttttaacgtcgaggttgctgtcaatagacggtctcgccttcatgtggatgtacagttcactagaggttatactagcagatactcttgaggtagagctggagacgaaaagaaacatactggataagatcagatacctggacttgacacctccttcatctgtctcaaatatctttacgtgtgacacatatgtttcattcaagttatcgcctgagagtcctgacgtggttgaggttgatgatgatgcgtgggaagagaaaagggaggcgatgatatctgtcttcgtggacgggcgagagtcgtgagggattggttgaggtcgtgacatcggctcctgaaaggggtgagtaaaagctgatgcagctgctgaatgagagcttgagagcacagggagacgaaggtaactctcaagggggtctgtctgataaaatcaatgtagacggtatatccgtcgagcgagaacatggacgagatgagagggaggcgagagatgatcatagttacgtaatgatcgcgttagagaacgagcctgatgaatttgagcgcgtacagacttcaggcctcaaagttgatagataactcatcaaactattatgctgctttacgtgtccaactacacatctcggaggcgctgtgtcggtggcgtcagcaagctgtcaacatgatgctagatacagagcacctttaaggagagtaatcataaatcggccgtacatccgcgcgtgcgtcgacgttcggtcgcaagctcattgccgtctcccgagtcggcctggtgtgatacacgatcggatatgcggagccgatcgatacggcgaacatggagaaagagaaggagaaggagatgcattactcagaacggaaatcggagacttcagacggaatattgtggtcatcagccccatcaacggtgtatcaaggccgaaggcccggagtacgaagaaggtgaaaacggcaagattgataatgtcaatcaaaactcaatgagcgaaatatattggagtaagagcggttgattggaaaacgcggaagcttcctcaacagtgggactatagaacaagatagcttagtgacctactacgttgacgaatataactactagggctttttttttttcgggggtccaggtcgatcggcagtttggcagataccaactgacctgggtcaactgattggtcggcatctactgcgcacggcgttaccacacgttcggcatagatgatcaaaattcattacatcaaacggatcacggcggccgtaggggttctctgtatgttccccctcaaaccgtactgcgcgtcggcacacataactaggctcagaactgagcctgacagagccttgccgagactgacagagaaaacatgaccgatcagacggcctgcgcgtggggagaagacaaaacagacagacgaaagaggaaagcagacgacagaggacaaaaaaagacagataggacaggcaagaaaaaaaaaagccagtcgggacagtcccagaccaataaatataccccccttcttttcctctttggttccatttcttttcccccttttcttttcctcacgacttcccttcctcccctctctccatcatcctccctagtcaaaaaagccgtgtgtggagtcgctctctcatacttagcagacagctattgctttttaggacctttctttctctttcctttccgtccctccgaccacctatctctttccgtttttttactctcgagtcttgttaaacaagttttctggctatccgcataccctccaaaatatattaaacacaaccccttaatcacataattcatcatggacgagaagaagcacacccctgatgctgtccctagtaagtattttatagttacagaaagcagcatcgttcccttgagcgcatctcttttgcgttgaaggatttttcttcgtccctctcagaattctgccgagctaaattctatttttaccacttgttttttttttctctcaaagctgaggctcccgtcgaggagaagaagaagcgagagtacaaggatatggagcacaagagcgatggagacaagcacgctctcgttgatctcaacaccgttcgtcctttgtttttttcttcttggctctatcggatctaaacggcctgtcgtcattggctattgaggggggctccacgtactaaacccgagtctgttttccgtacacgtttacagattcaattcactgctgacgatctttacgacaaggataaggtcgatattgagcatgtcgttatggaggaggtcttccagcttcttcagtacgttttcttctcgtcccgattgctcttctaccgtcttaacgccttttcgtctcgttctgttttcacttcaggtgcgatgagaacggtttaacttcggccgaagctgctcgacgaattgagatcttcggtcctaacaagttggctgagaccagcgagaagtacgttacgtctttccaacatatcactcgttccattgcatcggtgattaatcccatctattctacctaattttttgtagtgccttcctccagttcctttctttcatgtggaaccccttgtcctgggtcatggaaggagccgcgcttgtcgctattgccctgtccaacggaggaggacgacctccggattggcaggatttcgtcggtattgttttgttgctcctcgtaagtttcatctttttcttgaaagccttcaatttaaaagagcgagaaactcacgttgtcttacacagatcaactcgactatcggtttcgtcgaggagaggaatgctggtaacgctgttaaagctctcatggaatctcttgctcccaaggccaaggccaagcgagatggcacgtgggccgagattgaggttagtctttcccttattttgtcagtgaccacgatcacaaggctgatctcttgaacccttatctttcacagtcttctgagttggttcctggagatcttgtttcgttcaagcatggagacgtctgcccctctgattgccgattggtcgacgctgtggatgtttccatggatcaggctgccttgaccggagagtctctccctgtcgggaagaacctcggtgatgagtgcttctctggatctacctgtaagcagggagaggccgagggtatcgttatttccactggacccaacaccttcttcggtcgagctgccactcttgtcggagctgagaacgattccactggtcacttgcaagccgtccttgccaagatcggactcttctgcatggtttccatcggtatctttgtcctcctcgagatccttatcctgtacgccgatttccgatactcttaccgagatggtctcgacaacatccttgtgctcttgatcggaggtatccccattgccatgcccaccgtgttgtccgttaccatggccgttggagctcagcagctcgccaagcacaaggctatcgtcacccgaatcaccgccatcgaagagttggccggagttactatcctctgctctgacaagaccggaacgcttaccaccaacaagctcacgatcgatatgaacgaagtcaagacttacggacctttcaacgctgaggaggttatgatgcttgccgcttacgcttcccgagtcgagaacatggacgctatcgatggatgtgttgtcggatgcaacggaggacctgaggcttcccgaaagggtatggagcttttggacttcattcctttcaaccctgttgacaagcgaactgctgccacttacgtcgagaccgccaccggaaacatccgacgagctactaagggaatgaccggtattatcattgatatttgctcccgaaacaagacttccgagatggaggatcagctcgagaaagacgtcgaggagttcgcccgacgaggtctccgagctcttgccgtcgcccacgaggatgttcttgacaactcccgagagaagggtgctcctggaaacggattcgagcttattggacttcttgctatcttcgatccccctcgagacgacaccaagcagaccatcgatgacgctcaggctcttggtgtcaaggtaaagatggttaccggtgatcagctcgccattgctaaggagaccggtcgacgacttggtcttggagaccacatgtaccctgccaaaatcctcaaggatggaccacccgctggtggcaagtacgccacccttgatgagatgatcatggatgccgatggattcgccggagtgttccctgagcacaagttcgacatcgtcaagcgaatccagggccttggacacctctgtgccatgactggagatggagccaacgacgcacctgctctttctcgagctaacgtcggaatcgccgtcgagggagctaccgatgccgcccgaggagctgctgatatcgtcttgaccgagcctggactctccaccattgttcacgctatccgaggatcccgaattattttccagcgaatgcgaaactacgccatctacgcctgtgctgtaacgatccgaatcgttgttggatttgccgtgcttgccttcgcctggaagttcaacttccctcccttcatggttcttatcattgccatcctgaacgacggaacgatcatgaccctttccctggaccgagtgttgccctccatgactcccgatcactgggacttggccgaaatcttctcctacgccgttgcctacggactctaccttaccctttccaccgttgttctcttcatcgttatgcacgacaccaacttcttcgaagacaggttcggtgttgaggccatcaaggaggtcaacgataagaggggtcacatggttatctacttgcaggttgccatcatctctcaggctttgatctttgtcactcgatctcatggatggtctttcatggagcgaccctcggttgccctcatgcttgccttctgcctcgcccagctcatctcttccatcatcgccgccttcggagattggggtttcaccaacgttcagtcgatctctggcggttgggtcggaatcgtttgggtttggaacatcgtttggtacttccctatggaccttgtcaagttcgccatgaagtacaccgtcatcgcttggttgcgaaagcgatctgctgccaaggccgaggccattgctcagctggagaacggagctcctatgcagcgaaccgtctcccgacacgagtctttgtactccaaccgaacgtcgttccttaacaagaccgctcgacgagtcggactcggaaactccaaggtttctatgtctgctgccgagcagcagcgattcggatcggctcaggccgctcagactggtgccactttggcccgaaacccttccagggtttaaagctttggtttctccgttcctcttacctctgcttttcattcccaatcctattagactttgtttcaatcccttcgtctgtttcgtcaaccataatttgtcactattcaacctatctcgttgtatattgacttttcttcttccgctatcccttgttcctctgcccccctgcatttcccgtttgtttctactttcgtgatgatagacggcaacttattttcgagctttgttcctgttctttctctttttctttttataacaactcaagcgtcacataaggctaccccccatcgcccccttctgtcttcagaacccaaagcttgcactcgccatgtacactgagggatccgacccacgctcctttataaactcgttctatttaaacctcgctgtgcacaacaaattaaaaagggaaacattttggtgcctcttttgaacatataggagaaaaactgctcgagcagaccgactgagtagggctaggtaactacttgtagaaagcgctctttacatacacacatgatgtcaggtatactgaatcgactagagttttgcggacgcaatactccagattgatcaatccgaccgtccatcaaaactgagccgcagagaactactaagcagttcgatcatcttcattcaaagctgcccatccggggtcaaaacactttgcctatcatcggcactcacggtccggaaggctgacgaataatccatgcttaataattctcttgtcaatttgttgtaaccttcatcttatctatatttccttcccgcgtggatcagttctccgaagtaagagaatcattcgacgtggttgtgaagagaacatgattgcacataagcaaaggcagtaatctcattctgttcaagcattcttttcttcctcttcttcttcttcttcttcttgatcctttgaagttttcaacatctctcgtgagaagaacacgcgtccttaagtcactcgtaggtctctttacttcatgtctttgtgaccggaacgcgtctccaagctcagagagatgttatcattgacaaaacatatcaatctcatacaatcaatctttcgtcccgatagatatagttggaaacgttcaatcgaaacacgagagctcaaccaatatcttctacagaaaacaagacatctcgtgaagagattgtgatctctgttcttgaaccagaagattacctcaaaacaagtgccgctctgctctcggcgtacaccgatccggacggagcagaaaatccgcatggcttgttccctacacatctcagactggaaccagaaacttttattcgttcgatatctcttctcttcctctcttcattcttgcattggcttcacccagactcaataaatttgttaccaaatatgatcatatactgtcgatattcacaggtcttttagccaatttatacgcccagcggatcccctcatcagtaacccggtacaaggcttgtctggcttccgacccaactgtgcctgtcggtttggcaatctggcaggccgtcaaggatcggacgagtacagctggtgaaccgacggctgaagaacaacaagaggaggccttggtcgaggcgtggaataaagaaagacggacagaattagatgccgaatttgagcgtgctgtggaccgcgtgttctacaagaatatgaaagaagcttatcattcagtcaaaaaagacgttctccaaggaagaaggtgttactacttggttcgtcctggggcatttcctgtagattttttttaaaaaagaaaaaaacctagacagggtcgtggcttggtagcgacagcaatctcaacgcggactgagattgttgtctgagatcaaacacattctgttttcttgactctgacgctattttgttcgacctggtcataggaacatttgtatgtacatcgggaccatcaacgcaagggaattggcaaagcacttttagagattggaatgcgcaaagcggatgaggaaggggtcgagtgttatctggaggcatctctcacggttcattcttgttttggcctcctctttcaacgacgacaacaacagatggaataattaaggctggcgttttctctttttggatcgtacaggggcaaccactatacgaacgtaatggatttgaaatcaaggagtgggtggagattaaggagggagatgactatgtgacaaggctgccagctatgatgcgcgctccgtccaaaatgtcttgagctagcgtagttaagagacaatgaacaatgactttccttatcgacatatctaaacattgaacagcactattgtccaaccaaacctccctatcgctcaagagtacttcgaatcagcaaggccaaagtagagaaattcgaaataaaattctttcaagtttctatggtcgttagaaaagttcctttggaagacctctctgacaagcttctaagcaatacccaactcgtaccgtttccagcccaacaccgttcgacctgtccatctccatcgaacttccacttcgcttcctgaccctctttcaaattggactgatcgtcttttatgctctggtcgcttttaatgctctggtcgtaactaaaaccgctggatgatgcaggccacacaagtattggcgtaggccggtcttcggtgtgcccatcacctagattgccgtgctcgttccagccccaaccccatatctcggcccgtccggtttgggaagatctatgtaaactgagaagatgggctgaaccggcatacaaagactccacaggtggactcgatggcgggaagacaatgatagtagacatctcactcgctggccctaattgtccgtttcgagattgaccccatccatgaatctcggaacaaggacgcgcttcgatagattccgaggtgataggagaaggacgatcaacaaggatgaagatagcggaccatgtggattgaacttgcttgacacggcctagcatcgagatgctgggaggtggttgaagggtcggccctccctgaaacacaagctctgaacgatcggaagcagtgagatagattgtatgactcataccggaagatacagcttggatttcaagttgagtaggcagacagagaggcgttggatgatcgacggtgttggacaggaggttgtctgatgacaaggctgatttcactcgatgtcgtcctttagatatcttggaagagggagtgacaggagcattggctggacgggagattggtcctagttggccctgtcgagcgcctccccatccaagaactctttgtgttcgcattccggaccgtcggtcgacgaggacaagaacgacacttcgtgggctcgaagaaatcatttggatgtcttcgtccggaaaaatgtgccacgcatgactcccacatgcagaggaatctgttccgttgcccaacacggaaacatcattggagcccatcgctaggagaagtgctcgaggtgctgaattaggggctgatactgaagaacaagagagaacagtaaacgcgatgaatgttgtattgaatgatgaggcgatcaaggtgggtttgtatcgacctaggtcaaccgaagcgtccgaacaactgtaggtaggaagattgagcttccgaaacccctggcttgggatcaatgtaggcacagggagaccaagttggccttggtctgaactgccagttccccaaacttcattagtcagttgaccagttgcatctcggatagacagaagcgcaacagtatgattggctccgagggctaagtctagaacatgctctgtgcctcgtggtgggaacacagacagtaaagaagaggcatcgtgacaagctcgaaaaacatgagtatcatgaggaaacgagtggcctagctgaccgccggcgttagaccctgtggatatcaaagtgagcaccctaaaagatgttagtaagataagattaaagaaaggcaaaaaaataaagtcagctgaataaaagaagaaacacttcatgatgggttcatgatgggttcacatttgatttcttacatgaagtgtatgagctgaaaaaaaaattaagcgctggataaaggacgaccgttgaaggatagctgagaaaagatcaagatggagatggttgatctgaggaaggaaaagagcgataatcaatcggcatcagacctcaacattgactcgatagatatttcggtgagtctcaaaacggttagcgtacccagccataagcggggttgaatggcaacgaaagccgaaacgatgatatcacagatgatatgagaaggtgaatctcacagaatatgataggatgaggctgctagaaaagaaattaaagcagctcttttctcaatcattaggattttggtggcttttgactacaaaagtagaataattcttgaattaaaagtcgacgagggcatcttctgattttctctcttttttcctttctgtctttatcgctcgctcactgctttctttcaaccacactacaagctcacgtacacattatacttcgttagcacagatggctgaatctatcttgcaaaagtctaaagacaacgtcatcaaagctctctctcaggctaccgagtcactcggagtcggaaccagtcagtccagtctttcctatctctctttttggtccctctctccacgagcgggatatcacagaataggcaagaaaaagaaacttcatcactgaaattctttcgactacttttcgaaccctttctcgtttgttcaactagctgtctatgtagatgaaaccttggatgcctcgtccctttcaacgaccccaacaggaaccaaagaggctccttatcctagctcggtcgccgccttcctcgctcacggtctcgaggcctcgatcatcgtcaagaaggccaagcttccctccgcgcccgccgatgagcctgctccggactacgagcccattaccggatctggattgaagaaagccaagaagttgtatgagcaggagaagaagaagttggagaaggctgaggctgggaaagagaaggcggccaaggaggcagctgaaaataggttgagagaggaaaagaagcgagaggaggccaagtccatcgtcttgaaggaggatgagtcgttggaaaaagctatcagggtgagttttctttacgtttgcttcactccttatcgttgtcctaagcaagacgagatctagatctctcgagtataaaaaagatgtcgactattgtaagggaaaatatcgtatctgatttttttccccttttgaatggtgtagagcaaggttttttctttgactgagaagcgagacaagcgcgtccgagttttcggatgggttcatcgattgcgacagcagaaggacctcaccttcatcacccttcgagacgggtctggtctccttcaatgtgtcctctctggagatcttgtcagtcagcttccattttttatgattggggatatggccactaatgagtttatgcgcattctcgcgatcaatttagtgcaaaaccctagatgccttggatctcaacttggaggcttctgtcgagattgtgggtaccgtcagactcgttccagagggagctcatgctcccggtggtcatgagctcatcgccgactggtggcgggttatcggagctgctcctggtggagaggaggccttctccaacaagattaccgccgtacgttatcctctccttatccattttctgtcggtacatcttcatccgccgatatagaactcaaagaccttatgttatacaaaccttcaggacgcgtctcctgatgtgattgctgatcaacgacatctcgctctccgaggagaaactgcatcatccgtgctcaaagttcgagcatccgtcctttcttcgttccgaaaggccttcgaatccaaggatatcctcgaggtcaccccaccatgcatggtgcaaacttctgtcgagggtggttcatcgcttttcgtgatcgattactacggtaccgaggcttacctcactcagtctagccagctctatcttgagacctgcttgccatcgctcggtgatgtttattgtattcaggagtccttccgagctgaaaacaggtcagttctccctcactagcgattggcatcaaatgcaagtgattactgagttgttctggtcgttgaattcctcaagtcatacacgacggcatctttccgagtacacccatttggaggctgagcttgctttcatcacttttgatgatttgatggatcatatcgaggatatggttagtcttttctctctacagaatagttttctttcttcgcacaaggctcattctaacgacttcaaaactttctttattataccgatggcaatgtttgcagatttgcaaggtcatcgaccaggttcttgccgatccgatcacatctcagttaattcagactctcaacccatccttcaaggcacctcagcgacctttcacccgactcgactaccgacaggccatcgcttacctacaggagaacgagattttgtgcgaggatgaggagacccatgagatgcgacctcaccgaattggagatgatatcgccgaggccgccgagcgaaagatgaccgatcagatgggtgtcccggtgttcttgaccaggttcccgaaggagattaaagcattctacatgaagctctgccctggagatgaagcctacaccgaaagttgcgacttgctgatgcccggtgtcggggagattgttggtgagttggctgagacgcactttcctattgctacagttgaaagattcctgttgggactgagctatgatttcacttaccgtccgaaacacatcaggtggttccatgcgtatcaccgagatcgctgagcttctagctggctacaagcgagagggtattgatccttctccttactactggtaagctctctctacattctaaggagaaacagtctgagatagattgaaaatcttacggtgtctacatttgacctcttccaggttcactgatcagcgaaagtacggaacttgcgagcacggaggatatggattgggagttgagcgattcctagcctggatgaccggccgatggaccgtcaggtctgttatgtttcttctctgttgcctttattttcgtctgactgatagtcttgctttgtgtgaatgccggatacatctagggagtgctcgctttatgctcgataccctggtcgatgcaagccttagataaagagtttgataagaaaattcctggagcttccgagtttatctttccatttttccttgtctgatttctgggtaatccttcttgttcttattggagatgagtggatacatggggtttccttttcaatggttcgaggatcaagcaacgatgatgacaagagatgagtggaaaggagcaaagaactccaaacgaaaaagaaaaaatgctttacaaatcaactgtttcataaatcgaactcatcatcactctcgactgtggcctttctggagcctcctttaggcaccctcttggtgccagtcccgatacctcctccgtttctgatttttgatgaagctgcacgactcgagccaaacccttcatcttcgtcttcttcgtcctcgtcttcgtccgacctggcgcttgaccgaggcgggtttgatgagttggcttcggaagggatgtgagtggagagaatgccgtgcatcgaaattaacaggttctgaatatctgtcggataaagtatgagaaagaaatgagaagagaatgatggatgagatacaagagcgagtcggtaacttctttgagtaagaagatacaaaacggaacaacgaacctcgttcattgcctttccccaaaatgccctctcctcccacaatctgccctgtaacctctccttttcgatagacaatcaacgtcggaagaagtctatcaggatagttctcgatacacttgtttccgattatcgagataaattttgtccgagggtatctaggagcgagattttgtaggactttggagagtctctcgcacacaggctcgctatttgtacatcgtgggccgtcacgccgttttgagaaagtcagaaatcataccaccaggtgatgcaaacagagggaagaaacggaatagagctttggacagaaaactaaaaggaaggagccgtgcacgtacccgtccttgtaaagcaagcataccactcccgttcctacgccttttccttctccctcgtcgtcctcgtcgtcaccaaattcttcatcgaccttgcttccttcggtgacctctttgctccagctctcgcgaccgattggataaaccctaccgtaccgagcctttttctcctccttgcgcatctccccaagtcgtttccggcggtaggattcgaacagtcgttcttcgtccgaatccggtgtctcctcggccatcgtctgcaacgttgcgggatttgcgagcgagagcgttgtgtgaagaagttcggcatctgtcggcatgaactccgagggcgacctttgaaaagagaggcagggagacagaggaccaagaggaaaggagatcaagaaacgtgtatacagtttgagaagcagatcaattttctagttgacatggagaattctattcaaggaagaagagtgcacacttacggaggatcgggagcaggaccatcgatgataccctgtgcgatcaaagcatctcgactaagaggggtatgggacatcaacaaaaaacggcgatagaggagcagattacgagtgagcttctgaagcggctaacataaacccagaataaagaaaacaacatctcaatagacctacaattcggagtcttcgttgagattgaccatctttgtttgctggttgctgtttgtatgttacttatctgctggaacgctggacgagctgatgttgaagaggtcacaggctgcgagtcccgtgatcgggctgtgcgtcttcgaggtaacactctgtctacacccatcctctaaatctagattcactcgtttgatactcgagtggatcatcgtcttgagatcagacatcatgtaaggggagaccattgaagcgcaagagatactgctctgttttctaaacagatcaatcgaaactaagcacgaagaggcagatgaacaaggacactgccgggtcttaaatcgtaaccaggtggtttatcgaatttgaactttctactaatctccacatttcttcccttcaaacttatcctttagcttctacagcttctgtgtcttctttctttcttctcatctttccactaccgatctacttgttcattcacgctcgtgtataaccggcactcggaccgacaatgcagtatttactctccagatctttcaggccatcggtgccgctgtctggccgaacgttccattctacgccgaccgtgctcagagctcggtacattcccaataacaaccagaccactcgaacgaccgcttcggctcgtagacaatacattgccaagatgcgtcgatcggatcaagatggaaacctctacccaggctcgaatcttcaagagaaaccttctcgcttcctcaatgcgggtcctcaaacttggcctccgccaaaatcgtattcatccaaccgtgcccggacgaccgctcccctcgctctgaaaggcgtccattcaaccagggacgtttcttctgcagatgatctttctcgcctcacctctgcgccgtccgcccgtaaacatcaacctggaaagtgggaacgtactctgtttgacgaaaagtctggtatggctgtcaagcctgggcagccgtatgcccagagcctacaagacaacggtttcaagaagaagaggaactttcaggggggtaagtctggaggtgcacccccctggatgaaggaccggacgatcgagggtggcccaaagtccagacgaacagtggacgatcgggagaccagagcaaaccggactagagtgtttgataaagatctcgaacagggtgcatacgacagtccgaagacactgtctcagtatctggtctctcctgagaacacgatcacggccgaagaagctgtcaacaaggttgccatggcaccggggtcaattggaaaaaatacggtggtgtggaattccttattaacacttatgttcaagcgcagggtggcttggcccagagtaaaccaaatatactcgatggtcagtagatgtatacgaaaatccgcgttgtctctttaccttttcttaatacctaaaaccatcttccagaatgactaaaacgtacactgttctaaaacagatgctcgccaagggagttcaaccgtcagatcgaacgtacacaattctcctctcaaacctgcccgaagcgccgaatcagtctacgctggtactccgggccgcgaacgatattcatcaatcatttatcacggcgagcacaaaagaccctgatggtttccctccctcgcctgctccgacgaatgcgcttctcaagttctacagatcttccaagcgatttgatctgatgcagcttacattcgaccgaatgccacatagggggccagcttcacccaatgctattacttgggtcataatgttttcctctctgtcatttcagcccgcaaagattgaactcgctcgagggctatggtgtatgctagtcagccgggtgattgaacctgcgcagactcgggctcgggtcgaggctgaagggacgtttgatgcggaggagaataccgggcgagggactgaactgaacgcgaccggtatggatgctaagctacttgctaccatttgtcaggtattcaccgaaagcaagagcgatccggatattcgacttgcgtatgctatctatcgtgcatactctcatttcccggggacgctctcagaattggatgatgggcttgcgcctccatcagagattccagtacctatgcttcattcacctagagaccgagtccctctgtcggagagcacattagaagctggtttcaacctgctttcaaagctcggcaaacccaagatgatcctcgatgcgtacctcaagctatctcgaacagagtcaatcaagtccagaacgatgttgaatgcgacacatcttcactatgcccttcaagcagccggtcaggttgactcgatagataagctgtgggactctgtaaaggcccaccgaggatggctgccaagtgtgatccctacaatattgacgtgggtgcactggatggaggcatgcgcggctaagaagttctttgatggcgcagctcgaggcctcaaagagatgacgggtttgaggatcgatttagatacccccatgtccgttcttgaatccacaaagtcgttcgcagctttgtcggtgattgatccgtcagtgggaaagaagccattcggagaccaggcaaattccaggttgttgaatgctttcctgagcactgctttagacgttcatgccgataaggacttgcctatggaagagagagaggatactctccgacgggcgcttcggatgacattatcccttcaccaagtgacatcgttggaagtcgtcgattttactccaacccctctcgagaccaagacgccttcattctcgcactccgactttctgaataaaggcctagtcgacgggacctctcttacgatcaaggcgaaggagacggccaaaagccgaatgaggctgtcgaaggcaaacgcagcacaaataactttccatcaacagtttctcgcccgactcatggttgcgcttgatcagggtctctcatccgactgggcatctcagcgagaaagagaggattatggttggatgaagaaacaggttgaggctcgatggcgatcgcagccagtgttggtcttagggatacctattcaaaaaggacagatacttccgaccagcctgcctaagggattgggagacgacgaagggaacctaacgaaggatgaatcgaatggcgtggaaggagcggaaggagtggaaggaatagaaaaggtgttgacggaggtatcagatttggaagaccactccgttgactctgatagggtcaacaatcaagcgctgtaaaggcaaaagattgatcgatcagattaaaatagtagttatctggccggatcaaggagacatcaagaactgtccagtgcagttgtatcataaataagatgaataataagaaattagtacgacacgttgtaaggcaaagaacagcaaacagaaatatctgatgctgaaattcctggccatatcgtcgagactttctagattcgaattcgattacatcgagataaaatgagatctgagaccgtttctgcgggcctctgtaaggaatactctgatatcggaatggttcccgctatttctgaacgtttgatccattggatggacatgctgtgtacgatgatcattcttctattcataatacttgatgagcacatccactcactcccattacaaatttttacagaaattacggttttagttcagcccttttcataatttgactaaacaccggcagagcggcggaacatataagacaattcatccaaaccatcaaacttttgggtaatcttccctcttctctttcaccctcctaccctggatacaaaacatctgtgcttcttagatatgtccgttgccccaccagaattggcgatcccagaggcgactggtcatgctcaacctggtagctcgtggaagaaagtccccttcttccgaagtgttcagtttgcggtaagttgaacttgacttagctcttcatccattgtggttctttctcttgactttctccctggccaatactgataatcgactagaacggattggtgtctatccgtttatcaggtcctcatcgcaggtctcgtcactttttccgcaccaggaatgtttgatgcgttcgtcatcgattccgtcaactgcactttgctatttcaaatataggcagctaattgaatattgacaatttcattaattttctactacagcatgggaaatgtacgccgctatgacaattctcgttacccacaatccttgaagacgacatggatagtaaacttacttatttgtgttttgtgcggttcatcctttcaatcagcttggagcaggtggagcggctgaaccctacgctgttaatgccgccaatgcactcgtctacggactcatggttatcttctgtatcactgctggaggcttgatcaacgtcattggtctcaaggtgagtcagattgtcttttcttattcagccctaccgccggcatttactgatgggaagtcatcatgcactcttcattagtgggcgctcgtcctgggaaccgtcggatatcctttgtattcggctgggctctacaccaactcgtactcgtccaacacctggttcttgctctttggaagcgctttctgtggaatttctgttcgttctcagttttgtcttctcatatccccatccttcgcgctcaattcgtctctcttcgtcctaccgcacatccataggccggtttcttctgggcagcggaagccacagtgtatatcggttatcctgagcctggagagaagggtagataccttgctcagtgggcattctggaaaaacttggcccccgcgattggtggagccgtcaaccttggcgtaaacgtatccacaaaccagacaggcgcaatcagtcggcccacgtacatcgtgttcattgtcattatgtgcctcggatttccaatttccagtatgttctctcctttcatgctctacgccagactccccacgcgtgccgtattcacatctgaactgaaccaaacgctcgaatgttatagtgttcctgccttcaccgcaacgtgtgatgcgcaaggatggcactaacgttcccagtcttgccggcaagggtgtcgttcacgagatctgggccgttctccggttgctcaaagaaaagaagattctcttcctcctcccagccttcatttcttcctacttttacctagcctatcagagcaactaccttggacttcacttcacggttcgaacgagagcgctttcctcactagtcgctccattcgctggaatcatatcgtcgtatgcgatgggatacttcctcgatcagcgacagattcctgtcaggaccagaggagctattgtgctcggcattttgttcgtgatggagatgggtgtctggatttgggctacagtgatgcagcacgaatttgataccaaaaatatgaccatcgactggtgcgttcttgttcatattacaattggatcaattttttcaaaaaagaaactatcttactagcgagtccctgtctatcaatttacgacgataacatcaggtcaagcaaagatttcggtagggcttggactcttgttttcttctggaccttcatcggacaagctcttcagaattatgtttgtctcgcctctattcgtcttcctttacctttgtcgcgctcagcccgcttgaacaccttgttcacctcatttaccttaattcaactctctttcactagctctactgggtcatttctcactttgccaccgacatcaatgctctgtcccgttacgccggtctcttccgttccatggaggctcttggtcaaacgattggatgggcaatcgcctcgaatgcaagcatcagtccttacgccttgatcggtctcaactttggaggactgttcgtggctttcatctcagcgacaccaatcgtgttgagtctggtagagtccgatatcgattctgcgggcgcgtttggagtggattctcgtggcaaggtcgatggcgacggcgaagcatcggtcgatcctgccatcgcccgagcttaaaaaattgaaaactgtctgttgtagatacatcttataaattcatagaaagatgaggatcagattcattctagtcatcaagtctcgcttctgctctttctgcgatcactattcctatcaaccgaaaagattttcttcccgtctgctcctttagatacgttaggctcaaggcttagacatgtagtttagattttttctgtaatatataaacaattaatataacccttatttggttttgatcattcaaatgcccaacctgcatgcacatatattgctgacgatttcatgtgatgatatggagtcgtcgggccatctacctaggcgtccgtgggtgtctcgccaacctttttccgtggtaagacgatatggtctactagaccaaatgctttggcctcttcgggtgtcaagaatgtatctcgctcgagcgctttttctatcatccgtttggtattcacacaaaacagattcaggcaaattcatcatcaagaggaatgaacaagaatggaccaagacgaaccaaatcgtttcaagacttcggcttcggattcaccctcgagtgtacagtgctgtcgatatatttgtgtaagtcttgagcgcgttttaagaatctctctggcgcggatggctagatctgaagcttggccttgtgcccccccggatggttcttacaaacgacagacgatagtaacaaagtcaacaagatctgtaatacttgactgatgacgggacaggagatcacgaacgatgaatcatcactcttgcatggggaaggatgtatcgatggccctttgcacctatcggcaggattttaataaatcaaatccaagattaattcaatcgaaaacactgtggatggagaagatgaagagcgagaagaagcacctcctgctagtaacaaggaacccatagaagccgcttggcccgtacaaaagcagtgcacgtccggggagatatgctgttgcaaaagacatagcatatagagttactcaatgtgaatctctcatcggagggatacatgatcagaacgaaggcgggaacagcccagaagattgcgttacctgcatctatatggttgaagaaactggcagttctcaataacagtgccttcaagactgcatcaacgaaagcaacgagttggacgaacggtgtcatatatagccaaacctgaggagaccaccccccctggactggagatatacatccgaataggtgctaccggatcgactgcttcaagatacaaaagcgaagcaacgatgatggtagacatagcgtcatggacctataaatcaaatatacgattgatagatatattccatcttgattcaggttcaatgtctactcccaagagccggatggaatgatgggaaacgacgtacaggcccaacagagattactcgttctttcagcaggcgagagtaaatatcggtttggtagtttccgcctcctctcgtctgattacaatcgttttaattcaaaccatgggtaaaggaggagcgtgagttagggtaccatatatcggtcagcaaagtgtatacatacgtgatcttgaacataaggtacatgggcgtaaccccttttagacatagcgataggcgaaacatttgaggttgatcggatatatcgccccgtcggtaatgatgttgacattgttattgaagaatatggagcaggatcatggcgtagattagtgttggaaagaagtaaacttcttctcgaaggcgatcgagaagggaaagcccaggtagaacatgttgctctacggagtgtgttggaagaagacatggggtttgatgggagatcacttggatcgcaactcgtcatacatcaacatcagtgggcgtcgaatttattcattacttcgtgttacactcagggctcgcgtggtatgaaacacaaatgacaaaggtcattgaaacatccatttatgaggttaacaagacacataaaaagagggtagagagaaatcaatggagctgggaaagtaaacactgttgaagaaagaggataaaagaatgaattatgaaatgcccctagttcgaaagaaagttgcgaaaatcagaatgaaagggtaagttgtatacaggaagagatgatgtcgtcgtcgtaatcattagggaacaaaagggaaggttgtctacacggttatgaactagaggaaagtagacagaggatgtcgcttttgtagaaaggagcagcatcgtctaaccagcagcttgcatcgcgaaccttcgaatatgagggatattgaggtaacctaaagagcaatcaaaaaatgttgctgccagtcagcatccagcatacccttgtaaatcattctaaagattgaatgaaggaacttactgggtacgaaagtttccagatactcgatgtctctcggcgcaggtaattcatacgggcctgcttcttcagtctcagaaggaaggagcaagtgatcacttcgatcgttcgcagagattcgggaagcgacggctcgaagaatctcagagggtattggtgtctaatatcaatgatgtaagatgagattcaatcacagatgaacggcatgcatactccgcaacaacaggcgcttgagttgcagacgatgatgaaagatgagaaaaacttacttcatagtcggcaacatggtactgagtgatgagcttctgaatttgtgtaggcgtcagcatccagcacacatcactgaagaggaaagagtgaatgaaaccgaaacagtatcataggaatcagcatggtgtcacataaatcgcagggggtgatgcagaacgtactaaatgatgtcaatatctgcttgggtacccttcttgagttgaagaagtttggtagcttgcatgagatgctctaactgaagaacaccttcaggcatatcgtgggacttgcacctgacgtcacagaacaaaagtggatccagatattagcttgagttattctcagtatttggcgaatatatcaaacacaccattcttccagacgggtgatgttgtactgtatctgcatggctcgcttccatgagctgaagtttctcctcatcaacaaatcgttgaaagccgtgacaccaatcaatttaaggatctctgcaacaacctgttgagtaacggaatcctccatgtggtatcctttgagcgctttccagattttgttgaggatgttgagaatgtcgtccatgctgaaggcagggccagaacttccttggatcaaccggttgaataatcggccgccaccttcgttggtcatgaaaccggggagagattggctttcaatcaacgcgggaacaaccatctttgtcaacttcttctttgtctccgcaatccaggtgtgatagatgttgtactctagactgtctaagtcgtgtttaaccacttgaacaagtcgctcataatcctcccactcgaatggtcgtccaatcccatcgtcttggcctggtccaattccttggccgatatcgtgttctgccacgcaaacaaaggaaagtagttcatgaacgttcgacagccagaagattccaggaataatggcatcctcgttttggaaactctgttttggaaaaagggtcaagtagatatttaagcaatgacagttagttatgttcaatggttgtcgggttcaatgaagaaaagattgactacacaccatgacgtgctgttggatggtttgcatcacattagctaagaaacgctcactctctggaatcaaaccgaacttccacatctcgttcgtaaccaacccgatgagatgggccgggaagacaacttccttatgcgtcggaatgctctgcaatgtgggaaccggaatcttgagggccttgatgagcccagtaagcacatcttcgtctaggtgctctgcatcttccagcattcgcatgatttgttcattcggatcgtcatatccgattggcatgccactcgaatctttcagccaggacaccgcgtccggcgcgaaaacagcgacagaagcggatcggttttgagcattctgtgccttcctggcgtcgtacatgttttgatcgtcagggtctctagtacgaccagtatcaatggcgagcccagccgagtgtcttctgttgtgagacttagatgggcgctgctccatgggtgcgctgatgtcggtcggcccattctccaatgcacgaagcccgttcgaaagattgggtgatgtgggaggaggagcattccgactgaggacggcaagcgcgttagctcggttgagagattctcgtagaccagcaatctctgatcgaagacttccaagtgtggtggcatcgtctgctgctcgggcggtggcttgttccagaagagcttgtcgttcgtccaacagcttcgtctgagacacaatctgttctccaagagaggcaaccattgcctctcgctccttgatcgtcttaagggtttcgccaaggcgggcgtccgtcgagtcctttgctcgctgtagctcttcgaatcgagcctgggggacggtaggtttctgcagctcggtgtgcagctcggttgcgcgagctgaggcttcctcgtgcttccccgtccagactgcctgggcttcctccaagtctttgatctgagcctgcagttttttcttctctccctctcgcttttggagtgcctgtgtaagctcgaccactttgttctccaatttgtaagaaatctctttgaactttgtagccgatcgagcctcgactttgagcttctggagttctcggcgagccatgcgccttcggatacaagactgcaagtgaatgacgcttcgaatttcctgttcgtaacgtttgcggaggagtctagaaagcaatttgaatgaaaggattaaagtgagaaaatagtatcaaagagaaacgatttctcagaagcaagatagagaaacaagacatacaatcctttgcaaagacgctgaagatttgtggccgagagttgtaggcgctgttccttgtacgcccggcgagactgaaaaccccgcacaactaaagcaagaaagaattaattgaccaatagacgctcgtgcacgcggagatgaagagtgatacgatgagcttaggtgtcagatacataccactctggattttgacagccgcggctttcgattgtctatactgttgtctttgcaagaaccctctaccgactctctggatcttcacagctgcagtctctctcctcaaggtttccacctgtttcctggcctggacacctcgccaccaggcctgaattctcaccgtggacgtcttcagggccttgtatcgattagccgccactcgacgacgaagattcttttgaacaagcgtgaccagcgcattgagtcgctctgcccggagagcttcgaggtaggcaagcatgcctgctcggaagaagattttggtaagaccgacttggtacttgtcttcctccttaatggtatcatcaagaatgagtgagcacacatctttgagctccttctgccagtgctctgagcgaatgagcatatagtacctatttataatggagggaaagaatgtacttcggcagttaacaacgtgacaactttcgacaccagactatacaaaattgaaacctacctctccgcaaaatcatcaaacgcccatcgactagggtatcctgcacaactaattcggatcgtctccaatacaccacacgccctcaattggcctaaaacttgagttgcgtcccactcccaggctgccttcttttcgtttggcttgatgcaccggatgtagtgcacgtttgtcttgctaattgtatccatcaacgagattaacgatcccttgaagattgagccgagcgttggttttcgtccgcctggcttcttcgacaccgttagggcggtctgaggggcagccatagatgcaagcgcaggcgatcgacctgccgaatgcgaggaggataagatcgatgaccgcttattgattgccgaaggtatctcaggagcaacaggagcggcggcgacagctgaagccgacgttggtgggttcagaaccgcgtctaaggcttccttgaggaacgtgtttgttgtgttctgaagaagtgccagatgttcatccggcacagtatccctgttcttctcgatgaatccctcagcctcatattcaacatcgacagcgtaatgtgcgacggtgaaggagcttccgccaaatcgaggttttttgaagatcttcttgttgtccggcacatcgagttgtttgtaaagtttctgaacaaatgaggcgtccgcgccagatggtagtcgagactcttcatctaacagggaaagaattccgagcttgccctcgataacatcgatacaaggctggttgtcggagaagtcgataaatgtccagttgatcttctctcgaacgtattcttcttgctctagcttgaacacgtgagcgttgaactggatgaagataggtaaacgaagtgaagaaagggatcaattggaggtcaaagccactcaatcgaatgagacaataacagactaacctgttgttgaactgcacaagttaaagctcaaacaagtgaagtcatgatctgttctatattcacaagatgaagcagatcaaacagactcacgcttctcattagcataattgatgaagaactgttcaagcgagtttttcttgaagtgttcaaagccgtctgataaatataccaaaaagagattcacatcagttcaggctcatccctgtctcctacactaccctggaaaatcagtctcgatgtgagaaactgacatatatctaatactccgatgaacttctcggccaccagggccgccgtacctccctctcccatcaggctctcgttgaccaccgcgacgagatattcccagatgcaagcatacacaaacttggcaaccgaatccctgacaacagttgcacctggtccggagagtgagctaacaatcttttcactccgggtaaccaattgctttttgaccgtccactttctaaattcgtccttgggcacaccgagtaatgtcgtggcaaacgcgagtgaggtatcgtcgtctgaaatcatcgcatccgttcgagattgagtaatctgaatgtttcccaaatggagtagtgcagcgaggagtcggaagatctgccattgtttctcgacagagacaccgacggtagagagtgctttctgagtaattccaaactctacagcgtcgtccactccaggaatcactgcagatttagatccgccttgggagagatagttaaacttatgtgggtctatatcaagcccaagatctttgcgctctttagcgggcgcacccgcacaaagctggtaaaagatgtggtaatttcgctcagattcaggttggtatacaattcgagatctctcaagtaggtaggttcggatccgagctcccacgatttcctgatctttgtcaaacaagatctaagatgcaaacaggttcaaattcaaatcaggccgtatgtcacgtgatagtttgatagatacagaagagaatggtttacgaacttccatgtattttccgaatctcgaactgttgtcatttctggtggttttggcatttccaaaagcctccatgattgggttcgtcgcaagcatttgtctctcaacctcggacatgccagcatcctcggcactgggacttgagttagtcgtagccttctgcctctgtcgacgaaccggccgtgttggatcgtctactgaagcaaagtatcgaagaatatacttggcggatacggttttacctgctccactgtttgttgatgtattactcagatcatcagaattggtttttggtttgccagtgacacgttctcgaagcaaccggataagtaacaagagaggacagacctttctccgctgacaacgatggtctggtcggccgtacctccaacttctccaccagcagtctgccctcgtctcatgcaatctaacgcctcttcagctatggcaaacctgaagtatggcaaccgagcaacgatacaaacattgagtcaaccgaactacatatgttttttttactgcaaagacctaggcacgaacagatgtggttccagctctccttttcgtcgtccggagtagctttgaatcatgtcctgtccatctaatgagtttcaaattcaagtaagagtatgctcagtatacaaataatctttacaatcaattactagctttgggatgaaaacagagtaaaaaagaacgaacagatttgaagtggatagaagggattgatggcaatcagaacaattctatggttcactcgaatagaaacaatatcaggtctggtacacttgatcctcgaaatcacaaacgctatctgaaagacctacccagagtaagtatatggtaggtgtaagtggtatctagtcgagatcgcgtgtaacactaagtcgaacaaatgagggtagacaccagatcagctcggatctacactatgattcttgcttggctgcccaaagagcaatctggtcggaggccaggaaaacgattctcaccagatggctcgttcagattgctcaagtttgccagatcctcttgattttctaataacggtgggtttctcaatggcggcagaccctcgcttgacaggagggaggcttctgaacttgcgttcaccgttgattcctatgataattcgtgaagttagacgtagacaagatttttcgtcagtttgtaagtcctccgttcgatcagcccataagcgcagaaggcgcataaatgcgtgcatgcccgcatgtcccgagcgaatgaatcaacgagacagtgtcgaattgcgtaccttgcctttctcatcaacgaagctgagaacgatctggccggcctcattagtttctttactagtgacctgtccagaaatccagcctagctccttgtcagggaacctgaggagtcaagcacgaacagagacgggacccgaaaaggttgggggacaagtaaatgtttaatattgagcagcgcaaagactaggtcgtttgacggtcgtggccacgatcaagagctacttgacaacagaacgaaggccaaatcacgcaccatactttggttcctttcgtgtacgacatgagctttgaagttcgaaaggaggacgaagggttgttcggctaaaagtgccctgatggacagaggtaagatggagagagaaaggatgaggtgatgtgaatgagaggagagtgaggagatcgccaggatcggggtcggagagacagagaaagacaaagagagaaagaaagaaggagaaactagtctcaggtaagttcctgaagaactaagagagtgtttgtctgtctgtctgtctgtctttcagacgatggttggggaagaaggaaagagaggaagaaagaggttgatcaggatggcaaacaaggagacaaacagccaaacagcctcgaccttatataaataagggtaatagattgatagctgaaaacacgtcttatatatgagataacacgtaacaacctggtgtaaccgcgtaattcgatcatggactgtcttcttcttttaccgtctgacgattcttccgtgaccctccaacatccattgtatttcgagagcagccaactttgtgagtggtctctctctttcgatgtttctatacgccgattgcccagtttgagaggcgatccagctatcaatgcttgacaaacagatctgggccatcagacatactactcttttgctgagccgaggcttaaagaacaaagggcggctctggtgatgatgagatttccatcttggatcaagttccgcttccttgacaaaaaatccttctcattcatcccttcttgacctcactccctacatcgatctttgtgcactcgtttcatagcagaaatctctatctcttctttgctctattgtctttttccgcacacatacatgttgaccgttccatcccctttgtttttcgtcttctcccctttctttgcctttccttaccccacttaccgcttatccagatatcaatcatcataagtacaatgtccgccaagaccaagaccgagggagagtccaagaagatcactctcgagaccgccgacaaggaagagttcctcgttgacaaagaggtcgccgagcgatcgatcatgttgaagaacatgcttgaaggttcggccatcttctctgctctttgaattttgttcctcgccatcttgcatcttcttttttttttaatgaagagccggaaactttgaacgtaatatgcttatccttggactttactaattacagatgtgggagaatctgatatggccattcctctgccaaatgtcaccgccaatgtgcttaagaaggtacgttatctttccacctttgcttcgtatatcttgaaagcatgtacccatatcagcctttggttccacatcaaatgaatttgcctcttcataggtcctcgagtactgcgagcatcaccgaaatgaccctcttcctactgccacggatgagaatactgacgagaacagaaggcgagtagccgacattcaagactgggatgcaaagtttatctctgtaagtccatcacatcaattctttaagctcgatctttcggatcatcatctgcccgcccagcccgcctccattttcatcatcatcatttttaaaaagcggagcaaagaggaaaactgacttgttgctatgtgtacgttcttttcgttgctcaggttgaccaggaaatgttgttcgagatcatcttggctgctaactaccttgacatcaaaccccttttgttagtcggatcgcatttttctgtctaccaattcttggtcaggagctaatagtgttgtatgcctcgatattctcgccatcgttttgttttcaatcgcctgtagggatgtcggatgcaagactgtggccaacatgatcaagggaaagacacccgatgaggtacggccgtttcctttgcatgatgtgccttcaatcttcagcagccccgcagaatatgttcttatcctcttcgttgtccaaacgaaaaaaaaaaattataacagatccgaaagttattcaacatccagaacgactttactcccgaggaggaggagcaaattaaacgagagaatgagtgggccgaggaccggtagtcgtttggactttctctatgatacctctccttcttttgcactgccttctttccctcatgtgtcccattccgctcgtctactcccttccttcgttatctctgattgtacaatttgaccacttcttacaacctacttctgctacatggtgcgttgcctttctctctctcttcagccactttcaactggccggccacatgagaccatgcgaactaatcagttggtcttgatctcctttcggcgtcatagacgttctgcattcccctcctttccttctctttgtttcgtctcattttcgttgtctaaaccccggtcctttgtttttaactctttccgatcaaaaggtctgtttttctccgtatgtcgctgttgagtagggcaaaattgaaaagttttcgaagagaggagattaggaagagaaatatgtttatgaggagaagtttggaatagaaagccattctctaaaatgcactctgcggcaagaatatgatcaatttgcttcacgtgcgaagatggtgatttggatttgagctccgttggtctcgtccataatcacactgatttaacgatcatctggctcatcagattgaagtgcacccagcatcaagtcaggctctgcaggacgggaaaacaaatggttttgatatattgattcattagcaagtagaaaaatccatccctcttcagatcgaaatcggagccggagccttgacatcctccttgtcctccgtcaccggggtagttgccgactgtttcctgacaaactctcctttcccttccggtccgtcgacccactggaaaacagaatcttccctttcctgttctttcacaccccagaaaactcgttcccttcctcgcttgatttcgtctctgggcaaactctcatcccttcgaagagtgattccgatgtatcgtcggtagttcttcggtcgattcgtatccatgatcggcacggaagatcggggcggccgacggttggcgatgtttggcgaaacttggacattctgcttcttgtaaggaagtgagtagaacttgaggtagccgggcgagagagcaaacaacgtatggtctctacccattccgacctgaaatgtttgcgtgagaaccggaagagagtcagcagaggagaaaacatgtttccgaatatatatata

SEQ ID NO: 1441 - DNA, 784 bp, Xanthophyllomyces dendrorhous
tatatatatatatgagcatatgacaaaagcggcataaaagcagagaaggagaaaggatatcgagcgagaaaacgtacgtgttgaccaggatggaatttagttcctcgttgacgaatgatgatatctcccggctgaacgagctcatctgaagtgtgcccagaccaaagccggatggaaatcaacacgaggaacgaacaaaaccataaatagtcgtcaggagatatggatcttcaaagtttcagatatatgcagaagaagcaggcagacaagaaaaagattgaacgagaacgtacttccgaactttttgacacctagacgttttccaatggatcctcgattattcttggtagatcctccacccttcttagtggcctgccaaagaggagacgtcgaaaaggatcgtaacgatgagttgaactgattgagtggcctaagaagagccgagggagatgcgaaaagagagaacatggtatggtccagaggtgatggatgttcagaaccggataatgaccgtgggtgataaaggcacaagacttttttccttatggactacgaaagaaggtggacgggtagggttatgaaagtatagaaaagtataatggttttttctattcgcttcattacactcatttcataatagatatcacacagcctccatctaattatcgctcccttttctttttcatcatccgcattccagatccacactccacgttccacacaatccacacacacacacacacacacacacacatatactcacatatactcacacatttacctc

SEQ ID NO: 1442 - DNA, 27500 bp, Xanthophyllomyces dendrorhous
ggctcctcgcttcccgctccacttcttcatacttctctggcagcaacaatattcgcatgtgttacttcattttggagtatctatctccatctcaagggatataggcgacctggtcttcaaaggttcgtctaattgtctctagcacggtcatcaaccttcttccgtttgttcttgcaatctttcaataaccgttgttcttctaaatattggtccgatcatttgctgccactcttgcatatgtctatctagactagtcgtccgtatcatgttgatgtgcgtgctcggctgcctatgacgtcgcgtttatcaggataaggggctcacccgcaatcttttcgtcctcgcttttcttccacaaacacttcaggatccccatctatgcaattgcttctctggtatcacttcattcggtcgaggcagctttttggattgatgcagtccgagatctctatgaggtacgcgtcatcggccttgctcctggacagatagaaacgttttctaacaccttttcacaaaatttcctcgcttctgatcttgtccctgttggcctgatgacgctttgatctaaccaggcttttgttatatatactttcttgtgcgcgagcgacaaatctcatgttcatcttgtcgacgtgctcacttgtcttgtgaatggtgtttctctccttccttcagctccttactggtgacctaccttggtggagagcgctcgcttctgatcctcgtccacggccggccgtcaacacctcatccgtggcctgtaggaatgttctatcatgagatggacctctcagatccatataccttcctgggtctcaagcgaggaattcttcgtaagtttcctgttctcaagtcttgaccgtcgacatttcggtcggcgccgcagctctggatttgtctttccgcacgaatctgactgagacgatgttcatctctttgatccgaactagaatacgtttacgtgaaaccattgttggcattggtcacaatggtactcaagtacacggaaaactattcggatggtcaactcgggttcaacacgggatatacatatgtttcgattgtatacaatctaagtatctgtctgtctctctagtaagtctgtttcttgatgaaaatgagcgatttagtcagatgcgtattgcttacggctgttgtcgaatgttgtagctgcttagcaatgttctgggtatctattcatcatgagtgagtaaggtcttgattgtatacgtgtaaacgctagctaacaaggcttgatgtgaacagtgttcaaccctttcggcctactcccaaattcctttgtgtcaaagggattctatttttctcgttctggcaaggtatcggagtctctatcctcgtcgcttcgggcgcaatccaacatcttggcccatacacagatcatgaggtacctttctcgacaactgtcttcttctgcatccacgatgagacttcatactgatccatgttttcggtcaaatcatcaaagcatatgtctcttgcgcttggagacgtgttgatctgcctggaaatgccaatcttcgcaatcgcacacacctatgcattttgccggctgagcgactatggtcagtatcatcttgtctcttcttactctttgatttcccatatatcctcttgaaggtggcgttgccttcttcgtttttctcactttgtctacgattcaaatttacccaaccagttgatccgtccctgcattatgttgctcgattgccgttcatcctcgccttgagagatagtgtaggagttttggacctcgtttcagacttcagagcaacttggggtggcaaaggaatgacatatcgatcatttgagcctgttgagggtggattacacaccctcggcagagctagagagaggcgaatcagagctggtttaagatatcaaggtggagggaaaagtggtcagttcgttttcccctctctctttcgctaccgaagtagctgctgatgagctgctttatgacgatatatctagggaaaaaatactggctacctgttcctaaagaagaaggtatactaggtttctctcaaccaaattatggtgctttaggcacgacctcacctacaggccatcactctcacggcattccgaccaagggagtatacaacaaggcgactggtcatggcccccattctttaggctttcggtcacctcctcatcctcccgcctcatcttctactcagggagattactttgctcgaagtcgacaagatggttccgcttcacacggaagacattccccgatagaggatgactctgacgatgactctgtagtctcactttcgttttcctccatcgcatcctcgccttcgggaactccttctgaaggaatccaaggtcagcgtcaacgtcaaggatcagaggaggagtcgcaagaggcgctctatgcggaggcaagaggttacctccatggcgactggagttatcgtgtgatcgatgtgagtaaagaggatgctagaagacggatgagggaagaagaagataatgtcctggccggatttggtaggcggggagaaggaagaagacaaggggaacgatggggtcgaggtttaaccaggggtgtcaatgacaaggacaaaaacaaatcatcagaaagaaaaatctatggcgcttttggtggcggtgatgagagactaggtgcgtgccatgtgatgctttcttttcatccccttttttgttccgaatgctgaggttgacttttgacgcccgtatcgcttcgcatatgatggccctcacgtttgtttccatcagcgacagacatctatgccccgcttcctccgtctaggtctccgtccgatctgccaatgacctcatctgctgctcctatccgacacggtcaaagtggtcctcaagcttctcactcaacggaaacaagcgagtctccaccatccccgacgtttctcccagaggaccatcccgtacggattctttggactaagcagaagggtaaagctaaggaagttgcatcccatttattggaggctgcccatcagatcgtaccagcaacggaactcgagttcacccctgcggttgaacggactgaaccatcctggttgaaacttcccataggtggcggtggcggaggctcgcgctctgcatcaccaaccaacgagaaaccattaccgagcgacgctattgatcttgtagttgaggccgaggtagattcgtcagaagaagaaagttggaacaaggagcggaagagggaggcgaaggagtcgcttagacaggctgggtgggttgatagggagagagaacagggtaagatcgtcatggagagcgaacaaagtgatggtagagtagaggccgagtacgtttacctcttttctatcttttgtcgtctttaatcaaatatatatcatctgctactgtaaatctgaccgagttatgcacctgtatttggaaacccaccagaacgacaacggagccaccgcttcttcatatatcccctccgacgtcaccaccaatgtttggcggtgacgcaccgatcaatcatgacatctccccttcaaatctcctccctcatcaaacctcacccactcgaaaatcattccgatcaggtaactcggacgctggatctccatggacagacgagcgaggttcggaaaacggctcgggccatgttaggcagggcacagatgatgagcggaacccatgggcttagccagtagcatgtgtacatatgtgtatggccttgtaggaatataaacggattatcagtcattccttgtgttggcgatatactttttacttgattcgcgcatatcatcattttagcatgcgtcttgttcgatatctctgtcctctatactctttctctcttctttctgcttcttgcattcagctggtagtcataggcgtgggtgatgtgcatcggatgaagattacgtaattcatatataccttaggtatcttttcttttcgaaggctgcaatgaaaaaagagagaacggttttttttacttctccttcactcgaaaacctcgttcttcactctcttcaccttacttacttctcacttgtctataatcatcatggatcaggccaaacttgctcgacttcaggctgctgtcaagatcggttcgttcttcattctccttattatatctttactagaattcagacaaaaattagaggaaagcggatcgtaattgcaggagagcgttcggggtgattgatagcttggttcaagaaggtgatggtatttatatcagtagtcatcccaagaagattcaagatgaagctcttgacgtttgtatcctagtgctttgaaaaatagagagcataagatcaggataaatgaaggcgaatgtgcatcagatcgcatcataaacttcatccccatcactccgaccatcttcctgttctatggccttctctgcctcatcaccaaaccccatcgttgttccaatcaagaattgaaggagattattcatgctctgttcactaatcagtgtctctttcattctaatatccatttatccttctgtgaatcaatttgctttctgctgggctgcgcctgtcatttccggtacgctttaataggaggaaagggtacgccccgacgaaaggttatcaagaagtctgcttcttcttcccaggccgatgatgtcaagctccacaacgctttgaagaagcttcaggttgccaccatcggacccgttgatgaggtgagtttcgcttctatgcatttagtcaaccggttaggttatatcgacaagctagagactcacctgttcttttcgtctataatgcgatgcaggtcaacatgttccagggtgaggttttagacctaacgttttgaaagtagaatacagatcaagttgcttaatgatttgttccgggtttatgatctccttgtttcttacagaggacggaaaggtccttcacttccagactcctcagggtgcgtttgctattttttttcttctttttcttcttttttcttcaacgaacaccgtttgttctcgattgtttcgtatgctgattctagctctgaatatcacactctactatcgatagttcacgctgctcttccttccaacaccaccgtcgtgtacggtgtgggtaagcccaaggagatcactgagcttctccccaacattctttcccagctcggacctgagagcttgcgaaagttggccgacagctatcagcagatcatggagcagaggaagcagatggagggggctgatggttcgtcccttgtattctcatcacccacattggaagaagcaagaagtaaagagaaagagagaagctaaacagtccgacgtgtttaactatagccgagaaggccgaggatgagggtgtcccctcccaggtcgagtctttcgaggttgaggacgaggctaacaagctcgacgagcttagtacgttctatccttttccatatatccctttttaatcttctcagactttgatctgagcggtggtagggcaaactttggataaacaagctgattttattcgacctgaaaccaattttcacccaaatctttcgatagactaagcgccaacttctcacagattcctctgcttgtctaacatggagaggagatcttgataaattggaaattgatgcttaaaaaaaagggaaaagaacaatgaagtcgaacgaagttggcgaaaagaagtgaaaatctggacgagtgtacctagtgcaaaaagcatggtgagagttgcctcaaccgacggtggttgatatatggcccttttggacttgggtgccctcagaccacgaaccaccacatctccataagtcatggggttggtatgtgccagcctcaacctcagtggctagcgtagcagcagcggtgtcagataccagcattcttgctccttcgttctcctcctggtgaaggtcaaggtgcagcatgttgcgtgacgcgttcacatctctgttccaccaagtctgaaagcaagcatagagcgcagagaataaagagaaaacaatgagttcttgacactatcctaagacacacattacacatccaacagacatccaacacaggtgacttactcgacagatgcttcgacactccttgatcgcccacgctttgttccttccagagaactcgccatggcacttggagcacaccctcgacgtccgatactcccggactttgtggacctgaagcgacggaaaggccttcagcttggcatacagcatctgacaggaccaggagtatgcccacgagaagtcgacgagaaggcgccgtcgccgaaggccaggaaggtgcgtggacgtcctactgacaagggagatgccagccttggtccggaagtacaggcgcattatcgacgacagatctgggataggagctccatctgtgcacagtgccaatacgtgcaaattcatcaatccggatgcgtcgaatgttatctttcctagccgagcaactgcagactcgatcgggttggcaaatgttcgacggggtgtatggagccgaaaatgatcttaaccatttgtgacaccaaagggtgaagatccgcgctgactcgtcggaccctctgatgtcacggacggtaaagatcggtttcagctcatactcaccgttaatcctttgtcggcccaatcgagtctacagttgcgcagctgagaacatattgactgaggcctgagccgtcctcttacgcttcatatcgaacacaagaggagcggcattcctcaaggcaactgataagtgttctcatatgaaggggtgttctgatatggaagagcgctcaaatcatctcgagttcgttgtgtctcataagctgttgggattgatgtctgcttctttgcatgaaatcccctttgatcggttcggctggccgtcggtcatggtgaacgacctggtaaaggctttaccgtccacagacaaagacatgaattacagaggtatagcatgacagagaaatataaagacaaaaatacagacaaagaccaagacgaagaaacaaagagacaaagagacaaagagacaaagacaaagagacagagaatatatgcttgatcgagccaagtgtagctaatctcagcggtattcacccagacatccggtgtcagttatacaacatgaatttcagtgtagccgggtcgaccaacgctcttgcgatcgttctcaatctctaatgtatataggcttagctcgacgcacacttgaacacttggtttgatagattttgttctttctgagtcgaattcgctagctcgaatataccgagtgttgtagattaagataaaccagacattcatagaagaaagaaggcatagccgacactatagatcagaatctaaatcttccgaagtaagaccagatataagaaggattcaacggagacaaacgtcggtcaagtctcctgccgagcctcactcaaaaattccccaactttttcctccttctccgacggattctctgcagcgcgctgcaagaatccgtcaagttcttcttcttcttgtttgaacgcagtagcagggttcgtcggtaaggtgtcccggttcgaagaccggatcggtcgagcggcttggaagagagcaatttcattagagagcagagaagccaggtccgcctggagagcagatagtgcttctgggatcgtgagtgatcttaatgcacatgcgtggcgagaaagttcaaaccataaaatgtaagcaaatgtttttctgttctttcaggcgagaggatgccacgcatatagagagggcatgaaacgaacgactggagatgaacgtagagcctatatgaagcgaatgtgaagatcaaagacgacatcaccaggcccgtcaaggtcatcataaataaaattgtcggaacgaaaaaaagagctgggtggcgcaaggtacaatatcatgatggaccagtcatcagatcaggtttagtttctcaaaacatcctcgaagtattttcctgtcaaagagggaagagacttacatcctacgaaaatcgaacccagcacgactgaagagacgatcatcatcgatcctacaatcactgtcatcgctatggttgccacgaatgatctatacatcgacacagggagaggatgtacaagaaatcaaatcagatcaaattggtagttcttcatcattgtgatcatcggctttgtcgacgatgaacttgaggaacgaaacacgaaggacttattggacacacttacaagaaagtgattatcgggacaaaagacaaaatgaggaacaatacgagcgccgtctgcattcaccaaccgatccatcgaaattgatgagccaaagaagagaagacgtcccttctatcagctcggacctgatgcaggaacaaatgtactcagaaaaggcaaaggaacgaacggccgagacagggtaagtctttccaaatccaactcctctctccttagtaggtacccaaatgcttctttctgctctgtaatattaaagcaatccagaaaagaacaaggacgaaaagaggaacgtggagtggtcagattgacgttaagttagatagggcgaaccatgatcactgactggtgggcttttgactgggcgatcttgatagaggacccaattctttcttgaatgatggacggaatggatgtcattgtttttggcttctgattccttccctacttctgtctctctcgggatgatgcgagaaagagaaaggattgaagaagacaacaaagtcaagatcgagaaggacacgagcacagacaaaacgcacctgcttacgtcaccatgcacatcgaacatttcgaggcgacatttaaaacaaaaatcatggtgagagtgacctcaaccgacggtggttgatatatggcccttttggacttgggtgccctcagaccacgaaccaccacatctccataagtcatggggttggtatgtgccagcctcaacctcagtggctatcgcactagcggcagctatgtcagataccagcactactgatgagtgttgtgatatgggaaattgctctcatcaccccaacttctttgggttttctcagctgctgatgttaattgctccttctttgcaggaacctggtttggtcggttcgatttgctgtcggtcattgcggataaactaaagaaggactcgaatgacggctctgttgttcatagacagaggcgcgaacagacaaagaaatcattagacaaacatgtacatcctttcacgaccatggttacatagtcagccttcatcaggcatgcccaaaatccggctggagctcgatcttatttttgtcccagcctgccatcccatgcttaccaagcccaagccagaagcgatctcctctgctcacccctctgaggacaccattgatttccgccttcttatcagcctttcctcgggcttccagagcgggatcccaccagccgaacgtcgatcggaacataacataggacaggacggacactgccgacgcgatcaatttgaaaaataataccaagggtgtgaggaagggaagaataaggttggtaatgccctgagaatgataattagacgaaagagcgcgtcaggtcagattctatttctagtcccctttcttctttttaattttcttctatttttattttcatttggcaagggtgaccaaatgaacagaacgaaatcgccacaaacctctggctggtagaaatcagtctgagacgaaatataatataatttggaagtctctgatgtgattccttgctctagtgtaagacgaacgactaggctgtgaaggggtctctctgttgagcaaatatattcctacgaatgcaggagctgatcgacaaaaggaaacggtcttcacctggctggcgcgggcttccagggaaacacaaacacatggaatacttgagtgagttcgacataggctgtgcccgacggtttgtcccacactaaggggcaatgagtctatggtcagtcgctgttgtgagaagtcatggctaaattgaagagtaaacaacggagagacacaaaccgacattcccgacatcggccttgatgaacggactgaggattcgataccagccgtaaactccgattatcaaatccctcgagttgtgcccactcttgacccggcaaagcggatgattaaacgacgcgtcgggcgtaaagactgaccggatggaattctgttgacgcgtaggggaggatgaatgggtgagcgcatggatgagatccggcaaatcttcggcagggtctgagacggtgacggcgaaggacgaagaacggtgggaaagagagaaaatcaaccgggcaacgggttccgaagatgagacagagatggttcattagttccgagagcacacctcaactcatacttgaatttctcaccttgcattagataatgtggatgatctacaaggcaggagaaaaatattagagaaggactgaaagatctgagaatagaaaacaactggattgctggaggcgaatgattgaatggtcggatgagagaaaggggcaggtgagaatgtggatgacgtcggaggagtccgacagcagttacaataatggactagtctgttttatttcttttgtctacctcatcgtcgcttccctgttcagctcgttgtctcttttcttcgttctttctgtttactaacccacttgacgttgttctcttgattcattatgtatttgtttcaggcagcttaatgacaaagatataaaactaacattactgatttcctgccaagaagactaaagaagtgaaatctgtaactcataatctaccccttctttcttaccatcgtccctttcatcatattattgctcgtcgtcagttggacgagcaacctttcttcggatcaacaagtctcatcaagtctcgggaatgatcaggctgagatcgaaccttgcccgtttcggttctcgttttccttcttcctaggtcctcgtttgatcgtataaaggacagagttgatgggatgcgttcggtttctttttacctttttcttcatcaaacctcctccgctttttcgctttttcgcttgttctcgtgcttctcatcgtgcctttcgctctccttctcgcgctttgctttctcttttgaccactctctcacagaattcatccgaccacactccttaagaagacactctttgctctcgttcattacaaactctttttctgaaccttcaccatcaccttcatcttcgtcatgctttcattgacttcaacatttatcaacctgacgctcgtcctgtcggctatcacgcccgctttggccacttggaataacaatggaaattggggtacatactatggcggcggtatctgcggagaaggtttttggaacgatgcttccttcaagtgagtttagttgctgtaacatatacatgatcaagccggctagcttcttattttggcgtttatctgtctcttgcgccctgttctctactctacagacgctgcacgccatatactccgccttctggtcagaactgtggcgataacaattggtgtgagttcatcattttattcctctacctcttccaaggactagcttgactcattatatctcatcacattcaactgaatagggtggggaggtggagagtaagcataatccatcctctgagcaagcattcttgatcctgatcaatctcttgttcatgtttgactcttgctttcattgactaccagcgcctgtggaagtaaaaacagatgtgtccccataaccgttccttcttctgtcgcacctccgcctgacagaaggaatcatctttgcccgtacgtatttctctttattactccgtctcatacgcttcaggatgctcaccagttctgcattcatgtttgacctgcttagtttcggatggacctggcgatcatggaatggcatcaaagtgttggttttttaaatttaatttaatcaaactatcgatctcagttctatcggtacagacacttatgtagactcaaacacctcatatcagctgctctcctcggtctcctgataccccgtcttgcggcggaaaaccaacttgtgctgatacccactcatggcatcgggaaacatcctgctgtgtccccaagacgagtcgatgggcccgggctttctctccagtaagtgttgaatgtcatttagctttgtctgatgggtctgtaaactaaagactctgacatacctattcctgcttctatgatgcccaaagactgctgccggtgaaaagaatgatgaactttgccctagtatgtctttgtgtctcgtatacgattgataagcaccgcattgatagatattgacaacgaactgcattttcttcacctactttagaccacctgacttcgtgccccatcgctggagcgtctaaagacgcatacgaatgcctcgacattcaggccgagtgagttttgtccttcgcatgctatagtcatcactatttgctcatcttcttgattgcttacgtctttcttctcgcctagacttgagtcatgtggaggttgcgtgtccatgggacaaggacaggatgtatgtattttattgattcattctagatgccgacagaattaacggctcaagtttgctggctacgcttccaatctcactagtgcacgaccgctattccccacgccaaatcagtcggatgcgaacaaggaaaatgcaaaggtaagtccagattaggagaagtcaataaagaaagaaatacgacatccgtcttcgtttgtttacttgagtttaatcggttattgcagtctactcatgcctgagcgggttctccttgtccaatggagagtgtgtctaaacatatctgtcagctgttggccgctattccctcttccctttccctttcccaatctccgattgctcgcttcgctccttaaatatacctgtttatggttgacactgaactgttgatatccatatacccttccttctttggacactagctgtttattgctttcatctctgttttttttacttaattctctgctttttgcttcgctatccgtatcttgtttcgcacattaccgcgctctccttttgtgatttatactgctttgacttttgatatatcattgtcctgctttgttctatcatatgcttccgcttatggacctgtgatctatttcgcccaaatcttctctatgtcacttagatatagctcataaccccgctcgattctatgcacgttctttttcagtgacatctctcttgatttcttggtttcttaaagacaaggctcattcctttggatcaatctgtgtaggatcgaattcgtcttgctacaaaaaagaaacaacagtttgttgcttacataattacagccagtgcgctatctcaaaacacgcaccacgcttaccagaatcacttacactcaccacaccacaactcactctatcttgaccctatgtcttcatccatctacgcttccgctccgttgaaagcatcaaaacgaaaccgagtgctgaacccggcagcaaacggcccttctggctcgagtcctcattcgggtggacctgccggccaatccagctcaccccatcatcaccaccagggtcgagcggacctgacggaggatcaacgacaagaaatcaaagaggctttcgacctgtttgatactgacaaggatggagcggtggactatcatgaattaaaagtggctatgcgcgccttgggatttgatttcaagaaagcggaggttctgagaatcttgcaggaggctgatagggctggagagggtatcatgcgatttgacgcgttcgagaagacaagtacgcgtttcctttcttctcgtttgggtttcgttcattcttctgttgtccggatgagcttctgagaggatggttagacgagaaaacatgagaggttgatgttatccaatggtaaaatcgagttcatccggctaacattttcctttctgcttttctctcttcagtgacggcacttctgctggccagagatccaaaggaagagattcatagagcattcaaattattcgatgacgacaacacaggcaagatttcgattcgaaacttgcgtcgggtggcaaaggagctaggcgaaggattagatgaggacgagttgtacgttcttctgttcttgttcttgttcttgtttttgccctttgttgtttctcgttcgtctttctgttccgcgcagaaaggatccatggatcaatctgacaagatgtttcgtgatcttggggtttccaacagacaagctatgatcgaagaatttgatttggaccaggacggagagatctcgttgcaagagtttatggccatcatgatggacgaggattaaatgaagattgatttgacctaatgtatctcatagtatacacctttcctatctttttgtgttatcatcagccatcatcgttccatacggtatagacatttcaccttccgatcaaacctctgaactataagaacgcttgatcgagtcggttggcagatacatgggttttgaatgatgtttatgttgcggatgatgagcagaacgaggtaaagaagaagagcagaaaataagaaacaaatctaaacaacaatcataatagtcaacttctttttcccccctagagttgatctgtcccatacgaccgtcatcccagcatactttgcaatcgattctcctctcctttcttctatcaacatcttgcctgttggtcttctcttctctgtcccgaatgccattagatcaggcctcccagcaggtcgtttcagcccttcaggctctccagtcgtcgactgatcgacaaagtcaacttcaggctaatgactggctcacctcatttcagcattccgtacgtctccttttcgctcgctccttcttttctggacaagccttgcctacatcttttctgccaactgtttcttctttcttcatctcaacctgacgtcttggcatttgttgtctgttggatatcattcctttgtcgatccttcaacggcccacgcctttgaggaccttgcagaaagatgcctggcaagtctgccacacgttgctcttctcggacgaagcgggtctagatgtcaagatgtttgccggtcagactttccgagcaaaggtaaagttgtttcagatcaatgtatattctatccagctagcctctaatgtgtcatattcggttctcgtgtttttttcttcttctttctctatcctttcctcttctttgaacttcatctctaggtcatctatgacatttccgaacttgatccgtcgtccactgctggccttcgaacttctcttctcaccgcgcttcgaacattctccgtcccgggatcccgtccggtgctcgtacaagtctgcttagctcttgcagatctggcagtacagatgatggagtgggagaatgttgtcagtggattgatcggagagctagggaaggacgttcagatggtgcccgccttattggagtttttgagagtcctcccagaggaggccggaaacccaaagatctcgataactgtcagtgtatcttcttcttttgcgcgtgagatatgaaccatcatgtggggtttgagctcagtatgggtgttttgtatttctgaaacgatgcatcgtatataatagagtgaggaaatgagtcagcgatgctcttatatactgagttcgagctcgcaagagactttacagctgctttccatgtacatcgaagcaccaggtgagtcacattctctgttatatatctctatgaccttcatttcgttcggatctctcaagttgtctcgttttgattttctttcactaggtgtggatgctaagactcagagcgcggtctttgaggtcctccgaagttggctagtagctggagagctcatggcttccgacatcactcagacccctctgttctctttcgcgtttcaagcgctcaactcgcccgccttgttcgatactgcggtcgaagttctagttgacttgatccacgaaacacaggaaatcgacgacaacttcacatccatccaacaaattgttcctcaggttatttctctcctcccacgattagacgagccatcgactcaggaagatccagaggtcatgcgcggtttctgtcgaatctttgtcgaagcgggagagacttatcgacctttgatcttgcaacatccagagaccttctttcctcttgttcgtgcaatcgcgacatgcgccgcctcgtcagaactagaaatcgtcaagatcacgttcaacttttggtacagactgtcccaatccttaggcaagcgtctatcggacgagttttctagaccgttcctcgagatctacagcggcctggtcgaggtcatcatcaaccaccttcacttcccacttgatccagacgagatgaacgctcaagaaagagacgaattccgttcgttcagacacactatgggagataccttgaaagactgttgccacgtccttggttctacggcttgtctcaaaagaagttgcgagatgattcaggctggattggaagcggcggccgcgaacccgtcatcttctaatacgacatggcaggcgatcgaagctccgttgttctcgctcagatcaatgggtgcagaggtggacccaacggacaacgaggccgtgccagttattatgggactgttgccttctctcccgaaccatccgaaagtcagatatgcggccatcttggtcatcggaaggtataccgagtggatcgactgccacccagaacatttgccgttcatgttgcagtacgtgagctctgggtttgaagatgcagataaagaggttgcagctgctgcagctcagtcgatgcgatacatgtgcaaggattgtaaacaggtcagtttgaacattcttcgttttataatttcttgtggtacagatctatctgatccgagtcttccctctgttgtatgatctgttgttcgatggttccatctctcgaaacagcacctcatcccatttttgcctcagcttcattccttcctcacaaccgtcggcccttcattgtctcaggaggacgtgattcaagtaactgaggccgttgccttcgtgctatctgagatgccagtggaagattcagcgaccgctttgggaactttcactatgcctctaatccaacagattcacgacgtcactcagagatcatctgtaggcaaagatgatctctacgccttggctggtgagttttctctctttccttctctgtagaagcgttcttaacgatgttgatctgctttttgcttgtggtatacagtgctcttggaacagctcgaaacgttcttgatggtccttcgtacatatggttcttcgctacctgctagttgtcattcgaccccagccgaagtctgggctatcctcgacgccttgctagtccggtttggatcggaattaatcgtgtctgaacgagtctgcgcgctacttcgtaggggaatcacctttttcggtcccgcagctcgagatatcgtaccggctatgctgaaccgaatgtctagttctttcgaatcaagtctcagaccaggttatctctggatcacgagcaagttgggaagcgcgttcatcttggaacctgggggaggtgtagatgaagaaatcgctgctgggttcatcgctgcttgggagaaggagacggaggtactggtgagatatttggagcagagtgtggtaacggagattcctgatggtaggcttcaacgattatctctttcttgttgttgatattgagctctcgttattgatgcccgagtgtcttgccttcctttcaaaaagtcatggacgacttcgtccatctcttactagaaatctcacctgccgtctcttcccagatctttacctctcgaatgttccccccgtcgttccatctcgcacttcaggcactcaccctacctgctcctcagatccttcactccactctcgagtactttgaggcccttctctcccatccagccattcaacctttgtcctcaagcacctctgcatctggccaatcgactccaacaggaacattcgacccatctaacccatcagctgcctcccaggccctctcttccaccttggctgatcaaggcccccgacttttagatgtcactcttaacggtcttgtcaccggttttccggaagatgcagtccacctgattgttgctgcgcttagagtcatggctgggttgttcccagaaaaacttattgagtgtctaccggctgttgttgagagattaccggcttccggtgtgccgtctgctgagaagcagacctttttgacaaagattggatcgtaagtctttctccactcgctttcgtcatttttctccgctttgttccacatcaatcttatatacgtgctaacttatgccttgtgctttgtctttccgtcatatcagtgctttatccactccaaatcctgatctggtgaaaccagccgtgctcggtttataccgtgcatctagacgaagtcgagaacgcctacgttcccacggtcgaatttctggagatcaagatgctgcttaggacgaagaagaaacgctgtttttacttcctggcttttcctttgttctctagatggattaatcagataatataacatcttctcttaaaatatcgaaaataaatttcttctgcttaagctcaagcttccggctcaacgcgttcggtttgatggttcacatgataagttgtacaggtccaaattgacatcgcgtcctaagaaagaagaataagacgaaaaaatctgatgcatatttcatacgagtgtatcaactacaagaagcccttcaagacctagatcttattcagtcctcctcttcgtcactctcgacgatcctgatctttcttatcaatcttcttcccacgggcttctccctcttctcgtcttcactatccttctcgtcctcttcatcttcttcctcattctcagcatttttgtcgtcttgctccaaactcgactcctttgcatcctcttcctcttcctcctcacttgaggctgtccgtcttgaccttgtccgctcagatactcggcctcgcctcttgctcccttttttggaatgggatcgatgtatcttctccgcctcttcttcctcttcttcctcctcttcttcttcctcttcttcgtcgtcctcttccctatccgaatcggagtcttcttcagaatcttcatccgcttcagaatcaatatacggacccgatcttgctcgtctgtcgtccaagctcagatcttcttcctcttcaccttcgtcatcatcaccatcaagagatgaatcttcactgtcgtcgcttaacggtcgctcttcgtcttcgtctttgtctcggtcgtcagaggcagtatcgtcgccgagggtttgcagagctcgatctcttcgatcgatagaccggttgatgtttcgagtgagtcgttccttgtgccaccacctggcttgtttaggatgtctggtcgatatgtgacaggagaaagtttagcttgaaaacgaagaagaacgaaaacaggggtgagaggactgactcgcgcaaacattgtcgaatgaacctcgagccatccacgtcatcttcctcgaggtcgatatctcgaatcctaaatcgaatttcatgaggttccccaggacgtcgactatctgtcacaagagcagagatatacttcccgtcgatcgtcaaggagaatctctggagcatcatgattggagatgaaaagaagggagatgagattatttagagaaaaaacagggaaccgcaggctataggactaacttctatcatcgatgaggtagctcctagatctttcaactttcgatccacttctgcctcgtgtcgatcctgattcatgcagaaccccatcaaagtatgttaaacatcttccgcgctcgtgtgtctcgaaacaagacagaagaatgaacgatcaacacataccaggccgccctccccagcttcttcatcaaactcctcttcgtccccgctctcggtctcgtacgcatccaaatctgtgccatcctcttcatctccatcatcattgtcatctgcgtcatcgccttcgagtctatctcggcgagatcgtcttcgtcgaccatcagcttgaacctcgggtaagtcaagggaatccatagatccaacagagtctccgtcaacgcttctatcggaagatcggtctgcttctggattgaggtattgtctagcacagtttgtctgtataataggttcaagtgttattctatcaatgtcactttttttttggttttgtattagactgtgaaaggatgaacgagagaaaaggaagggggggagataaacgaacgcaaacaccatcaaggacttcactcgcacaacctttacatctccagcatccatccgatgaatcccaaatcggtagtccccacccttcgcctgccaatgcaccttcgaataacgcgccccacccgcctactccatctgtatctaattctgatgcctttgctaagcttgcgctcgtaacagcggatgtggttgatggacccagtgtctcgtctggcccgataagaacgggtgctagaatcgggatcagatgctggaggaggtagatgggagtaggtggagcggtgacgcgcgttcgacattgagggcaagacaggattttgggaggtggttgatcgaaaggaaggtttgtcgattggggcggtggagaggtaggcgcaggagtaaggaaccatgctcgaaggctaaaacaggagatgcgaaggagaagaaatcagaatggcaaggacaaaataacggtaggagtacgaaagggatgatagaccattggaaacaggctgcatgaccgcaaggtgaaatcctgtaagaaagcaattcagaaggacaaggactttcaattacattattatgaaaccatataatctagaaccaaaagagactcttacaaatatggtcggtccatcaagttcaagcaaatcccacaggtgaaagcctgtttgatagtattcattgtctccttatgagcggtaatctcctgttaatgtatagtaagaatgatagaaataagcaaaaccactcgttgatatgaaatcctatacaaggatgcgtcttagactcgaaataaggattttcgatgagaacagggtcgagaacatacttgatctttactcttgagatctttctccagatttaccacattcttcattatctctgcctcccttcgctgctgattttctgcagccttcattctcgccgctctctctctcaattcggagcgaatatccagtccggaactctgttttggctgatctatggaaggcaaggcagaagtggtcgaatttgagagatcggcaggtggcggaagtgacgaaggagcagaaggtacagcaggttggggagtaggctgagttgggaccgattcctcctttttaagctcttgggtctcaaccgcttctctctttttctcctcagtctgtttctgcaacgcccggcgcagggcttttcgttgttttttagtgagattggaagaactagcctgatcggttgctgatgtactcgcttgggtatgatctggagctgctgaagagaccgtggaggctggttgaacactcttttggtctgtatcttcttctggatcgtatcagatcaacaaggtcaatcttaagatggttctatgcgattctacagagatcagattcggacgaacttggaattgctttgagaccatcggttgcttcttgaactgtttccgaggccagtgatgttgacgcattcagatctttcgctagttttctcttcttcttcttgtgttttttgggtttcggctcatgcttcgactcgtcgtggttctctggttgattgtccagatagtatgcaggaagcagaaaacaggcggtcagattgatggttgaatagttaactggcaagccatgggacgtacccttttgtatcatcttttcgctatctttagtcgttcctttgctgccggagtcttttccttcgccgaggagagattgcaaccctgatcccttgtcttcatcattgtcggtgtcatcttcatcattactctcctccgagctggattcttctaaacgagctctttttggcgcgactcctcccgctccacctccgctgcctcctgttctgctaaagagcggtttgataggctggacctgagtgacggctacagcccgacctgttgacagtaacgaccttggtgtagagctagaggctgcggtaacagtggcagagacgggtgaagaggatgccgatgcttggcgggcattgaaggcaagaggccgtctgcgttgtgactgggcagaagaagatgatgacggacaagatgctgtagtgggaatacccacaggaacgggaatatggtctgacatgaggtatcaagtcaagctagggccaacgataaatgtcaaggtctgtggcagcagatgtagttggctaacagaatggattcgatcagaagaacctggctctgaccactataaagctctttctcttgatctcttgccggatccccctctctcttcgatcttttatctgtgcgctctgtactgtatcatacccgtcctcgctcctttccctgccatcttttctcaactatcttgtcctcgtctcgatcagctaacgacatatggatccatcttctgggcctcctctcgaaggattgagcagaaaatcttatgagctaatgacgcgtctctggtgacgcgacgcgacgcgacggggcacgtgccgtaagattaagctcgtatcacgtgactcaattctgtaaccaaccctgttcttcatctttccatctttctttgtgtgctctgttctccgttctcaccctcgttcttcaccttcttctctcacaactcattctctcatcatggacaaggcaaagatcgctcgacttcaggcagccgtcaagattggtgcgttggtctcgttgatttctgtgtttttccttttcttttctttcagtcatgagctctcttgttgggagaatgagtgcaatctctctttaacccttgtggaaactgctcggctgacttcctgctcacgtcaactgtataccccaactcttcaggcggaaagggagctcctaagcgaaaggtcatcaagacctcttctgcctcttctcactctaacgatgtcaagcttcacgccgcgttgaagaagctcaatgtcgctcctatcccaactgtcgaagaggtatgctccttttgctcgtctcaaaaaggcttctgtctgcgccttcgtctgagtcgtcctcagagacggtaaactctgttgcctctcgggatgatagatgcggatgttctcgtgagaacatatactaactctaggtcgattcaacaggtcaacatgttccaagaggacggacaggttctccacttttctgctccccagggtacgccctcatattttcctcttgagctttctttgtatgatatctgcttgtcctttctttttgctcatacggctgacccatcttgttggttgtctcttgttactgtagttcatgccgctttggggtccaatgttaccgccatctacggtggacagcccaaggttaaggatcttgctgagcttgttcccggaattctcagccagctcggccccgaatcggttagctcttgatttccctcttctttatatctttcatctcctcgttcgtttggctagctctttggttgagccttttttttcttcttccttttgtttggtacaacagcttgcctcgctgaggaagcttgctgaggcttaccagcagatggagtctcagcagcaggctaccggttcgtttccgtttctcacttgacacccgaagtggataggatttgtgtgttgaaacatgacgtcttttctctatctgaatgttttccaggcgctggaaaggctcctgagggagatgatgaggatgatgttcctgtgagttctatgcgtctgctttctcttcttttgatcgtcttcatctgaggaatttactgacttttctttttggttcttcatgaataataggagttggtcgataactttgacgaggctggagagaaggaggaaggaagcaagctcgatgagcttagtacgtccctcttgatccttttcgtcctatatgtttttttttcctccttgagtgatgttcaccttaccgagatagtgaaacgatcgataatctaacccttttggaaaaaaattctctcttcccccactgcctttgaatccgtcagactaaacgttttatgggatccgatccatcctgctatcgctaaaactgcaacatgagactcctcatttccgactatagtgtgatcaatcatatgacccctctaatccccaagccaaaactcggaccgaatcgttcttcctcttctccttcctctcctttttttcttgtttgttgatgctacccctttcgttctgtctttatgccgtttgtctcgtgttggttgacatgagatggacccttgacatttcttcttcttcttcctttttttttcttcttttttccttgctttcattggcctagccatgtcgtcttcgttccctttccttcctctcgttctcttgtttcgcgttcgtgtgcgatgaatcttggaatatggaacatattttgagaaaaagaaaaagaaagagaaagagaaaaagaacccctcctctccccctcccaactcgagtgtcgatcgcaaagcaagcgagaaagatcattcgggcgccgacacaagatagcaagcaggcaagcaagaaagagaagagaagagagaaaagaaaagaaaagaaaagaaacgcctcccgaggtccgagtcgggcggtttttttcttctcctcgggacgtgagcaaaaaagagagagggggggaggttgaacacatgagattccggataacgggcgatctgtgtcgagcctggtctggagcctgatcttgtatcctgcgtccggtgtgcgcgtttgacaccgtcccgtccgtttgtccgtttctctctgtctggtttgttggttctctggtctcttttgcctcgtcccttgtcgcttgactcttcttgactgaatccatttatagaagagagatataaaagatagcaggcctgacgttaaagggagaaaaagaaggaaaggaagggaaaacaactataaccaaagagcaacggaacaaggaaacagaaagatgaatctttggagagggacgtcaggagaaaagatgagaacggagattgaaagaagagagggaaaaaaaagaaaagaaaaaaaaggagatcaagcggaaaataggaaacatcatacaaaatggaaggccgagacaaggagaggacgaaaagagcagaatgatgcaaactaagcaaagagaaatccgaagagaaggaacgaaagaggtttggaggtaaaagtgagagagtattatggaagactatatatgtaagaaggaagaatgatgcaagcgttgcaaaggatggtatgaatcagacgtgcgaatgaagagagacagaacgagaggagaacgataatgggtggtgagaataaagggacgagagatgaacgtatcaatttttggtatgcaaacgccctgaagaacatccaaccccggatcggggtagattctctctgtctggatgaggacagtgtaagtccaagaaaggcactgaaagagaaaaggctgacagacgggcggtctagtctgaatgagatctatgaggtaaggcgagacgaggtgtggaaagaaaagtgcaaagacagaggaagaaaagaacaagcaacgagcaagaaagatgatccgctcttcttttttttttttagaacatccatccccaaatcttctggatgatcgacgtcggttctgggtgcttctcttgttcgaccctgtccatttcgtcgagttctcttcggccggtctcaaagtccatctccctgagaagagtgagaaggaaatgagaaagaagtcagtgctattcgtttcggctttgttttgtctcgctcattcgcgccaaattggaaattagaagaaactcactccaacgagaccatctttgtcatcctgagccagcggaagcttcccgtggtcctctcgccaccccaaagcttccaggggccgtagaagagtacgtatacaaggatacagacgtaggctgcaaagaactttgaggcggtaaagttgttaccgacaaagataccaaagccgttgaagatgatgacgagggacaggaagatggtaccgatccaactggcgtacggctggaacggagccttgtatggcaagtcgtccctgttgagtccctgtttcttcatgccgtagtagaacctgaggtaggtgatgaacaacgtccaccagacgagcaacccactcatcgaggacaggttgaatagccagtcgaacgctttagccgctccgccagagccgacgccgaggaaggcgaggaaaccaaatagacctgtgaccaacacagaccaatagggcattccatcctttgtgcactttctgaagaacctcggggccttgccctccaaggcgagcgcgtagagggttctgctggaagcgtagatatcagagttaccggccgaccaggctgcgatgaggagcacggcgttgatgacggagggaagacctttgatcccggcgttcaagatggcgataacgaagggcgaagcggagacgtcgtcggagccgttgagcaaccgggagtcggtgtacgggacgaggagaccgatgataaggatggcaaggacgtaaaagatgaggagtcgccagaagacccgcttgattgcctttggtacgttcttcctcgggttctccgtctcacccacggcgaccacgacgatctctgagccgaggaaagaaaacgcggcctgaacaaagacgttccagaatgcgaggaatcgaccccaggagccaccgacgacggtgtcgcccgaggtgtactggttgaacggtcctgggtttttccagtatcggaagccaatgtacccatcgctttcgggtccggctccacagttgatgcaaattcccaggatactggtgagcgtgaagaaggggtcggaaggaaaagaagagaagagacagatcaatccaggtggccagggatacacgcgcgcatactggccgcacggataccggcgaaaagagaagaagagaaagctggacactcacatcaaaccgacgacggcgatgattttcatggccgaaaagatgaactccatctcaccatacgctcggacgcccaacaagttgacgaccatcatggcgacgaacaggggagcgatccaagcagagacgttgatggttgcgttccagtactgaatgatgatactggccgcgacgagttctgtgggaagggtgataccgtacgagaaccaatagttccatccgagggtgaaacccatggcgggatcgaggaatcggctgtagaacgggcagaagatgggacgtgtaagacggggtgtgaaatggaaatgaagacagagagagagaggaaacttgcgttgcatagtgggtcaatcctccagagtcggggaacaaggtggccatttcacctagagcgatcatgagggtgtcttttttttaaagagggggagagagatggtcatatgatatgacgagtcagcaaggcaatgtccatggatgagaagagggaggcggaaaggcttacagatgacggctcccatctgagaggaaaggcgaggggaaagggataggatacatctggcgttagtctat

SEQ ID NO: 1443 - DNA, 819 bp, Xanthophyllomyces dendrorhous
ggtgggtgggtagtgtgacgggatgactcactgtgatgtaggcgagtaaacatccgacctgtttcagggggagagatagaagtacagaagcagagacaacgaaaggtaaacatcaagagacgatcaggtgagatgatgagaaaaggaaatcaaacgaaaaggaaagatgtttcccgactgaccggaccaccagactggagggctgaaccggctccgacgaagagaccggttcctatcgaaccaccgagcgcaatcatcgctctgttggcccgaggagagaaaagatgggaggagacagacggcagtgagtcacaagatggaacgggccggagaggaggaggagaagagacagagagacagagagaggagagagaacacaagacgtacagatgcctggctttcaactttcgttggacggttagctcaccggtgaccgagtgggacccgcctgaaggagaagaaagaagggatgagaatgagaacgagacaaacgtttacggatcagcctaatccgaggtggagccaaaaggaaaaaaaaaaaacaggcagagagacaggaggacagagcgaacgagggaaaggccaacgacagaggcaagaacaagataagaagcatggacagcactcaccattatcgacgtcgacgaccgtgtctgtataggccggtaaaccatccgagcctttcttctcgatatctgtttcttccattgagaggtgatccttcttgacctcgacctgtctgattcgctcgtcggctgcttctgtcgaccaagacgccatgatgctggcttgaactaccagggattatggatgggtggg

SEQ ID NO: 1444 - DNA, 1089 bp, Xanthophyllomyces dendrorhous
tgtgtgtgtgtgtgtgtgtgtgtgtgtgtgtgtctatctgtctgttctgaatggatggacgtgcgaacgaacgagcgagcgagagaacaaaaagtgcaaagaccaaagattcgtccggcgaaaaagatgagagacggattcagggcggaatgcaaatcgaaatggaaatgaaaaaaaattaaacaaatcaacatttcgtttccctcgcccccggagtcagcctagcggtcgatcaggcaccagcgcagacagacaggtgccctgaaccgtcagtgaatcgcccagccgccctgtggcgccgtgggacccgggagcgccggcgaccgtatgagcgcaggccgggagtgactcgtttgaattcaccggctcatcgtccctgcgccactcattcagggccacggccaccgacaccgacaccacacatcgttcaaacactgatttgtatacgccaatctatagctctgcttgagacccactttttcccgggagagggagggagaagagagaaagggagcaagcgcgcaggacgccagtaggccagaaagccagaaagccaggatacagactctcgatcagtaccaaaaaagaaagaaaaaagcatccttgatttcacacgatttcgattgatttgatcaattgatttccgtttccttctcttttgctaatccatttttcagcgtttttccaatacacagctcacaatgacctcactctgccaccccgtgtgtccccggccgaggttggagctagcttgggaaactacatctgatttgccaatttgtaaataaaatagaattcaaccagctagacgagggaaaggaaggaaacgatttggaatagattgagaatagaattcttcaacatcggttatctgtttgaaacccttccgtccatttatccattcatccgtccatccacccgcccatccgtcccatctttcgcctcccttcggtcgagtcccagccagccgaggaggcgtaaggccgggctggtcagctgccagagtttattcgtaggttctaaatgtctcgcagatctgtgcgtggacttatcgcacgtacaatctatccatacacacacacacacaca

SEQ ID NO: 1445 - DNA, 6260 bp, Xanthophyllomyces dendrorhous; identical to SEQ ID NO: 174

SEQ ID NO: 1446 - DNA, 17677 bp, Xanthophyllomyces dendrorhous
gccaccgccaccgccgccaccatcacttgctgcttccagtgaggcaattcctgctgcacacgctcagaccgccgatagaggtgttgcttctgctcttgaccgtcatacggtcggaacaggggttgtgcagcccattcggtttggactgtccgctcagctggcgacgccaggcgagaaactgggaggaccaacagcgagggtcagcaagtttttctcgttggacgacgacaccgagaaggacatggtcaatcaagccggcgaacggaacaaagatagcaggaacggaagtaagccgaagggtagcgagagggatctggagaacgaaagagagatcgaaagagagaagagagaggagaagaggaagaaagacgcaatggagagggaggtcgatcgattcagcgagagtctggccgatcgagactcgaggctaccaagagagcgcgaacgagagggagaccggaaccgggaccgagatcacaaccgacctcgtgaggactacagagatcgagaaagggagttcagacgggaagggttccattccggtcgaccccatcgctctcaacgcaagtacgatgatcgaacagaacctggtctgatcccagcccgatatcgggaaccggagcaagagaaatctggtcgaccaaagaaacgagaacctagcgcagatccatttggaagggctcctagagcgtacaggtctcctagtccggatatggagcaaatatggaggaggaagaagccagaatcgacagttccagagagcgagatttcgagccacggtgaacgagacaagatggaagtggaccagccggccgagacggacgatcgacgagatccttctaccgccgctgcctcggaggtaccgtcggtcgtgtctactcggtcgacgtcacctgtcggatcttaccctgcctatccttcggcccagacccagcctgcttcagtctctgagccaagccatgtatcatcttcttcgctgactggtaaaccaagtcacgatgatcactcagctccagcccctgccgctcctgccaccccctttgtgaacggatctcagattccccctacgaccgaaacataccaaaagattgctcaagtcggagagggtacgtacggtaaggtgtacaaagctcgaaacaacgagacaggtttatatgtcgctctcaagcgaatccgaatggagggtgaaaaagagggcttcccggtcactgcgatgagagagatcaagttactgcaaagtttgaatcatccgaacgtcgttcggttgtttgagatgatggtctctcaaggtgtgtttctgccttttcttttgtgtatgtgcgtacgtttgctcacccaatctgtttatccatttgtttgtttgcggcacatgcagggtcttgtcatatggtgttcgagtatatggaccacgacctgactggtgtcctttctcagtcccaatacgtattttctccggccaacttgaaatcactctgccatcagatgatctctggtctctcccaccttcactttaaaggtgttctccaccgggacatgaagggctcaaacatcttaatcaacagcttgggcgaactcaagttggctgactttggactggcgaggttctatcataagcgtcgaaggagcgattataccaacagagtcatcacactttggtacagaccgatcgaactgttattgggagcgacagagtacggggctgaggtggacatgtggagtgcagggtaagtctcgaactgagtttggcgacaagatcgtgctctctcctctctgatttcatcgattgttttctcgataagagtgactgatccaatcttttaaatcatctcttcgcctctttaggtgcatcatgctagagatctttactcgtaaaactacgtttcccggtaagtcttttcctcctcctttctttctttcttcttctttgtgtacatatgaacctcatttcttattgatccgggaatgtccatcatccatcatccgctctcttgtttttaggtgccgatgagatcagccaactggaaaagatttattctctctgtggaactcctaacgaggaagaatggccagggctgacggacctgccatggtacgagttactaaataaggatgtcccacctgtcaggtcgaggttgagagagatctttgagccgctcttgtcaccgggagcgatgcggttagcagaaggcctactggaatatgaccctgttaagcggacgacagcagccgaggctctccagatggactacttcacaaccgaggagcctccgatgcagatgcctttccagtacgttgcctgcctcttacgatcgttaacgactgttatctaaatctccatacttgtgtgcgttgcgtggtgtatctgactctgtctgactctgtgattcatccgatcttttccttgtaaaaacaaaacagtctggcagaagtaggtggcgagttccatgagctcgaggcgaagcgagaccgaggtaatattcccctcttcaatcaaactgaacaaaaaaagagaaagagaaaagcgccgatgactgacggaagtggttgcgttttgtctacgctcttcgataactttagccaagaaacgagcgaaaggtcgagctgagggggatcatcgatctggtacttgaaggatcgaacaagaaaagacttatctatcaatcgtaattaatgatgtgtgtgtgtatatgtatttatatgaaaggataagaacagaaaagaactttttcttcgtagcttttcttctcagaaccatcatctctttacaaggcagaagatcttttctctatctctatatatatacacacatacgcagagggaagagccaagatcaaacgggggggagagtgatagaaagatagatcgaccatgtgtctctccattttctcgcgcgccaacaaatcgggattctgaaggaaacttcaagctcatgtctatccaggacccgttcgctcgacgagttagatgtacatatgactagccgcgccttccgctttcttccctccgccagccttccaaccggccgaccgccttccgctcgctttcccgagaccggacccgtcccagccgagccggtcgccaaacagctggtccagcaggctggctaggtcacccaggagccgtaacgttggtctgggagccggtaggatgaacagatgcgtcggaggactcgacagagggatgagcgagaggaagggagccgagggggagaggatatggttaggtggggagaatgggacgatcgatttctggtgaatttgttttgttcggaaggtaagagagaaagttgaagagagtttcgtcagtcgttatgatcatcattcgtgaatgagcaataacagtgcaagacacttaaagaagaaataaagacccacaggaagagaaggagtcgggctggtcgacagatatctgataggatgatcgtcagtgttcgattcggtcggatctgatgaagcccagatcggtgtggtatagctcgatgccaaatattggtctataacgataactctgaatgaagggttcgcaagacgagatgagggtgagatttgtgtgagaaacttcagagatgaaccgcgcaagaagaagaaggagaagaaggcaacgagaagactaactgtgaaggagaaagcgtctgtagaacggccagtgtcaacggcgtaggaacagatagaggaaggctggactcgatgaacagtacaaccaagtccggtgagagctgataaagtggtgcgatctagatcgttggaaagcacaagacggaccgaccacctcgcatggggttgagtatcgactcaagagcgagagcgagagagcgaaagaaaggcagatagaagactaacggcttcgtctcctcttttgacgattccatcgggtttccttccaggtttgatgtacccatcaccgaacaccccggcttcgttgcccaccaagaccaacagaccggctcccccttcacctgaccagtcaacgttgatctcaacagatctggccgagaacgaggccgaagctcgatgggattgatatgcgcttgcaggtggaaggtcttcgtcctctgattcatgaaagcccggttttaaatcagtgtttcaaaagaaagaaaaagaagtagaaagtgaaaagagacagagatcataggaaagccacgagtcaagtcggtcagattaacgaaaagaagccgaggactgatgacgtgaaacctgatgatctcttaccggaatccgactcgagggcgtaccgtgggggtgcgtggttgagcgagttggggtctgtgaatgggtccatgggtgcaagttgtgtatgtgagagtgcagtgggctatatgtaggatggatacaagatggtgatcttagagatcgcctttctttgtctcgctggaggtgttttgttctttcctggtcggcacagcctgaccgaccagcgaccatcaagctgaatggtcgatccaactcctaacgctatccgttcagcgttcgtttcattcaaatgtagctttcgatatgtcttattgtttcagcctggagggctctctttttccgtgttgtgtatagcgactttacagtcttgctttcgccctgcatttgctgtattcaacccggcatcatccattgtcaattgcagagcgtggagtgtggcgtgaggagtgtaggctttgtggtcttcctaactccctgtctccttctctttctatccttctatttctgtctgggagtgaatgaacatgcatggagagcaccggaacgggtaacaaagaaacggcaaaaaaccacgttgatcgagggctttaaccggactttccggcgggctgctcgttcctacaagagacaaaaatcgagttttgggacaagtcagcagggtttcaaacgagggcagaagtctaccagcaaagaaaaaaagaataggaaaagagacccacatctttcgctttcctccgggggcgagggtgacgttgacgaatctgtttggagaaaagaaggtcgaaccgaaaggtagatggcgaaggatgagaaacaggcgagcagagaagaaaaatcgggtgggtgaatgggacaaaaaggatgccgagcgaggatgatacagatcgaggtcagctcgagtccagacttgacgttcctatctccagtacagatcgaacgactggacggtacgtcacagactctcaacatggccagagatagcacaaagaacagagaataaagaaggacgaaccgtcggttgtaaagaagtctcttcttggcccgacccttgggggtcttgggcttctcctgcttctcaacctgtcagaaattttcccgatccccacacaatcacattcacgcattccatcaatgttccaaccgattcacacccgtttgtcacacagtcaacgtccaccgtttcaacccaggatcgaaccaaatcgtttaaattccaattcgagattacaaataaaagaaaagaaaaggcatcagaaacctgtggcaaaacgaagggcctgatccggccgtttctttttcctgattccaaccagacgacgacgacaaccacagagaaggaaaaattcgctggaggacataccttggggcactgagacttgaccttaccggctcgggcgagagatccgtgaactgatgagtttagaagagaagaaaaaaaagatagaacaatccgtcagcatgtttgtcccaatgtttgtcctatggtttttcaagttttccttctctctctctctttgtctttcatgtaccatcaaacggttggtctacagagcgacgaacgagaacgttacgaaccttttcccattcttgatgatgctggttgactacaaggtggtactagttaactacagagagtagaaaggggaaaaagaagctctttcttgctacactaacagggtggggggaaaaaatgaagctcgcacgggcctcgaacttacccttgtgaaagggactcacgaggcccgtgcggccggtcggtgcgcttcggcagtatttgaaaagcagtagatatcttatgtagttgtcttaggtaagcaaggcacgcgactttccatacagaacctcaatatttcatcgctttggctgctggagagcaatctcggtcgatggtggtcgatacgtagcctttgtgaggttgagtgtctttcaaccataggcaaccaggtccatggaccatggacttagtttgtgttaggcgcgtgagctgtacaggtgattgggtagctatagggtgtgcaacagatgcagggaagagcgcagagtcagaagttcagggtttttcagataggatcgtcgagaacagaagcgcaagggaacagaagtgatagatcacaatgaatgaggacaagaataataaaactgttaacaaaggatccaggttcacgagactatgccatggatgagaaaggatgcccatgttgtgtatgactctcaaactacagaggtactgagcaaaggcagtatgcccacgatacaacccacaccgaacagccacaaggaagaagagatcactggatgtgttaggagcgcatgcgctgtgtgactatgagttgtggcagaggatctgtgagtccctggttacagacgtgtaacgccatagttacatccaaatacctataagaagtcgccctgcctccgacagggaaaccctttttttcttcaactgttcagcaacacgtaataaccctgctcgccggcttccctttcaacgggggagaactcaatggtggcgtcgggtcgctagtggatgcgagaaggagaccaacgttcatcatcaccaaatcgacgactttcttcttgaagaacgaacgccgaggcggtaaagaatgttgggatatctcttgaattatccaagtttgtttcgagtgtgggacatatgatgtgcacttatagatgagatgaaaaagataggaaagaagagagaacatggcatcaaggacaacctcatatgggagagctctcgagggcacagatgagtcagaaacagaagatgagcatcgacaggaacgagcgttgacaggaaaggaacaggaacagcggtcgacagtggagagttgacgatgttcggcttcctgatttcagcatgttctctctgcctcacgaacagcgctggttctctctctgtccatcgcatcttgggttgtcgcattctctgtcccttcgtctgtctgttgctttgtctgatgatctccttgactactcatgactgtctctatgtcacgctactcgtttgcctctttggtgcttactttcagacttggtggaacagagatgtgaacgcgtcacgcaacatgctgcaccttgaccttcaccaggaggagaacgaaggagcaagaatgctggtatctgacaccgctgctgctacgctagccactgaggttgaggctggcacataccaaccccatgacttatggagatgtggtggttcgtggtctgagggcacccaagtccaaaagggccatatatcaaccactattggttgaggtcactctcaccatgcgttttgcagactgaccctagggaacagacgcgtcccgtataaaacccaatttttttcttctcccccgtccggtatcccttcaacacacatcgatcgtcattgtgagtatttcgagtcgcccaagctcatctcatctcatctctatccagtccctaccccctcttaaaatgatgatcaactttagatgacgagtcggaatgaaaaaccctggccggacgactcccactatggccgccaaaccgctctctttccgttttggccggagagcaccttggtggtcgggaggaacatggccggaggcaaggagacgacaacatactatgcttttggctaagcgattcctgaatctaccccccttcgatcaatatcttcaacttcactatctgctcctgtatactcttactgacccttatcgtttgtcttctcttctatcgatcccaaaagtgaaagaccatggcagaccacgatgatgattcttggtcggattcttctgtctcatcgacagagtcccgtttggctacgacaaacaccatgctcggtttcccagatgggccaatcgacactgaagctgaccttgacgatccgcagacttctcatattggcgggcagccttcctttctgtcttcactcaccacattcccttctacccacacttctctctgtctgacgtgtgaacgaccgatggaactcctcgttcaggtctatgctcccctggagcatagtctggacgaccgaatcgtctatgtctttggctgctcccgtagtggttgccagggaccggacgggaaggggaggttcgtccctttccttcgtaggtcgttctcttttcttgactttcgcctcacgggctcacctgtacaatacatacatgtcttgcatcaactatcatatgtcatttcccctcaaaccgttcgcccgtatgaatacaccgaaaacaaaatgaagcgtgcggtcgtacacatctcggaagcgcaatgagaaatacgccagcgctcaagaaagacgagctgccaaaaaggcggccgcaaaaacgactgcgacagctgcccctcctgtagccaataccaaggcatccaatcctttcgccgtgagtgttccccaagccatgggaagaacgtactaatgcgctgtgttcttgtactaattaatccctcctgtaacggacaaagaacgctggtctgggagttggctcagccacctctgccttcaatccattcaacccgttcagcgtgacgccctcgactgtgacaccagcctctccctttgggaatccgttcgctagttctcctaccgcaccaaatccgttcgcacctacgtctgcgcctgtttcgaccgagactcctccgttgcttccgcaagcaacctcggcgtcacatgagaccgtcttgacggatggagttcaccggctggatatcaagcctgatgagacatccgagaccggaaagacagagttagacctaggtttgtcttcatctttcttgtttgtttgtttgcttgttcgtttctattcgtgctaaggttgttgaagcaaagaaaaaaaactgataactaattatatttatccctgtgtgtatatgtatgtgcagcttggaaaaaaaccccgttctatccggcacagtatttagcgacccaacccgaacgactgtcgaaacccaagatctcggccgctcaaaaagctagtgagcgtgctcgtgccgaagcagccgccgctgccgccgctgctgtcaccaccacaacagccgaagataccggtctggaaacccctagaggaaaaggcaaagggaaaggaaaagaaccgaccgacgagagagacggatggggggagggaacagatgtcaacggattggatgatgtgttagataggtttctgaacagattgagtatcgagcctgagcaggtcattcggtacgacttgcatgcccatccacttttctactcttccctctcccctttctacacccttctccatcctccctcctccaccaccgcatctgttccggccaactcatccggagtacctcctactcctgcatttcccaaacgaacaggaaggacatacgatccttcaaacgtcccccgttgcaagacgtgcaagaaatcaaggtcgttcgaacttcaactcgttcccggtttgttgaacaccctaaaaccagaatctattttcgatcctctctctagtcctagccctacccaatccaacgacccatccctagatgcgcccgtacccacaacgacgacgacaacgacaactcgggacacccagacggagaagattcgacaagatctcctccagaccgttctctcaaaaactgaatccaccaagtcgctcaagacggggatggagtggggctcggtctgcgtgtttagctgtacgaccgacggatgtggtggagactgggccgaggagtgggtcggtgtcgaatgggaggagtaagagtctcctcttcccttccctcctctccctctcatggagggttgattcctatgttttcttcttcaaccatgctcttcttcttttccctcttgtttctttgctgctctctttctctctccttcatgtatcgtgggtttgatctttcgactcggcgcagagggagagcgcggcaaggctaggtcggagtaagtgatagttatataacaccgttattcatattagaaataaaacgaaaaacaacgacaccaccacctcctccaccattctcgctcattcgctcaggccactgaaacgggtgaatgattctttataaacaagtgaacagaggatatggtgttcatacgcgtacacatatagtccaagacagtcgggtttgagagaaacaacaaagaaatgacagagagagagagaggaagaagaagaagaagaagttaggcttcctaaagtaactctgtatatagtatatagtatatagtacctacagtataacatagagaccaaagcacgaacgatcaaacgaataaagaaacagacgacgcgcaagcaagtagacaaagggaaaaagtttcgcacaaataaacatacagtctatcaattaacaagaggggtagcaaggagaagaaaaaaaagcgggccagacttgggtttctgttaagcacagtattgttgtagtttatacaaagcacagttcagaagaaaagattttgaaaagaaaaaaagaaaaagcagaagtagtacaagagccaaaccaagcccacctctctggccatgggaaaccaagaaaaagacaatctcagaacctattgttccctgtcggcaaagacaccatcattgtcaatctctttctcggctttccctccccagagacattcaacccagactttctgtcggcctccttcttcgattcccacgcggcgttcatatgagtcggacagaaccgtttgtgagcaatctcgtaatgttcttgcatcgacgccatacaaggtgggccgtccgggtctgcgttcaaacaaggcaagtcgacaagagaaaaaacaaagagaaccgatgcaacgggataaggaaacgtaagaagataatcttaaaaaggaacaaggagcaaagaacaaaacaaaacgcacggtcacaccgaagacaagatggatgcaacttcacttggcttgttgatgatccttctttcacctcaacgaccgcacaatccccctcgataggtttcccacagctggccagtgcgcacaacgacccgctgttggatacatcacccgagagagagaagaattgaccgagtcaagtacagacgtttaagcaaagatgacatgtcatgaaagacggaggaggtagagacttacttctctcgatggtaacaccattcgcaaaatggccgagcatcaaacacccagaatgtctgtccgtcgaacggccggtcgcatccatagcacgtgaagcatgcccgatggtatttgccctaagacgacacacagccatggttaatttcagaaaacgctgacttgatgagacacatgctagagcagcgcgagaaactacgtactttgagttgaccatcagcagaggagatcgcctggctctcgataggaagggcacatcgtcggcacttcaatgtcacacaataacccatcataagctttccaaccttttgtgttgaattctactctcaaagtgccagaaaatcaaaacataaccaaccttgggcaagtacatcatcttccaatccctctcacacaataccccgccttcttctttcatcctgacaaacttgacgtctccacctacggcacatccacaattcttgcacgcctttctcttcgtctgcgcgttctttcctttgggcagatccggtcgactgagtcgatgttgcttccctccgtctgctgtcggagtcggatgtaagggggaggattctgtcgatgcaggtgtaaaagtgatggaaagtcgaagaggagtggacagatcagtctgaacatggaggggagagatcgaactggaggattggtccgacggtgatattgacgatgacgatggcttttgtcgagagagacccgagtttcctccgtcaaacgcaatagcactttctttgtcttcgtcgtcgtcttcctcgtaaagctcctcggctccttcctcatatgtcccagctgagtcatacccacccaaactactttcctcatcgttctcactctcgcgcccgtgaccgctctcgctatcgacttcacttgatagccccgatacaccgaggacctcaggtcctctgagtttatgagagcccttgacctggccagagcctgttttcgaagcagcattgacgtctttctgaatagcatcgagtaaaccagatcggaaagatgcggagcttgatgagcgagacattcgagcccagggtaagatagaaccagagtcttcgtccgagccgtattcatcctcgtcccgttcgtcgatatcgtcgtcatcgtcgtcatcgtcgtctctcccgtagaaaggtacatcggcttcgatgcgcggtagtgagaatgagggcttggaggatgccgaagaagcagaagcagaagaaaacgaagcagaatggtccggtctgtgtgctttgtcttgaaaagggaggtgtgtatgattagatttcgatggaacatgttggtgggaagatggcaccaccggatgacgatccgagtctgatcgaaccgacgaagatgatgtcgaacagagcgaggtccatggagaagaggcagaggatgatgctgacgagagggaagagacggaaggcgaagaactggccaggtgctgctcaggatgatggtgaggagagggcgatgtctgaggctgaggaactggataggtcggagatggtggttgacctagtttgtacgacccaatcgagttaatatggagaaaggagaaagcgaataaaaggaaagagcgcatcagaaacaagaacgaacctgctgctcgtcgccttgcttcctcagccgcttgatgttgtgcgacaacgaatgttcttcttcccacacctgcgcgcccggctcctcctccaacttcggtagtccttaaacctaaccgcctcatcacctcatcggctgattcccctccccctgagggagagggcaacgaaggtcggcattgccaggaactattagtgggcgagggaagcgaagaaggatttgagataggggaatcagattgattgggagtgaaagagagaggcggaggagcaggcgaacgtatcgatcgttgttgctgttgctgctgttgttgatgttgttgctgaggttgccgctgctgcagttgctgttgttgattttgacgctgatttggatgctgaggttgaggtggccgataaggagattgtctcgatggagattcagcggctacgagctcgctcttcaccggactggttgaataggatgcagcaagcaaaggtctctgtatcggtacgtttgttctaggcaggcttgactctgcctttgacgctggctgtcgtctcgtcgtgtttggtacagtcgggttcttgatacctgaaggagaggcaagggcgagggaacatacatgatctcctagttcatggaacggtacgggtgtctgacagttggagcactacagatgaaaccagaatcaaatacaagaaaaaattggatcagtttctacgggtctcttcgtgtacatatgttttgaaaaaagggcggtacgttgacgctgggaaggacctgggacgctcgctctcctcccggatggcccgagcggggaataaccaacggcattcggaccgggcgtgtaattaaatcttaaatggaagaggtagatgtaagaaggaaaacgtccttgctaaagagagtgggtgctcaaatgtctgttggaaagaaaaaaagagaagaaacaaagagagtgattgaataaaggtgtggcctgatggacgagaaggtgaacgaccggagggagaggtcgcagaatgaagcgtgcaggtatattccattcatttcgtcatctctcaggggctcaaacatccagagtcttgagcagccagcatgtttcatcatctaaagatcaaggcttcttgtacgttcatgtgcgcttgtgtcaagagaggtttggtgtagttggttctagttcaaagaagaggaaagcgtacggaaacagtggcttcgtcgcgtgcttccaataaacaacagttctctcgtgtgtagaggaggaaagggaaagctattcatttacataagggaacccagaatactcttcttcggttttcccacttttcgtccacttgccatcctcgccttgaccgcttgcttgactgccttggactgccctcgttttccgccttcttcctcactcgaactgctgtcctcatcttcctcgtcgtcgtcatcgtcatcgctcgattcgctctctgggtctagcgctacgccactctgtttaccgatgggcgtgctccttgcgctacctgagatccaacctccaattcgccccaacacacccgactctcttcccgctgctttcgcccgggcggtttctgaaccagccactgcgaattcagccttggaccgctgggacaggtccgacaatcctggagctcttcgttgggatgaactcggaagagcgactggctgagaaggcggagggagaggaatcgaagggtacagagaaggagtggccgaggtggtcgctgagatgctaggtcgaggctgagaggcacggttgcgtgaataaggaagcgaagtctgtggactatttgacggagtcggctaccatgtcggatgtcacatattaacgttagtcgtccttctgccagctgccaaaacagtcaaagacccgaaaggaaaaaaactaaccttggagacagaggcagacttatcctcggtgggtctggccgacttggcaggcgtctcttgtaccttgagggtctcatccactgtgtcttggacctttccgtcgacaacggtgaccggttcttcttccgcttgttttaagtccgagttacctaaactctcccttcctaccgaccgctggttctcaatctgcttagcacccgcccggagaatcgctaaatccgcatgagcttcctctttcgccctctcttcctcctcctttttcttcttcttctccagatagtttagcagcatctttgataacggctttcccttcttccgcgcgttctcgatcgcgatctcgtgctttgctgcaacttcttcggctttcaccctggcggctgctgctttctcagccaccaactcggctcgccggttcctgatctgctcagccttcgtaagcgtccgaggggtagcgctcggcgtgttgacagccgacgacgaaggaggaagggaaggagcgaatctggattgaatggacgaaggtggctcagattccggataatcgccttcgctgacttggttttcaacctcgacttcttctctcctggcgattagactggatgaagatgaggtctttcgagacacgtcgccaccaatcggacgaccccgagtcgatgcacgcaaaataggtggctctctgtcgacatcgtcgtcctcgtccttatcctcctcttccttctcctcctcctccttctctggctcttggttgcctgacccgattgcttgagagtcattactgttaccgtcgactctgtccaactcgcctgcttcgtccaatgctcggttgagcgtgctgaacgtcaacggcggttgggacgcgtcgagttcttccagatctcctaatgattttcgaggttttggtgtagtttcaacagccggagcgtcggtgacagtggaaacctgaacagggggttcctcccacgtaggttcaggagatgactcgttcgaccgtacagaaggagatgagattaaaacccgaggtgggtcgttcaccctcccgctgacgactagaaccgagccggattcactatcgagcccttggtcggaccaactctcgatcgtctcactttgaacacgtttttgagctccattttgtagatcagccggttcttccacaataggatccgcctcctcttcctcctcttctccttctccattaccctgcctctcttcggtttcagcatcaggatctttgacaccagggggcaagataccttcatcatcctcgctttctgagaacgctccgctctttcttcctcgaccctggctcaacattgacgctcgtttctttttcggaggactatctgtagcatccgagtagtggaccacatcatcatcatcatcctcgctatcatcatcctcctcgtcatcatcgctatcgatggcggggcggaggggagcaccagagaaccgaggaggaggaagggcgtgcttgagtccatttggaagactagagcttggtgccaacacgttcttctcttgctcttccttcttcccactcttctctttctccttttcctcactctcctcttcgtcatcggaagaatcatcggaagaggactcggaagtggatccttctccatcatcctcgatgtaaacatccgaatgaggttgtttctcgggagacgagggagctacaggtccagctggtgacgagagaggggtcatagatcgggcttttaggggagtccgttgttgattaggagtaggagggttgataggagacacggggacgggagccggtagattggaaggttgtttaggtgtgggaggctaatcatgggtgcaacataacgacagagttagccaaaaagcgcatggattgtactcgtgattacgaacgatcaagaacttgcaagtttcccttttgtgttgtgagcaggcgtcaaagtagcaggagcctcgttttcacttgactgtttacatttcggcaccccacgtttcagagtgggagagcgagagagaagtaattagatccagaaccagaacgagaacaactattgataagcgtcggaactgtgtcccatttttgggtaagaagatactacatgggttaagctaagtgacgaacctcatcaacttccttctccttcccaaactcataactagaaggcaatcccaattctaccgagtttgcagcaggcgagagtgcattctgagactgtgttgatgcttgtttctttggagacgaaatcggttttccaaccgtactcttcctcttctccttcttctctttttcaggctctttttccttctcctgatctttctcagaagttgtaacagcgtcgcttgtcacagaagccagagaagaagacgggaagtccaactccaaagccagaggagtggctcccatcgactttctcctagcaacagctgctgccaacgtaggaggcagccatttctcagcttcccaagacttgtcattttcaccctccgtcactttctccttatctgagatagagataggctgagtggaaggtgcaggaagagattttcgagacttgggaaggtaaatagggggtgcaagggaaggaagttgaggagctttctgcgcaggtgtaggcgtaggcatgtgctttgatacagaagccgaggatggagcaggggctgaggccggagttgatgaagggggtgcaggagcgatgatggctgaagtagcagaagcgacaggagagacagcaggaacaggagtagaaacaggagggacggtcgaagtctttcgtcgtttcgccggtttctcagatgtcgtagctgccttactgggagtcttagatcctacttctttccctgtgcccttctgagaggcagcaggggtaggagtttttgtagtggtaggagcctcggcgggagtatgtgtcttagcagtgtccacagcggccggagcaggggtgggggtcagagt

SEQ ID NO: 1447 - DNA, 18164 bp, Xanthophyllomyces dendrorhous
  misc_feature (14265)..(14274): n is a, c, g, or t
gagtaggggccggggcagaggcagacacagacggtgtgggttcaggctcaaactcgagcataggacctttggctgccgattgagaagatgtgttccgctttctcgaagtttttagaacaggcggggcactcgctggagctgccaaaccaggaccggcgctgttactagagagaacggacgtagacggggcaaccggcgttcgaggagctggggtcggagcaaactgtgttttcttcttagcggatggttgcttaggcgaggccacctctgttgttccagaggcattagtgttattggacgaagaggacagattgaggacaggttttgggagagcggaaagcaaggtagtcgactgggaagctggtcgaatagttttgttggcagacgacgaagtaggagggggaggaagcgcgcgaggagtgagcgtctgaaaggaaccagcgagtgttgatacagacgcgggcgcattgcccggttggaaggaaatggtaataggagcatggggatcggacgcccggtatctgaatacatcaaaatcctcctctgtgagttagaacaagcagatgagagtcagccgaaagtagacgcgtacacctgagaagaaaagttttccaagcgctccatgccggatcattcatgtactctctatgagaacaagagcaaggagacaaagaaagattgataggaacagagggaaaaaaagacacgaaccgtcgtccaggtcgatagtcttgactccgtccctgccacccctacccggctcatatctcaactgagcgagctcgatgtccaaaccctccgggtacttcatctttttcctgacgattgtcttcatttgttccagcgtgaggctctctatgaatatccgaatgcggttataacggaggattatacgagagaaagacataagaaaatagaaagaggatgagcgagatattcatcccgacgcgtgttcttatcgcattcgaacaaatcatgaggtgagtgcaacgacgggaacgagcgcaccttggaatattctctcgaatatctttccttcaggtccaacatatgtgatgatcgatggatctctcatcttcttagcacgcttggcgggtggaggagcattgagatcggtggccgtagcggcggcaacgacggcagcgttgggattggcagtggtgacattaggaggagcacttgaaggaggagcggtatgaacggaaagctcgtcctggttagcttgcgccttacgcttccgggatcctccaccggcagccttacgggaggacattctggagagagaaaaggtgtagagacgtgaaaggatgagtgaaccaggtgagggatggatagaagaggaaaagaagaaaaaaaagaagaaaaaagaggcgggtagaacaaaataacgataaaaataatgaggccaagcgcagtctcgtccgattacgaaatctttggacagtttgtagtgtcctattagacctgttttgtagtctagaactcaatgcttccacctcggcttgaagcaaccttactccttgcaacatactatacccaatgcgatagccgaaggaggaaagtcatgaatatgtgcacacagccatgtcaaaagatggatatagtggaggaatcgatcttttcgatctaacaaatttccatttcgccatgatagtccatcaggccttgtatatgtatattcagaatcgcctgttatgtgtagctatcgataaaggaattgttgtcggtttgggtgattagagaaaagtcgaaatatgatctgttggctgcaactgtatcacatatgttcgtgatagatcagtagatccaacaaattctagatatgacatttcactgagtcgtctgagcccactgactgactgtataaaggtcaccaagaacacaaatataagtttgggcaacgtttcagacacagctgttcatctaatcttcttcaacaggtaagacgatagcagctcatatcctgaaaactcctcctcatcttttgattgttccgcataccatatccactagaaggcactggcgctgagcaagacatacaaatcggcgcgaagagctggtaagcttggtcgatggtggccaaagacagataggcaccgaggaacatgtgtacagctcattacggaccgtggtaacataggatttcatgtccttatagactacggacaatcaggcgtcgagtattactagatgtatggctaagatatgagatgcataacaccaataaatgaaaggcagatggaagccgattgactcgcaaacagtctgggcagcatctatcgacagtacacctgccatcctgcgcttactttccatcagaagatatagccgaggtatttccccagcctatctgccccatatttaatcttcttacacccagatctctgttagtaaacgaataaccagaagctactggtgtagactagaatgatggcttattgagtgatctgaattaaaagaactaggaagcttgcttcaacccttagcaagcaaggagaagtatatatgagtattatgtgagtattatgtgagtatcatgtgagtattatgtgagtattatcgaatgtttatcgcaatgaagatctgatctggctcgcaggtttgttagagaagatgaacccgtctcgttgccgtagcaggtcaatcagatgtattagatagtttgagaagatacatgttagtcaaggcaagattaatgaaagcgttcagtctatcactctcttcctcttagacttctcctctttttctttctcttctaagtctacttccttttctccgtttctctgcctctccttttcttctcctctcttactctctctctctctcttttctgtatgaatgaaagactgtaagatgcgcgcgctgtctctgatctcaaaatgtgggtctaaggatcacgatcgttacagtgtaaccagcccggccctagtcttcagccaattttggttacaccgtcaaattggcctggaactcttgggaaaaaacttcacaggcagaagatacattcaaacacatacacacacacgcttcatctcggtaaggaaacaccctctatagagtagaagatcgtgagcatagacaatggagatgagaagcatcaaggtgtcccaatgatgaccatcagcactgggcactgaagtcatctgatagataaagctcaacccgtcttagcaggacgagggcggacgtagaaaccccgtgactgagggacaccttccgctgtagacctcttcttcgtctttgcttgctctttgtgctagttgatgttgatccttgcaagtacttggaggctgacgattgattcttttcgtgttttcttagatcttggagaattttcactagagttgttttcacgtctcgcagaattttaatttctcccaacggattgtatgtgcatatacttccctcagatttcagagacaacatttgaggccatcatcacaggacgtcaacaggaagagatgagaagggtttccaatgatgaccatcagcactgggcactgaagtcatctgatagataaagctcaacccgtcttagcaggacgagggcggacgtagaaaacccgtgactgaggaacccttctcatctccgtactgctactctgatgatggcagtcttgaggattcatcgtgaatcatgtttaacggatcaaccaactgacaatatagttctgttacttcagataaacaaaatgtccggtagtatacacgccgaggcatcgacctcaacactgccttcaacgctcaacacgatcaagacgtccttaacacaagtgaacgctgctctctcgcctattcttaaatcgtcagtttctttctttcctttcctcacttgcgatcgacccttctgacctcaactttggaccgcgtatctagccttcgctctgatccgtcctcgttcaatctctcaaacggactttctctgttatcgcttcgaccgaatcttctcctttcatacatccacctctacactctcctcctcggctcttctctttcaccttctactgctccgttaccgtcatcatcatcgacaccatcgtctacttcatccgtcctcgactcgttcaacgcaccgagaagccggacgggccagccgagcgagcgagacctgattgagcaactggtgctaatccgggaagtcatggagcgagtcagaggaatggagggtaaagtcggaaaacaagtcgatcgtctcgtcaagggcgcagaggagaaggaggtcgatctagcaaacggtacgcttttgatctcgatcttctcttaacttttcatcaatacctataactaaaccagtgcttctcttctttttctttctctctcccctctgatgcagaccctatgtcattccgacctaacccatcggccttggtgaaaccgaatcagtcatcgacgactgaatcggcttcatccccatccggcgaaaccaacggaacctccacttcgggcgtttatcgaccgcctcgacttgctgccgtgccataccttcctcctacctcaaaatcttccaaaacgaaccgagccgaatctgggtctgccggcaagacgtcaagcctgttgaccgactatgcgttgtcgaccgtgtcccatctacctcatcaagaaactgtctccggtctaccctcactttcttcgtctgctcgagctagtcgtgcgaaccgatcgctcgctcaagaacagaccgagtttgaggaaggtgccttcactaggttgacgttgaagaaatcagaactgaagagaagagaaagagaggaaagagacgatgcgcttggacttggtggaggtagaaacggagggaccggttgggaggacgtattgggtggtctcggtggtgggagatatgattccggaggggatagagaaaagggaggggcctgggagaggagaaagagaggaccggatgaaggggagagcagagccgggccggcaaagaacaagaagggtagattcgagactagggtcggaagtaagaagggaaagaattgatcctcctctctggtgtcttctttccttctcgatatccctatcatagtctttgagaacacgactacaatcatgaatatatatgtgcataaaattatttgaaagcctttccctctttcctaaaaaatgaaatgaaataacgaaaaggcttcaaccaactctgacactcctcctgaaccacctccgtcggcgaaacgacccaggttcgaaatctctctctacaaccatggtctctccgtgcatcgcgtgtggtgcgagcgggatttggttaggtgagatatattgccatccatctttcataacatatgaatttacgtatgtgtttttgaagagactttgtgtcagcgtgtactacttgtgatttagagataaaggaaatcagcaaggtagagaggtagaaaagggacgaaccggaatcaacctcgccgtctgcccagatacctaccctgtcaatgaaccaggtttcaccagggatccatatccagcctgatccttgtttgatgctcagtgacgtcaaattcaagtgtctatttgatattcggtgttcagtaattgaggtagaagaggagaaagcaagaggaatactcagagcagaagaggatagtcaagatgagaaatggaacagacaactcactcgcctgatccaacttgaccacctatagatctactcccttccttctcggaccaaccatcttccgtccactctctcccttcccctcctgctccaccgcttgctccaggcgttccgtcagtcccagctgtaccaccacccgagacatgagaagtagactcttttccgcttggtcgaatccatcgttggttttcccacacgctaagctcgcatactggtttgtcgcgaagtgagagtgggatcttgtcgttcagaagactcagatggagagcatggagttgagaggctaagataggtgggatgggaagcggtagaaccgataactccccaggagatctagggtgaggaaaatcaagcgcaagaagaaaaatccgtcagaagaccaataccggtagcggagactaaaaagaaaggccttacatcaaaccaaagagcaatgggccccaacctaagggcaacagaatcgcccaggccggtacaaatttccctccgaacgcaactccaacgagagcaaggacgttgaaggcgatcagagtatagtgtaatgggtgtattggtgaaaagacctgttgagccacattaatggcaaaatcgtacatatcggaactgccagcggaagatagacgagaggtataagtaatcggtaacgtggacgatagaaactaacaaaaaagaggaacgggaagaacggacaaggagcccatgagattctgaattccttggagattttggtaataggtcgtagtgagaccagtctcgattggcgctttcctcgcctgaggaatctcgtgtgaaaactggagaagagtggtaatcatcgaaggaaacgaaaggaaacaactggtcagcagctcgtttgtatgatgacaacgccggaaatgtcaacagcgacctacgtctgaaaagtcgccagatagccgagatcctgcttttgaatcccgactgaggccaaccgagctagcttgtattgatccgcttcttccgtgtaacatttggaaggagttccttcgagccgatggggacgaagtggtcctggtggaggtttcaatctctgtagatccagagcgggagggagaggactgtaactctgggtttaaagattggtcatcgatatgaggggcaaggagaaacgagattgtgcccagtagaggtagcatcagaatcagatgagggtgaaaggcttcacaagaattccagtagagcaggatcagtaagagatttatgcgcttgcaacaggacggcgatcatgattgacgtacagatcaacccccagccgatcatccaacctacactccattcttttcgtctccagaagacaacttcctctacaaaatcctgggtgtcaaaaagccatcccactttaaggacaaactttcgaaagttgccggttgtactcgttagattgagatcctcgcgtttgctgctagggccgggccagatgttcgggtctgagtgatggtgatgatgatcagttttcttcttatttgactttgggatcccaggtacaactgcggatagcagtaaatcactgatctgagtagtgtatgactgaggaagggaggatccagcaggtcgagcggcggcagcaggaaacgatgattccggtaacacagtcaacgtaggttctattgtagtcgctgtatgaaaccgatcagaaggatgagccgtctgtttcaaggaggatacaaagaactggacatctactggcttggctgcaagcggtatcgggtgggatggatgtagagccatcggactcatctgtagagtacgatatgagatgtatgtgtatatgtgtatatgtgtgtgtatgtcgtctgctcagaactcataaggttactgaaggtgattgaaataaccggttgacgtattctgagtcacgtgattttcacgtgactcgaggcggtgcattttacctggccgccagcgatcatcttgctatcatcatcatcatcatcacctatataccttcgacttggttgatctcccactagtcggcccagacatgcttccacaccctctttctcctcttacagtccttcttttatcaaccgctctcacatctcgcctggcctcaggatctctaacaccgattgacccgttcgctcatccgaaatatgcgattcagttcttgaacgatctgccattggaaaaacaggtggcagagagctggattgagagaggaagagctcctggtggttggagagggtttttgaacgagaatgatcctgttggaagagattcgaccgtgccagctttgattcaggacaagaagcaagaagatgagggaggagaactagaaatacgtcgttcgaaccaagagggtggcaccaaggatgaagagaagatcatggaggatgaggatgggagtcatacacttcagtcagttatgctttggccgggtccaagatcatacgtctgcttgatacctcctccttcaccggaacctaaagaaagagaaaagccgttagtgacgcctggaatgaatccagagttacctgctcagcttttaagtcatttagaaggaacttgcctctatgtacgctttgtttcaactctttctaactttcctaaagctctatctgtgtgacaagaatgcttgtgtcgaattgctttctcaccttttggcttatctgatgggattaatttggtatgatagcaccgacaaggctggttcacttattcttactgtcacggttctgaagttcgtcagtttagggaggccgctcgggcgtggcctccgctttctgaaggatgggtacctaaggaagatcctcaggtatgttgacagagatatgaaaactgttcggattccgatactaatttaaacttcattcgactgcactcgtgcgatactagtatgatgcctacgttcttggtgtatgtctctcgtgtcattttgcatctcttctctaatttgccgtatcattctaaaaacccttgactcttctctcgcttcactttaatcctacacttgtttcgtccaatctgaacctgggtacaacagacagctaaacatgacctgcaaatagagagcaacaaccctggattttcactcggtatgggcgttggcgctcgatacctgaccgctcgatggggtggcgggacagtatgtgaccgaaccaaggtcgatagagagatcgagatccaggtaaaatcatatttccctcaagtttccaagattttctgtcgtgaatcttatctataggcgaaatcattgatcagaaaagctcggttgaccaaatatagtttcactgctcgatgactggtactgatggaatttcactgatcaaggaagtctcgacgtgagtacaagaagcacgggctttctctccatgccgtgtcaggcgcacgagttcacttactctctgttcatccacttttcaacaaacaaaacttcagttgctcttatattctggtgattgatacgcccagactatgtaacgtcccgggtttctcgtcggcacatttatcagaacccccgacaaacatcacgtgtagagagattgtgccggatggatctatcccaaacgcagagattgagggaatgactgtaagacctttccctggttctctagttctcagttttcttagttattcaattcctaaatatcctgtgggaccctatgtatttgctcgatagaaaccgtcgtcggacaagacaccgttaccttcatgggcgatgatcgggccaccacctgttccgaaagggaatagaccacccaccggacagcaaaagaccagagactcttcccaacctcagcttcggcccaaagcgcgttcaaaatcaacatcgccaccaaaatcaaaaccggaatcgaaaccgaacccggtgtcaggcgcaggagctatgaaacccgacccggaagctaaccaagacaccccgccttattctagcgcggaaaccaactctgaggagggtccggaatcggaaaccaaatctcctccacaggtatacatacttatggaagcggaagtagcggatggtgaagagaatggcggagcagatgacgagaacgggcatggaggcgagattgctcggttgttgaaggctctcaagaatggacaagcggacggccggtacgtcggtctgttgtccgaccctgtgcgcactgacggtgatagcgttagcgaagaagaacagcaagaaggagaaggagaagtaaatcaggaagaagaagaggaagtatggcagattgtagtactgaaagacgaaaatggggatgatctgatattggaggtacctgtcgaaggaaacgatgatgacagcagcggttgggcgagagacgagttatagatctccttctggagagcggtagttgttcgagacatattgggatatagtgttttcctcattgatgttctctgatatatgtcgctcaaaaacgaaccaggctgatagtttgggaaaaaagaaacaagaaatgacattcattgatagcctgcgtcacccaaaagaactctactagtacatctctcaactccttagcccccgaacacctatcgagcctgattcatccaccaaacttcatcatcattgtcgttcctagagcgtataggacttcgttgctaggcaacaagccatggttgtccctagcgaacgcaatactcaggtcttcccaagatcttgggttttcagggttaaatgtcgaccacgataatgaagccaacgcgcttggttggttcctaacattgggcgtcatggtcgggttaaaagaggtcaaagggtatattggtgtttgtatcgaggctggagttggagtggggactgatgttgaggtcggtaccggggcagccggggcaggatggctcggaggttgatcgaatcgtgacttgcgttttttcgaagccggaggcactgtcgacggatcgtccgaaggaggaggtttagttgaattggaagttgagtcaccgacggactgagaatttaggtttaaattagatggtagtgaagaaaccgtaggcacgactggtccgttcgatatgggataaacattggccgatggtggtggtggtggcggtggtagttgggatgaaacgttcgagttactcggaatcgggccggaaggatacatgttcggacgatatccaaaacctcctcttccaccttgcatacctcccctacttccctcgttgtatccaggaccattcattcctcctctccctctatatcctcctctcccaccaccactaccaccccgtccacgtgaattcccacccgagcctccaggacgccatctgttctcgtttatgccattgttgacagtagaaccgatataactttgatgatcactcggtccttgatccgcttcaaactgagggccgttgaatgtgttatcgaattgactattttgaactggaaacatctgattttgcacttgattatagttgtaattatagttggcttgatgtagcatagggttaattgggcccggaacaggtggagcgtaagtcggaaacgagttcgatgagtgaattgggacgttcaaatctgggttgaaggttgggtaaactgaagatgacatggtcggtgggaaaggaggcatagtaggaggacctgataggacactcgaagttggatccgccgacgcgttgtgttgtatctgagtcgagactgagttttgaatctcatgagaagggataacggttgctgaggattcgattcgcacgacaggagaaggatttgaaggggtttcaagtgttgcggaaaccagcgcatctgatgaaggtgcagaagcgctacccaagagtatttccaaatgaatggatgacaatgagtcagcccgaaaacatgttctctaggtataaacgatttcatctttgcaagatcctgagaaaactcacggggaaggactagaactcgtgaatttttgaaggagcgtcaacaaagatgccggcacgccaactggaggaggtgtcggcgccgatgttgatattgctgctatatcggagggtggttcgataaccccaccagaagaacgaataggcaaagggatggttgacgtttttaagggtgttgatgttggtaagaagtacccttgtgaaggaagagtcagagaaggtggagaagatgtaggagttgtagtcgatcttgaaacatctttcctgcctatgattcacacgcagcagccaagcaacaagaagacgagatggaaactcgaagggcatcagtgatctaaatcgacccgaaatattatgctgacaatgagcattagggttcctcacttgtactaggagtagaactccttgaaaccttcaagggatcctccgaactattctgtctaacgacctcttcgacgatcaccgtcggagccggggtggcagcttcgaccaggacttgtaatcgatggatgacctcctttgaaaatgttgatcctttttgccagatatcgagaattttttttgttttttcctacagagaacgagttgtcgtttgtccaacggaagcgacagatgtatttcatgcgcatacatatgattcgtgtgcgtgtgtgtatgtgtgtgtgtgtgtgtgtgtggatatggtgaaacacgatggacagaggaacagaaagacagaaaaaaacaaagggatgaaaatggaagagaaagaaaatccatgagtataatgtactttcccttcgaccgacaatcacgatccaaatcgaacggcgcttcatctctcgttctaatctgcctagatgagtacaagtatatgcaccacttatcgctctcctcttaagatgagtacaaattgagggatcaaaagccagcgaaggaagacattgtgaacctccaccaatccttcgttctttttcttctctctctcctttaccttttcctcttgctctcctcacgcaagtgaacaccattgaacagagatatcacgcgcgctctttccggtaacaaaacctcacgggacgaacaaaagacggatgaagggaaataaacgacttaccctgccatctggccaatccttcccacccgtatccaacatatctctcaccaacccatccaacacaccctccgccttcaataagaacccagcacaagtacctctctctccatcaatattcgcactgatctttttgtttacttttgacctgcatgctcgagcgatagagtcgaaacagtacaagctatgaatcttggaggctgatcttggttggagtgaacggtgttggttgtatagattggtgattatctgagaatcgtactggaataaagtttttccacaagagaacaacttgtcagctctcccttgcctatagattgtcaagcaagttcttcgaatacacagattggagataaacctacctggatgtcttttatagccatggcagtcaatctttcgatcttaccgccggataactttcgagcttcgacggcctctttgaggaggtcattaaacggctgatcgaaagaagattcagttcgtttgatgtgttcacaggggtagagtgaacggtaagggcatatcaaccaaacggtcggaacgcaggtttttccatacacatcgtgagagaggagcaaaaccactactcgtcagtcaggatcaccaaacaaatcaaccaagatgggagaagaagagaaaaggcacgacagcagatttcaaagtaggaaggagaaagctctagaacaaacctttaaagcttcaatcgataagtcatcctgcatgactctccaattctaacaaatctgacggctgtccgtttgattcagagcctggatgtgcgtattctggtcactgtggacttgtgaggagaggtgagtaaagaggaaagagagagagagaggtgtagtcagaacaagtgatttctcagaacgatggtgtaaagcaattttggggttccataaagaccccatgtttgcccatatggttccccatcttgattgaagtgcccggctgttgtaatcgtgcccattaggccaatttctctctttcgctacaaaacacaggcgttgaatatataatacgtggtcctaaacaaacgaatgattgtcaaaactggactgaacaggacggaaagagcaaagaggatagcaaagtgtaatgtaaaaagaacaaaaaatgacaaaagggaggaatcgataggtggtagtacatattagaagagtctttcttgagacaagtgaaggagaaagaagacacagacatgcctatcagcgacttgagatggcagaagcaaaggaagaaaaggacgaaggagtgtataggggatgatagagaacacaaagaaattgtccctttagatgagatgtagcgcattgcccgtgaatgatataaagaaaggaagaggaaggactattcgaaaagaaagatgaatgaaaagaaaagggtaggccagcatcagagtagattttttaaaaccagttcgataataacgatctcttagtggctgaagccgcagcggtagaagttgtagtggtaacctatatcgacaagaacggaggaagggtaagcgggaaactaaggcaggagaatttgtggaaggggcaagaagagcgaaggacagcggaaggagaaggaggaaacaagacaaggagacatacagcttggtcagagagttgaatagtgggcagcatgtttggcggtcgagcttggaggtagagactagtaaaatgaagtgtttgcggatcgggtttgttagttgttgtcgtcgtcgtcgtcgtcgtcnnnnnnnnnngtcatcatcaatgtacaaacgatatgatagtggtatcatagacgcatccaggcatggcggaaccatcgaatttggccagctcgagcatatagttgttgggcacggtatcaacgatgatatcccaatgcgagtagtaggtctgtagacatcgttcggtcccaatatcagcctattgatcatggcctgtataagattgaacgagtcgagagactcgagaacaaaccttttgctcatacacggtgatgacattcgtcacagccgcacatggatcttggacttgaatcctaccgtctccggcgaacggagttaacgtgagcgatccgttggtgttcaacgtgtacgttccatgttgccaaatgacgaccgtctggatgcaattcggtagcgatgctgaaagccacccgacgagaaatcaagagagcataagcaaaagaagcgtcaacaagggatagaatagtgcagatataaatgtaccgttggagttaaaccggtactgggcttcctcgaaatgtccttcgttatcactggtccattcccaacgaaaacaaagcccaacgatcagcctggaagcataaaaagaaggagagaaagcctcaatcgggtcaatgcacatacaaggagtatgcgattcctgatgtcgcaggatagttgaacgaataagctagagggtttgcgaatccctaaaacgacgagagagaagacaagagagaagaaaaaacaaccctatctcagtattccaaacagacggatgacggccaaggatctgggtttgagaccgagagaactgaagagagaaatgaatcactaacagaaccagtagtgactcctcctgagccggaactccatgtgccgtaaagagcggtcacgttattgcttgctctgaaagagggagaatcgccaaacatcgaccgcacgcgtacagaacaaggatatatatatccaccaggttgttcaaaatccaattgcaacaatcagtcaacagaaacctttccatgagcttctcagaaatatcttcctctttcatgttttccgtatacgtactccagattttgagcatgaacagaagatagagagaggaggaatgaaagcactgtgcctcctatagtgatgggtacactagcaagtctcactgtaaggtttgaacagaagcgaacagatacagactgtttcagtagctgattaagttgacaggaacctcaacaagatgaatgaacgcacttgatcaaacacgatgatggaaaagcagaggggcagagaaagagaataagggtagaggaagtgggatatggaggaagagagagtagagtatagtagaggatcaagaccgatgcaaagaccaatactcacggcattggctgtaaccaccgattatgtaatcataggctgtcaccactgacaactgatgccttgcggctataacgcttattaaaaaaactcatcaaatagtcatggatacagtatttaaggaaacgttggcatagagtagtgaatcgtgtgtacaagaaaaagagagagtaataaccgatcgatttagaagcagcaactaagaggtaatagtgagattgaacgagagagcaaagagttgttagcgattttgcgtgacgcctcgtacaacaaggaaaagttgaatagcacgaacgggatgatgcaaatgtctatcgggtgagtacatgaaatttcaaacgatcaatgctttgtctctcaggaatcctgtggatcgaaaaggaaacagaaagagggaaaaaagggatcaaaattgtagaaacttaccacagtggcaaggcaagattggcaggccacacagatgctattgatagaaaacccgttcagtaagtcatgttggtctcgtatatcttggtacatagaataataaagaaacagaaagaacaaaaacaaacgcacgccagggcaacctcctcggagtcgcatagccgctccgtcctgcttggacccctcttggacattgttcatggctatacacaagatattaggtgtgaacagccccacacagaagcatcagacaccgtcaaagagtggagaagagaaacatatggtaagaataaacggtcatctgtagtatttgagaggtaatggaaccacaagcgtacacatagtcgtctttccaggctgctgttgttgctgctgcacctgttgaaccacagggacgggagggtaagagatctctgcaggggaagaagacatggttgtatgagtgttgtaagtggtgaggaaggatgaggaaggagggggttataaaagagatatcgagcagcaagtattcgttcaagaagcaagctgtacgttgccgcagcgctcaattatggtgtacactgggtctatatctgtcggatagacaacgtcatcggcgcctccttcctaattagggttatttcgaaaacaaaggaggatattgtgtctaccagatgatgactcctgtgctcaaggttctgaccgctcacccttcagttataaattcattatgccaacagggaagcaaacaagtcatccgaaccagaccggttcatcgccggcgttccctaatcttgttgcttttgatctcgattatacacttgttcgtgtttgtctgctcctatgaaacacagagctagtcggagctgatgacaacttcaatgctcgattgggatgaatggataaatctttattctactttcttttaaagtgggagttagtaaatacctatattgatctttcagcgctggagcatactgacaggactggatctggttcgatctgtgtagtctttggatagacacccatgtaaccggaccgtttaaacgaacaggagaagaactcaacaaggtcatcccccggtatgtcttttggctttcttgaacgaatcgatcgacaatgtttttatgatctgaccgttcttgtacatgtgtgggccttgacttcggctaattcaaaggcgaggtgacccgatctcattctatcctgacgttccagagatcctccacaagatcagaaggaacgaggatagctatattgccgcttgctctcggacgtctgctcccgactagttgagtgaatcctgtttgtctgcacatatagagaaatcacgcctagccgatatggaactcaacatctatctctgttccctttctcggttctggtgtgcgacgtgattagcgcgcgagaggttttgggcttgttacttgtaccttccccgagatcgtcaccgaaggatgaacctaaacgggctatcgacttttttgacgggcaagtcgttttgtgttgtatatgagacagcttcttgtcttgactctctatatcttaccactactgtttgtcggccttggtgttgcttgtaggaaggagatttatcctgggtcaaaactgaaacatttcaagaggttgcacgagaagaccggaatcccgtatgaagagatggtatgttctctcctcatcttttttgctttcggaatcttgctatattacgtactcacagacattctgctcccacctcttatccctgttattttttttatttttacaaagctcttctttgatgacgagagtcgaaacaaggaggtcgagagtttaggtgagcggtcgtcttaacaatagctcttctcttctctctctctccctctctccctactagtatcatccatccatctatctgtctagctcactttcgtttgaacacaccaggcgtcacgatgatcctcgtcccgtcgacaggaacgacgatgaaactgtttgacgaaggtctcaagacatggagaaagaaatggaaccggtgagagcggtggcgaggatgagctgtgaccgatgtaaccacgatgtgacgatgagtgttgaacgaagactctatgcacagccacacgaccaacggctaacccaacacgtgacaattgtgggatccc

SEQ ID NO: 1448 - DNA, 3363 bp, Xanthophyllomyces dendrorhous
gtcagacaggactggttaggaggtaccggcaaggatggtaaaggaaaaggatatgcctgggaggtcagacatgccggcctattaggactcaagtacgaagtcgcagttagaggagatctgttaggatctcgatcggtagaaggggaagatatcaagaaggagctcgccgagaacgtgagcatcaaggaggagaccgaatggacgggcgagaatagggaaatgatgttgaaaggcgtagtagatgcagccgtccttgggtgagtgtctatcttttcttgtttctcttctaaatctttgtgctcaacgcagcccctgaactaactgatcgaccgattgaatgtttttgaaaccatggcgtttaggcttggagatccggatgatgacgttcgatctgtatcagctggatgtctcttgcctgtggcgacatacctggtggaacatttgccagaagaactggatagggttctgaccgtcctgtgggatgcgcttggcgaggggggggatgagcttggaagtagtacaggtgtaattatgaaccttcttagtacgcaactctctccttcccccttatcatctctgctcatctgagtctagttggtcttctgagctagaagctgatctcttcttttgaggggggttttgtaggtaaactaatcacgttcccccagtgcatcagcgtgatgaaagctggcccacttactctgctcgagttgatcccacgattatacccctttttccgacataccatcgccgccgtccgattggctgtacccaacgcgcttcacatctttcttaccgccccggctgtggaatcgttcgaatggattgacgcccgtcttttcagattcctgttccaaaatttgatcgtagaagaacgttcggacatcagagaatctacccttcagacgttcaaagcggccgtccaaaaaattccactccttccaccgatagacgatcaggcattcataggtccattgagcgtggccattcagccttacttgcctgaatggttaaccgttttgatgtctcctcctggagttccactcgacccggccttcttcttgaaagcggacccaccggcgacaggaaagtttggaaagacggccaaaggagcggatactcagtcgttaggctacaatgtggacaagagtgtgatggctcaggatctatcgcttttctcagtggacgacgtgatcagaggtcggttggctgctgctgagggcttggctcttttggttactcatgacgccgccgttcgttttctttctttgtttctttcgttaaatcttatttggtggggattgccgttggtttggctcacaatcttttgctcttgccggggtatctaggctttcgaaccgcactttgcacacttgatggccaactacatgggctcgacctcctctcatcaaatgatctttgcctctatcttgatcgaagaatggacaaagctgcacgacatcagccaatcttccgcggagatttctccttcgaccatcaccgcctcaccagttgcccttccagagagaaacgcgaacgcaaaatcattcgttactcatctgatcgctgtcctcgaaggtagagttccatcaagttactatgagatgctcctcgttctcggccggatctacaccgaatgtcaatctcttctcaacacattcgctaccgatggaaagatttctcccgatctgattccttcccttccaacatcgcttgttcctactgaaccacctgtcgaggtgttcacgatcgagaccgcaggagagatagcaaaaacgacgttcgatcggctgttaacaaagatcactaaaaagacgtccagcccagaactatctggtctgttgagagaacgacagatgagaatcatctcttccatcgggttctacatggccatgaaggaaaaacatgacaggcaggtttcggctgcagtagcgggagcggtgatcgcgttaaggactatgccagccaagtttaacccggtgattcgaagtatcatgaacggcatcaaggttagtatcaccaaaactgactggagaatatggcttcaaaaagactgacatgtttttaatgtttaaaatctcaagtttgaagaaaacatcaatctacaaactcggttctctcattcggtcgcctctcttattgaattctgctctcaccctgcgtctaccgttaaggcaaaccctacggataagatcatcaagaacctatgcacatttgtctgtcaggatatggcccagacccccgtgttttcaaataacaagcatatctttgacggcattctttctctccagcagaccaccaagccgacagccggtggaggacgacaggcgaaggatactcctgtagaaactgaggaggaagtccaagcaaagatcactagacgaggtgcaaatttcgctcttggcaagctggcgaaccgatttggaccgaggttgttcacggatgtcccgaagctttggtcttgtgtttctgatcctctcctcgctaatttttcaagtgagtttgtatttttggatcccttcttcttcttcttcttttttgtaatttttttaaataagaacatagaaagaaagaaaaaggaatataacgttgactgtttcttacacgctttctcttccagcttggagcgaatctgcggatcagagtgtcgctgcatccgaccaagtcggccaagacgtgatcgatagtctcaccgctctatccgttgtggttgtccaactcaatccagagcttcattcccaagtcctcggtctacttcctgcagtcatgaacgctcttcagagtcaatttgccgtactaaggcaggcggcagctaggtgtatcgctgcagtttgtgatgtcgcgccagctttgggaatgagggacgtcattcaattggttcttccctacttgggagatccaactgtggctaaacgccaaggagctaccgaagctgtctctcgtatgtctgcttttcgctctcaatttgtcagtcgagctcgtttgggatattctttgttgatctttgttccattctttcttgatgtgtggtagaccttgtccggacactcgacactcgagctcttccctatgtgctattcatgatagtaccgattcttggccgtatgagtgatcccaacgatgatgttcgtttgctttctaccagtgtctttgcttcgctcgtcaagatggtcccgctcgaggtaagtgctcttcttaaatcctatgaatcgagcctgcttttgctcaacgaatgaatgttttttttttctttcgtttgtgaacaggctggtattcctgaccctccaggattccctgaagaactcctcgccaaacgtgctggcgagcgagagttcttagaacagttattggatggaacgaaag

SEQ ID NO: 1449 - DNA, 4245 bp, Xanthophyllomyces dendrorhous
gaacgaaagtcagctcgtatgagatcccggtcacgatcaaggcggaacttcgaaaataccagaaagaaggaatcaactggcttgcgttcttggccaagtatcagttacatggtatcctttgtgatggtcaatatacttttttgctcttctctatcctttatgttgagatgctcaccaagtaccttggggtttccgtggatacagatatgggtctgggtaaatcgttacaatccctttgtatattggcaagcaaacaccacgagcgagccgaacggttcaacgcaactggatcaccggatgccgtccatcttccttctttgatcgtttgcccctcgactctgaccggacactggtaccatgaaattcttaagttcacggataatctccgacctcttctctatgtcggaaactatcgagaacgagtcgtcctccaatcatcaatcaagaagagggatgtcatcatcatgtcctacgaagtcgttcggaatgatatcgaagaactaagccagtacaactggaactactgtatcctcgatgaaggacatatcatcaagaacgcaaaaacaaaacttacaaaggctgtcaaacttatcaaggcgaaccatcgattggttctctccggaacgcccatccagaacaacgttctcgagctttggagtctgtttgatttcctaatgcctgggttcctgggtaccgaaaaatctttcaacgagagatatggaaaacctatatctgtcaatcgagatggaaaggctaccgctcgggagcgagaagcaggtttgtatcctttttatctttctttcttttggttaatacgacggtcgttctttgaaagtttgtcgagattaattcatatcttcatttgtgacttccctctcacagctgccctggcactcgaagctcttcataagcaggtgcttcctttcctgcttcgaaggcttaaggaggatgtcctacacgatttacctcccaaaatcattcaggattactactgcgatctatccgacgttcaaaaacaactctacgacgacttttcccactccgctgccggtcagacggccggtgacgttgtcaagtccaacaccggtagagaatctggaaaacaaggtcaggcgcacgtattccagtcacttcagtaccttcggaaactttgcaatcacccgtgcttggtggcaaaagaatcggattatccgagtatctcagccaaggtgaccaaagcgggaggtacgcctggacccaactcgatccgagacttggcaaatgctcctaaactattggccctcaagtaagtccattctcttttagcatcagatatgtcagatcgacaagaaccacgactaatttatgtttcgttttgaacagacaaattcttcatgattgtggaatcggaacagccgaaccttctcctacggatgccgaagatctttcgctttcctccattcctcaacatcgggtcttgatattctgtcagctgaaattgatgttggacgtcatcgagactgatctcttccgaagacacatgccttcattgacgtacatgcggatggatggatcgacagatccttccaaacgacatggcgtcgttcagacgttcaactcagacccttctatcgacgttcttcttttaaccacccaggtcggtggtttgggtttaaacttgacgggagctgatacagtaatctttgtggaacatgactggaacccgatgaaggatcttcaggcgatggacagagcccatcgactgggtcagaaaaaggttgtgaacgtctatcggttgatcacgaagggcacgttggaagataagatcatggggttcgtaatactcttcaagatttcccttcttaattattcattatggctaacgattgaaccgtggcctctcatagtctccaacgattcaagctcaacatagccagctcagtggtgacccaacaaaactctggcttggaatcgatgaacactgaccaagtactcgatctcttcaagatctctaccggagaagaagatgctgcagatgctgcagcaaagaagaaggctcagcaggaacaatcaggtcctgtcagccaacaaaacttgttggaaggtttagaagatttacccgatgaggacgaatatcaaggcttgggaatggatacgttcctgggtagtctttgagcaatcgtgatcaagaattctggatgagccctctcttcttgacacctcaagtcaatatgaaagtctttctagatctttcctttccttttgagcttatctttttcctttcactatattcacgtcttcttcaatgttttgacgtcacgaacgagctaggttcgctctaaattattccatctttgcatgccaccaaagttctttctcttatcttctttacccatcgattcccagtttgtacttgtactagacatagcatgaatcctgtacgaacacaagaacagaggaagcctgctgtgaggtgacatctggatgataccgacaactcaaaactagaagccattgttcggaaataggatcacacctccacagcaacaagtttattaattctccgatcgttcatggtatacctcccgatttttgcgtggatgcatttattagggtatagacaatagagtattgtgagagaatgaaatgaaatattcctatatcaaagtagagcttgggaagaataatggggttcttttaattaaattaaaacagtagaaaaggcgaaagcggtggaagtagagcagcgcttattcttcgattgttgagtgtaatgaacatgggcaaattctatcaagcatccacacggtcagaccagcaattgctacatcaagaaggaaatcgattcgaaaccagagcacatggaacaaaggatagagcgagagaaagcgtagatatgagacattatggagagattaccgccgatggcctctcagtctgactaggttttttcagtccgtatttgaccacggtcatcctacgcggcaacaccgctgtgctcttctcgcagatcttggccaaggtcatatctctttgaaatcggcaggccagctcgttctgataaggcggttcaacaggatgccgatagttcaacgagaatttggcatccaacccatgggtcgggtgatagatgacttctttcagtccctcgtagtaagatttggcctaaaaccatccacaaattcgattgatacggacatatcaatgagtattacataccttttccatatgaaagagttagcagcattgtgtgcttactgcttgaatttgtgctattcttagaatatcgaccgaggcaatatcgagcttctgcttttcaatatgttgacagacctccgtcctcaaagagactagggacccaagatcgccaaggatggaccacaacctataatggaacttggggatgatctcggaatctccacccttcttgtcttcgagttgtgagtaagcctgctgaagtctttgtaggaagatggatagctatatgaaggacatcaagagtagaaggcatacgagaagaggtcaagttttgtgaacctcgttgagttcattcaatgaaccataacttacctcgcttctctttctataagattcaaagatatcgaaaaagaacggcgaaaatgctcgcatccgtcctcgaaggagcattcgttcagtattcgacaacggatcggaggttcttactctgtgcacgtcatgcggcgcctaaggcataggtattgtggaaaggatcgtatcaaggagatgttagaaaacaagaacagaaacgtaagagacctgacaaaactgtttgtttgcacctgttgtaattcagatttttgatcaacctggctgagtgctgaataacctcatgacggacgcaaaattaacctatgagagttagatacaatatctacattgacgaagcgatgctcgtacaaaagaaaatacaaaaacgcttacgatttggagtaaggtcattcatggagaccaagacagatggatcctgcaatactatgcgctggaacattttagacaaagggaatcgatatggtggctgaggaagacttttgaagtcgaatggacggagcgcgtgtatgccatgggtgggatggtacatgatttcccgaagcccttgctcgattttttgtcgctacagttcaccataaatgtcatcaaagatcgggtggcaaatgcaaggaaaagaagccagaaagacgagaaagaaccgagagacgaagagtgagcaccggaatttggtatatcgcacttttcaaggttttaaaa

SEQ ID NO: 1450 - DNA, 5416 bp, Xanthophyllomyces dendrorhous
cttttcaaggttttaaaataaaaataaaaatagaagctatcgcttacaacctcgttttcggcaatttgttgagatctcagttgttgttggtggttcatcttttgagccgtaaatacttcgtatcttagagaccgccagggttccaaattcgtaggcgatgcacaaattcgtttgagaaagtttgggacaatctcaggatttggtccttcttgcaagccttcctctcgctttgcacgaacgaacgcgaattgaagacctttcaattcttgacccagctgataatatgtgtttgacaaacacattgaaaagatgaagaggcgacaattaagtcagtttgaagatagacacttgacagggatatgaaagcttacacgtataatctccatagcatttctcaatattatgtagcagctcagcgagaaaactctcatctgttgagttccaatgacacaaacgaattgttattgagcgagaaagtagcatcaaaatgtatctagttcagtgatcatcaaagtacaggtatgtgtaggttccggtttcctacattctgatacttgagaaagacaaagaggatgtccatgataacatctcaaagtggaaaacatttactcaccgtcctgatcaactcatcgttacccattacaggtgcggcatccttataattgttcttccggaaacgttgcagcaacctgggtccagcatcgggcccatccgtgcgtttggaagatctagaaatctgtgaaccggctatactgttcgtataatgctttggtttctctaagtcttgaggcgttacctaaattccaaatagtaagtcataaaataagttaagataaacagatgcgtaaggacaagttggtaagagaagaatcaaacgaactatttcgagttgtaaagctctctacacgagtatgagaagtgggagcatcagttatggtttgctcaaaaagactctgaaagcgtctgattccaataaatcactgaccccgtgtatgactgacatctgcatggacatcaaatctcttcttgcttcaacggacggattcaagagcttgaacgtagctgctcgaggattgattcggccgataaattcgacagctggactcttttccccgccggaaaacaaatttcgaacttgatcatctgtcaggttaaaagggaagttgtgtatctaatcaaacgaaagtaaaccatatagagcacggctcgcggcagataaatcagttgattgtatcataagaaagtaaagagggtcaacaaggaaaagcaacatactcggaatatgtcccacgccgatttagtcgggcctttgatcgatcccttcgtttcaataggcatagcccgaacgtccactggaacctatgaaaccccgatgcagatgtgaagtcaggaaagataggagagtggaggatgatcaacatcttagcacacagtcatcaagaagaaagcaaatcaaaaaaacgtactcctccgataggttgctgatgcacgttcaacactgactcaaacgcctgctgacctgatacagtgacaatagcccaagtctcacgcactcgcttttcgatccatcttatggagcttagtttcaattgaggggcgagttccagaaggtatctgaggacaagcttgccagatgtcgtgggcgagagggaggtgatctacttgaaacagtataacattgagtcacagacacatacacacacattatgtatggtcgcacgcaccaggagactggttcttgagttgacctcatatagggcagattctgaaaagaagctcgatctccatgagaaagcaacgacttccaacacattctgttttgggtgttgaaatacaccacatattggtcagactagtgaattataaaaccgcatactcgtatgtacgtcaagggcgcagacgaaccgctttgatagtgggatggcttttggccaagatctccctgaatccctcagctgaaaggtctccaacatcaaacagaatcctgttgtccttgatgtgataagcaggtaccttgtaccctctgctagtcagagcttctataacggctgtttcattcagcgttacttcggccttgggatctatgtcaatcttttacagatcaggattgtaaacaaaatcaaagaataagatattgagcatgcaggaaacaggaaaatggataacataaatagtagcatttacttggagcgttttcatgtttgggattcgctgtaagtacagttcttgcctcagctcatccgattgattgtctgaggatatctttactgaggcctctgatgctacatctgtcatgtcgtccagagattcagctttcgggttgctagtgacgttcttgtcaatagtatatgacgagtcaggattctgactggaagctttttgaaaagcgtgctcgtccgcttctgacagtttgatcattgtagatgcagtatcacctggtttggctatgagaagctatttaagcgagcaaggcgggacggcaaagtaggatagcatatgttagttagtcagtcttaagccaaagatcaagcatatcaggatggagaagacacttactccccaaggcgcctgtgttccatccattgtatcgcatactaagtcttggtccgatattgatgtctggatgattcctgatctcttccctgtggctttccaagcctcaactacatggactcctctagaccagaaaaaatctcggaacgtgattgaatcaagctcaagtggtagtcgatggatctgatggttgccaccagaaaattttaatcagtacagatgaaattggtattgatgtgtttcatgttaggcaggtaataatcactagagaagacagaaaaggaagtatacgaagatggagagagggaaacacatacgtatgtaatgacctggtcattgtactctatctcatcgtcttcctctgcttcgttttcccactctgaactaccttctccttccgctcgctgtgtacacaaatctttgtctttcgctttctgaaattcattcttgatggttttgcttcctgcggcctcctgtaatcctagctctgcttggcccgccatcacctgcggccgatcctgaccacctttcgtatctacgccttgtgtattatgatcttcatgcccagtggttgaaacggaaccagaagtttgttcaaaccgatgtattctccggatatatctggatgatcggatcgaatgtgggccagcggcattcaccaaggagaacggcgacttagcaggcaagattgaaggtgatcggatgcctggattaaatcgatacaagagatcaacgatagtctcatcagctacgctacaagaacaagcttggaagacgtataatattctcactcttcacagttctaaatatcatagacattttggatccgtcgatgtagcaagccaggaaggagaccgttgtctactgtctggtgttgatgcttgttctattgatgagcaaacaaaattgagatgacacgtgcactttgatttgattcatagtatccattaaagctaaccttgaaaaagaaaaacattacgatattcgtattgtagtgtctaagtaagattcaaccactgtctccttatttatacaccttaaagagcaatcatgtttcgttgaagagaaagtttccatcgcatcgcacgatatcacaaacttgatcctggatatcaatcctttgattctttcactccggtctttgacctcgccatctttttctcagcctccaatctttccaaaatcttttttttgagcacccctacatccggcttcttcctctccgtcccgctactttcggataatgaaactttcgtcggagcctcttgctccgacagactaggctggtttgatttatgaggagaagaagcaagcggtagaagagtggtgactgaagagacgttcagctcaaccaggccagtatctgcatcggcgggtactgaaggctgctgggccttcttcagttgagcttgtaaagcatcagccttagcctcttggagtctctgtaatagaacgttccttgacactgtcgacttcgagttagattttccttctctccgagattctttcgacgtcctctcagtgtccctatcagctgcgcctcccgcttcagtcgacagagtattgacgagagctgaagaccctcggatagcgagctgagccatcctgctaccgcccaagccagctttcccacgcgatgccgctccagtgatcctgagttcacctcctccttcgcctccagatggtcccctaggcgaaggcttgttgtttttagaagcggcagaggtattcatccgtgataacagtgatggatttaggtgggctcctgtcgaatcgtcagatatcgagatggatggcacgttctctgcctctgctgtccaggcacgcatcccccctctgcttgagtcgtcatcaattttcaagattgaactagacgaggccactaggtctgttcgatgaggtggtggacgataatgagaaggctgtctggtggctcgagtggagaacacagacccctggtctggtagggctgctcgtttcggtccatgctctgccacatctgatagtggaggtgatcgagatgctcgccgggctctcaaacgagcggtctctccgggagcaatccatgagtcgtattcattccatcttttggggattttcttcccttttctgtccggaggaccatatcgacccttcaaattcataaaaaagaaagacaaatggtagcgctttgtcagtgtgtgagtgcgacacatcagattagatcaagagaagatcatgatcttaccactacagagcctcgtgaacgtctttccaaacttggactcctttccctgtagcttcttaaacttgaattcgatcgatcagagaaggaagatgaacgcgaaaccgaccttcctcttctttgactcatctgaacgtcttccccctccccctcgtccagcgctctctccaacctcatcatttcatcttcatcagaatccacatccacccgtgttcctgatggtccgatagcctctccgagtccgccatcaacctccagtccagggattgtttgcttaactggcgacttcgatcgtcgacgtttaggggagggtgatcggtctcgatgatttgaacgaagggaacgtgagattgagcgagaggtgccatcgtcgttgtcgtcttgctcaaggcgtctacgggaaggtacaggatcatattgagctgctcgatcatatagatgcagttctcggaagggagatctgatgaatgaatacacctctgtgtattgaagccaatgaataagaccggagataatcgagttaagtatcgatggaaaatatatggcgaaataaaacaaggagggagataaagacagaccatgcgcgaaatgctccgcgtttctcctctgttcaccttccccgacatccaaaaactctgc

SEQ ID NO: 1451 - DNA, 3092 bp, Xanthophyllomyces dendrorhous
caaaagccgaacagccgcgtcggatcgaaggtcaatcgatttcattaacgagatcgtatagctaacctatatcgattcaaacaaaagtgccgagcaattttaacaaatgtatgatcagattaggaagaagacatagactgacataccataaactcgacatccacgccagtccatactctaaattctcttcggaggaaaactgtcgcacggccgatcatgtccgtattgagcgcgaattgctgaggggtaggaattggcttgtaccgagtagtcacgttcgaaccaacatgcttcgtgtataggccccatcgatagatctctcttcttctctccactctgcgctcagtatcatctgcttcgttttctgggttgattgaagctcggtcgcgccgacgaggctgtcttctagttatcgaagctggaggaaggtatggattttggggatgaaccgaagaaggctttgaaacgagtggagaaagaaagaactggagatatttaaggaaagatgtagagacgtgattgtcagttgaccaaaagctttcagcttcgacagaggtacaagagaattgactgactcgaacataaggcggaggggtctccagatcgtgcagcaggtagtctcccatcggcttggagcatagaggacactgtatttaaagggttgatattagacgaagattgtttcatgcacggatagcatcaatcgaagatgtagctacttacttttctagactgctccgaccacgtacagatgcagccaaaacctgatgaagaacaagtttaacgtcagagagtgcgctcgatatgaaattcaatatacagagaccttacagaaagcatcatgtccacagtttacctagaagattggaaatcgaagaaagagtgaatacgatcgttagcacgtacgtttgaccattcgtcgacatcgatcaaatggaaacccataccaatacagtcctatcccgaacagtctgtaggcagatgatacaattctctccctctagttcctcgtcttcttctcgccaccttctccccgaatgtttttctccttccatgttggagtcggttggattggcgtcaggtacaggatcgggaatagtaggagccgacatcccggcctcaacttcgatttcgggttcaacctctatctcagtttcaccaggcgtatgataggattcatgatcggagggttcatctagagtgttctgagcggaagaaagagcaggaagtgggtgagatagagattgggaaccggacaaaatgtcagctcgccttggtttcaagatggattcggaggaaggattagtagtggcggtggtatccgcgatctggtccctgagtgacacaagatcaggtagaagatgttgatttcagcgcgtgatacacagaggggcatgtgggagatcactcacaatgtgtccatatggaaagatcagatcagatattgatgatgtacagatcaagtgtggtcagtttttgagttaatcgccgttaggaggatcaaaaacggaggcgtccgtttgggtggatttatcttttcttttcttcagcattaatcattgcacttacaaccatcttgatcttaccatggacgaggacgacgatcttagtgagccttttcacataagtttactactcgatttaacaggtattgtaatgttcctctagattagctgtctaatcatattgtttgtgtattaccttctttcttcatcaaatccggtccttgctagacgctatccgagctcgacgactagctcaactccaagctcaaggaggaggaggaggaggaggagggagaggaggaatgggaggccctccctctggtggagcacctggacaaggtgggaagcagctgtctcaggaggaacaggaagctcagagacgagctgaggaagaacagttgaggacgataatggctaccgtcttggagcctgcagccagagaacgatgttcgtctccttttccttcagtccaataattcctcttgcattcttgagcctaattcgaaggactctctctcctcttgcttctttgtttcttcttggggctgcggcgtgatcttgatcgataaaaagtatcgaggatcaacttgacccgacctcaactctcgaaacaagttcaaaacatcctcctcaggatggctcagggtggtcaacttcgaggaaaagtgagcgacgagcaattggtcgggcttctcgagcaggtcagcttccttctttcttctctgtctttatttcatgctattcgctgctacttcaaccgctgctacgcgcatatcaatatggtctcttggatcagatcactctaatcttggatcgcgcgcccaaaaacacgtttcattcagagactaactactcctctgttcttctctccttcttatcatattctgctcactcttgtaaaggctcaaggagttgcagcctcgagtggtggatccggaaaaattgtcgtaagctctttcccttgttcctctgtcaaagatcttccatcatctagttcagcatgagaagagtgcatgaagctgatccacgaacttaaccttgacgcatgattcttttgttttgtcgtttgggatacagttccagcgaaagagtcgagagtcagttcctattgtttttcttccttcacaaagcaatcattttgttttcgttattaaacctgttctcttcgtctcatcctctatttagctccgacgacgacgatgatttcgatctttaaataggaaaagaaagggatgatggtgatgatatttccatcacatgtttcacgtatccaagttctacactcaggcatccgaaagaagggaattcatcaaagcacgctcggtatgagaaggcaaaagcaggttgtaaaatacagtcgcacactcttcctaaccctttcgtctactgtttcgttctagtctatgtctactctaagttaaaagaaaaggatgaccgagaaaagacagatgtcgaagaagaagaaaaaagattgcaggaaaaagaacacgtttcgacaaaacgagtacgcaaagcgagaaaaaggaccaagaaatgactcgtatcaacaaggatgaatcgagactgggaattaagatggtatctaat

SEQ ID NO: 1452 - DNA, 3325 bp, Xanthophyllomyces dendrorhous
tataataacagagtttttattttaaaaatagagagaaaaaaaaggaaacccgtttacgacgagacggtgttagaggcggccgcgtcctcggcgacctcgtctccgaacgtaggagctcgagcgtgaacagcagtagactcaacatctgatccgttgtttccgtggatgtccaacttggtggtcatctcggccacttggatgtcggtcaatgtaggcatcctcttggcgacgtgagtaggtcgggccttctcctcataagcctgggcgaagatgacatcgatagcctcgagggttcgtccctgggtctcggggtagaagaagtagatgacaggaatgaacaatgcgttggcgcacgcgaagatgaggaaggttccccaaccgatggtggccgtcatagtaggagtgacctgaacaacaaggaagttgaagagccagttggacatggttgacacagcgttggccttggttcggattcgaagcgggttaagctcggccgggtacaaccagggaaggggaagccagcaggacccgaagaacacgatgtagaggaagagtccaaaggcggctcccttggctgcctgagctgttccaggaataaggcaagcgaatgtgataaccatcgcgaggcactgtccagcagatccagccaagaacatctttcttcgaccgactcgctcaaccaagaagaacgacgataaggcggccaaggcgtagacgacagagaggacacctccgagaacaagagcgagtcgggtctccaatccgatggagttctcgaacaagacggtagcatagtagatgacagcattgcaacctccgagctgctggaaaatctgcgacgaggcaccgacggccattcgtcggaagtgctgcttctttccaccgacgaaaagctcggagaaggaagctccagtctgagcgccagaagcggcgttgataccctcgacgataatggcaatctgtcgctgagtatcttcgtcctcaagctcgtgtccgttcaagtcggcaatgatctgacaagcggcatcgtagtgtccgtgaatgaagagccatcgaggagattcaggaaggacggcaactccggcggataggaagatggcaaagatgacctgcagagcaatagggagtcgccacgagacactgttgtcaatgtaggacaatccgaaatcgatccagtaggcgatcaaagtaccgacggcaaccatggaggcctctacacagatgaggaaacctcggttgtgcgacttcgaggtctcggccacccaggacggaatggtcgaggtgttggctccgtttccaagaccggtgacaattcgtccgatcatgaactgcaagaaacccttgtgaggcccaaaagcggtgacctgaatgattgttccgatgaccatgacgaaggatccaactagaggaagaaatgtaaaaccagaatcagccagcagaaccaggcgcaagatttaataagaaatgtctacccacgccacatcatgttccttcgaccgagagactctccaaagaagaaagcgaaaatggcaccaaagaagcaaccgacctcgtacacagcggtgactgtgccctgaatagtggcatgaaatcttgagaagaagagatggagtgctgtggttagcgagacccgtgcgaaagcaaacaagcttatcagagtgggaaaagaaaaggaaactcactcatcatccgcaccagaactcctgacctgatagaagtctgttccgaactgtttagcgttgatgataccagacatgactccctgatcgtaactggattttaggtttcagtgcgcgcagtgacgacaacgtcagcgatcgagaaatgttgcgttagaaccgagacaaatatcctatcaaagggaagactgattcgacatctggagaaactcacccgaagaggaggaaacccatagtagcagtgacggtgatagcgttcacaagcttgtttccccgaagacccatccatcgtttactgagagtgaaaaagagtgcgcgcacgatagtggttagattacaacaagaagaaaaagaacacttgttgtttcaagagaagaaagaagccgacaggcacaaaaggtttcgacaagacaagaacaagaaaaaggcgaacgaacgggtcggtgttgggctgctgctctcgagggtttcgagcgctgagctgcatgttctttttctcctgggtaggagaggaagcgccgctagacatgattgtgaaacggaggactattgattggatggaaaggtaagaaagatgtatgtagaggttggatgtcgaagagctaccaacaaaggcgaaagcgtgtcttttaagagttggtcgtgtgtgtctttgccctggacctattcttgaaggaaagtgaagcaaaaaaaaaagatcctttatgagtctcctctgcttcttatattttttatgtccgtgtcttttcaagtgaggtgcttgtgttctttgcccggcccctcttccggaaagaggaaataatatgcatttttacaaattgggataaatcgtatgaaggactcaaaaccaaagggttcaaagggtgcacaactgagtttgtcagttcggatgggagtctaaaaagatcggccgctggaccccgcggcatcatctgtggagtcccagctggcaatttatcagtcgtttgagctccctttataaaacttgtcagaaatgttcgcccttgaactatattaagatacactagtaggaggtggagtatccacatgtgacatcatcggcatcatccttcttcctatatttcttggcaggcctcataagtcaaatgtctacagatctgtttatccgagctaggtcggatgattttgaccggccgagacaaacatctaaccgagcattctctattaacaatgtctcgttccaatagatagaaattcgggtcttgtctttgagagatgaacaaaagagaggacgagacaaagcaaagacaagactgatagaaaactcgatgagacgatcgggattcgtttacagttggaactgctaaccttgttttcattctgtcagttctttctctcgggttcatatcgcttggcccgtcaaagaaacgaccactgataaagagaatgaaggagaactgtacagtaacccctcgtgcggacgtgtctcaaacacaaagcctcgttcggagtaatgaaggtatgctgacctcctgtgagccatcgatacgacgaaaagaccgacctttcggattctaatagatcgggcataatcgtataatctagtctcggtgctattcgtatgggtttcgtagatctaatagctcgcacccgggaaagccagaatagaaaaaaaaaaaaaaaaa

SEQ ID NO: 1453 - DNA, 3434 bp, Xanthophyllomyces dendrorhous
aaaagaaaaaaaaaaaaggacgccgcccgctagacggagtcgtattcatccatctcgtgcattagaccgcttgatttcatccttcgccaagcagtctattctgaccaacagccgcttaagagatcgcataatctgatcgaaccatcttcgatagaggtaactctttcgttagacgggggactacctgcctgactattgaacaatatagctttgtcttcttggagcggatttgtgaaaacgtctaaaaacggcccgagtacgtttccgtttatatcagtcgtgtgctcggtaagaatgtgcacgagatgggattactatccaaagagtagagactcagtgacagctggggatacgttcgcggcacagtggaaagggacctatgtccagcgtctagatgacggatcctctctgcggagtccatccgaggaatttatagacaagtaataaccaaagagagaaaaaaaggacgagataagatggcagcagaggctgttgagaatactcggatatagtgcatcgtcttctgattgtcatctacctacctaagacttagctagcgcatcaggctagatgatatctgcttctctcttctgttctgccgttttctttcttctccttcctttccttctccttcagctttcactagaactgtttttgagttgctgagatcattctgttcgatttccgagctcctcagagaccatacttgctgtttgaggcatcagcgttcatattgaacagttctgctggtttcgttcagttatcgttcacactgtacttagcacatcattttcaccatcattattctaaattgcttcaagaggcgtaccccgatgttagtcttctatgtttctgaagatatatgacctggtatctgattcttgttgagctatctgtgactggtaccagtgtatagaggatagaatcaaacagtaatgtaattgttcaacacattctttgttgtccattcacttttacatcccaaactggcaccagtatagaaaatcaaaaacaacgaggaagaaatctaggatgacggtggatttcctcaaatctaaacatatcgctgaacaggatgaaggaactcacttgatcgaggaaagcattcgacaactcatttcacaattgttattctcaactctaaacccttccccggtgctgatctctagattgagtccctcgatttcctcacatacacgccgcatcatctgtcagacattcaagatagaatgatatggaagtcctcactgggagctgcatcgtgtttgacaacctgaactaatgatgagtgtctataaagtggcaggcacacagtacggagacgaccaagaactctgagccttaaatgttataggcgctcgtgttgtgcctccgaaagaaatcccttcagttagggttataacggattgatcttccatagtatctacttcaacaccagatttagccaaaacatcagtttattccatccaagaactttctgcaatatctctattctcctgagatttggcaatgtacagttaaacagaacatattcatcatattgtggatggcttgttacaagcggggaacgttggagaaaccaagctgtcaaagagggaaaaggctgggtctatcatcgtcggccgaatcaaaagggaactgaagacccaaacaagagtattgacgtagtcctctaaggaacatcgattgtctctgccgaggaagaagttgatgtagatggcattggctatcatatcacagggcgtttacggtccagatgttttagcctacatgcgcggtttcagccggttcggcctcagtctgaagcagaccgattcactctatgagagtatcaggattatgtactcgaaattgaacagcaccacaaggttgagcaaagccaccaagcaagcatctaaacgagctgtatgaggctgaaggccgttatatctaatcttgaaagactcctctccatgggcgcgtcaaatagacgcgttcagcggctgaagcagacgcgtctgtctctcaacatcagatgcagaggaatattcacccgaatcaaacgagaaaagacattgcttattcatgatgtttcaagtagacgtctgaagcatgctatgggcatgtaaaaaggagaacataagaggattggctttttacgccaatcctgcacttagtctgggcgtcaggggagtaaaaagagaaaagaaggaaatagagaataaacaacacaagccgatttttttcttcttaccccaagtctaatctctctctatcctcgacctcgctttcttttttctttctccaacttctgctctcgacctaatctgtttcatcagcacattcgtttaatttacatacatatacatctaccctctctcaaccatccagcccatcattctctatcgtcatgtcttcccgccgatctagagctaacatggtcctacacgctcaagcacgcgccgtcgtgtctgcttctcctctttcctctcctgcatcttactcttcttcttcttcttcttcttcttcttctacctctacacctctgccttcccgaacgatggctgcgttccaagaagttgtgaccgttcgttcgactgagtctgcatcggcaacagctacagctgccgccaaggtgaaactacctgtcggagcaattgcaggtggcacggtcgcgggggttttggtcgtgatatttgccgggttattctggtggtggtgggttgccaacaagcccagagttagttctatctgacctctctctttctctcgatcactgactgcgttcaaaatgctgactcgctatatgttggaatccggtcttcaaatcttcttctaaatttctttggtctcttggcacgcacaggaaatgactcctgaggaacgacaggctcgacgacgaccgttgcctaagactgctcccggcgtagtaccccgttcgtttctattttctctctttcttgcttcgttcctattcttatcacatcttctcgcaacctaactggacgtgaaaactaaccacgaccatatccatcctgccatacgcaatcaagaaccagtctcgacaacacgaccttcagcatcaaaaaatccttattctgagaaggctgtgccattatcttccctgagatcttcacccactcggtcaacatctggaacgcctcttttggcagctgctgcctctgcttctgaatcatccgttgtcttgccaattgtcaacaagcacgctcctgtaaaaccatcgccactagcatcatcccgaatagcagctcccatcgaggagagtccaacgtatcccaaatggggtgaagttccattcgtggctcctccccttgcacccttcagcggatcccatcaacagtcgattcctcccccgactcaagaaacttactatgaacaaccggctggatcttctaacgggatttattcagctgatcctcgatcagtcgacaacc

SEQ ID NO: 1454 - DNA, 41057 bp, Xanthophyllomyces dendrorhous
gtcgacaacccttttgctggaggatcgcccccaactgaggtgtatccccaagagaagatcggatacctcacagtcggcactccagccgggaaggaagttcgaaggacatccaatgtgtcagctgtgagcgagggctcaatgtattcgaacgcagacgaggacgcgtatgacatggtgtctgtcaatgcttactcgggacagcagccgcaataccagcagcatgccccaccatatggcgatcagaggcgataggattattcaaccgtccggatcaatttacaatcaagacggaaactttattttccttgctcatatcctaccatgcgtatcaagtctttcgcgtgctcttcttctcaatctttagctttatttctgttgtacctattcctgtttgcgcggtccgcgtattcatctctgcctcatataaacattagtcttctcctctctttcacttttccttgtttcgggtttctttctctcattccatcttttctggctctactctctcctaggatttgttccttgccattatcttcttttctggtcttctcatggactcttttactgcgccctcgagggttcattcttccgtagtatatatatccctgcttctcttctatttcttgatcatcctccaggtatgctacaaagtcttctttatcagatcctctgcttctctatgatatcgagttcttagtttatgcgtgatccttttgagctcgatcattaaatgcctcttttctttccttcggttttatattcttttctcaatttaatcttcagcattagattttattttgtctagaagtgtttgaggtgtattgggatgaggtgaatcgaaattcgaaataaatgtagtaaaatcagctaacggtagaaaagactaaatggatagtacaagtagaagagacaatctcacattctccctcatccaagtgatcaaatcacatcgatctgtatcctttttgagtcctgcaaatgccatctttgttcctgggatgtaacctgaggagtacatgagtgggtaagagtgtgattgaaagatagggcgaatcgtccaaggaattgtatgggatttgttttggagggttcattttcgtttcgcttgatcagcaacgatacacgacgacgacgatgacggcaaacaagaacgttgctaacttgcctttaggattgagaaggtactcgaataacgtatgttcatccctatcaaccaaacaagtgcaaaacgtataagatcctccgtacgtcttgagcgaaacaccgacgaaatgttataccaagcagagatagctgccaacaagtttttgacagagagagaacgaaccatacgattcccttgttgacattggcagctgtataattataatccggagactgccccgtctttcgtccacttctcaacccaagccgacgaacggtgacgttcgaaagaaactcttgttagaacagactcgatgatgccaaccccattcgagtcaagtacaggcgctactgaaagggaagagcgtacaaaagcccgaataggttcggcccaactttatgtggaccgtcctgatcgacagtatgacactgggcgcatctggtctattgatggttcatccaggtatcgagaagataaagaagcgggcgataagcacatgcagctatgtgttgtaccaccagtaagctgaaaatgttactgactttgaacatccgagctccctgtaggactcgttagttgtcaacatatcatctccacgcatctccatgtattcaacacagatgaatcggacgaacctttgagatatctccttcgacaaaagacatgatgatagctaaagtcttgaaacacgaatgcctttaactgcttacaaggatgaagtatgaggtacccgatatggagagagtttgtatgtggttagcacgatgagtaggtgagtatcaatatcgatcagaactaacaaacaaagaaagagaaagaaggaggggatcaagtagagagagagaaatcgaaatgggatcaacggctcagttaagtccctcaagactgaggggacttggcctgggaccgtcggaaaagaccgcaaaagaagtcttgagaatctaggagtcacatagacctatctgattgaatctcacatccttccgtcggcaatacgcaacgatctctaatcaagtgaagggctttgggattatacatgcttttgttatagacaatcatgtcgatttcgtgcgcaacgtattatttctgaagctttcttgtatcccctgcaaagtacagcatgcatttcaacctatttactctagccctttcccactgcctctgatggatactttacgcggcgttataagaccaccaaggatgaacacacccggatacatgtatctgttcaatcgatctcagcgtattgactggagagagcgcatacaaacactagtagatcaatccaaacgccagctctctggtgatctttgtcgtttgctatgatgagctccctccgtctttgtccggaactggacggagagaacggacggatctggttgaaccaatcggaaagtaattatatatacatgtaactaccacgaaggaacaaaccacgatgatacagattactacacaacagggagagattggcaaagccagaaacattcgattaaaaccccaatccaacgctgccgctgatgaggcactcgatgagccgcactctgaccatcagagaccgacggagaagaccccacggtggaatgttatgcaacagcaaccgccgaaacgggcgaatcagggtggatgttttaggcgaccgtaaccttgattacgtaaaatcgcggaaggcggaaatcgtttcgacgactgcgtggcgaataagaagcttgcaataagaagctctccggtttttttttcccttcgaccaccaccaacgacttttctttctctcactttcattctctttcttttctcgttactctttctactctttaatcaatctatcaacaatgcctttcgcctctggagatactaagaagggagccgctaccttcaagaaggcttgcgctcagtgccacactgtgttcgttcttcccttctctcttcccttcgcatcaccttttttctctttctcgctgttgtatcgactaatcgatcgatctgttccttctcaaattacagtgaggctggaggagccaacaaggtcggacctaaccttcacggtttgttcggacgacagtccggtcaggttgagggattcgcctagtgagtcccttttttcccttaacacctgtataccattcctccctccgtacaggaatctatagaactaaccgatcacgtttatgaaaaccagctccaaggctaacttggctaagggtgtcacctgggaggagaacactcttttcgatgtatgtttcttgcttatcagctctttcttttctccatatggaagctgattggctgaatccgattcatttcctacctttttttcttatcagtacctcgagaaccccaagaaggttagtcttgtcttccttctcatcgtagagaatgacagatattgtccgatcagacgaactcttgtcgatccgatccgactagatcatccgtctgtcaatgtcgttccctcccaatcattgttctgacttctcgccttattttcgcttttatagtacattcctggaaccaagatggcttacgccggtctcaagaaggagaaggacagaaacgatcttggttagttgccttcacattatcaatcgttacatgcacttggctgacgatcgctcatttactcttgatcttgtttctagtcacctacctcaaggagtccaccgcttaaaacacctttggtgaacccctcattcgtttgcactcgactcccttcccacacatatataacaatacccacacactcctctctagctatctagttctcctttcgtgtttcgattcttctgtttgtttttctacatcctcaacatacatgggtttattttcattatgaggaaagaaacccctctatgtgcaaagtaatgagaagagaaaagagaacacaccaatcatagtaaagtagaaccagaaaaaagtgacgtacgtacttgctatccaactcgaccaatcgggtcatttgtgtgagtcctcatgggtttaagggaagaattcgaacgacgagatagtgattacataatacgcacgttttctcaggtgccaaatcagccaatcagtcgagctttatgttccttctctccttgccgattgcatctctcgagcaaaagattgatggatcaaaaatcttgggcgatccctggggcgcttggcgggctctttgttctttctttatgttcttgtcggaaggggaaaaaagttgtagaccaagacatttacacccgttgctcttgatattagaacgtatatcgtaggttgcgccgtcttgacatcaatcgatctccacaggatttgtacaccttcttcaacatacatggcgtattatataaaacagcttattacaagtctgatggcctgatagaaacaaagggtgaagaatacacacagccgctattcatttaaggccaaacctaagtctttcctttattctttctgagcttggctacagctcgtgtgggtttgacaacgctctcgttcacttggactgtcattctctttgaagggttttccatcaaccggcccgctttgatctgttccgagccttatgtaatcattcacgatcaactgcgttatcttttccgttctacgttcgcagctcacgagagaaaaaggacaaagaggaagaaagacatagattgaaaggaggcaacagactcacggacaaagcttgataggagagaaggaacatatatgggcgccagtttctgaatgtccgtagtccgtaacacggattgaagcctcatcttgctagcggtgactttatgcgtcttactcctctgctgccagtttgccttgatgagcgaaccgaatgtgcgagccaatgtcgttgcgtaaggaggattagggataacctcaccatcgaaggggaaggcaccgttaaaaccgtgcgtagggtgacgaacgatctccagaagcccttccacatactctgcgcgctgggaaagagtgacgtttgttcgaaacatagcgcatgaaatcggaggaaaatcgtagggttagttctaccgatgtcggtttacaccgaccagcaccagccgtgagggaaactgagaagggactaacagctcgggtggagaccagcatgtgtaaaaaatctacgcaaggctgcaagccatgcctgatgaggcctctgtctatgttgttccttagcttttgtaaaccttttaggttttttttgtgcgcctcgaatcgtcggtcaaacccttggacgagatcgttgaagacgttcatcggtttctgaccatccacttgatgagattgataatatacagcgcgacaatacttgatgtacgaaaccacctgtacgaaagggagaaaaaaaacacattgagaaaaataaatcacaggacatggcagtattggtcttaattgcagggggcaccgattgagagaccgaagaaaaacaagtgatgtcgagatcatgcctaccattaagagatccctggcatcatcgatatgagtgcggatcgacgttgaataatttgcaatctgcttctcaagatccttaacaacaggcaccgagtagctatcagaaaccccactttgaacgagatcctgtactattcttccaaactacacacaaatgccaagtagagggatcagcctggagggggaagagtgagcatgatcaatgtatgataactcgctacctttacagtccattcggaaacgtccatggaccttgcgctcagttctgatttacttctcagtcctgggcagtgatttgaacgaagacgcggaagacaagaagaagaaagccagatatcagccaaagataaaaatgtcataaaatcagcatgcgtatgccaatcaagcactaaaagtattcgcatcgatcggttcaagacttaccttgcatcagcgagccatccggatagcccctcacttccttgtaaaacatcttggcacactctgtgaggtatggagggctgtatcgacgatcaaagtcgaaggaagtgggtgtaaacaagccacaattggggtggtacaagatctctctaactgataagagatccgattcgatctatgtcacggaacaatgcttagtatttgacaaggttcaatcaaatcaaggtatgaatggaatggatcccacacttaccaacagtctcttcgttgtttggtggtcttgctcgtcagacttgtacatctgtttggtattggttatcgtgccttgagaaatacctttcaagaaagaacgctttaacaaatgacaacagtagtcacggtaagcaagctacatgacagcaaaacatgtgtgaagcatgatgcacgaagagctcttcttacctggaatttagcttggctcatgacataaagctgaagatattgaggcgcataagacgcgaaaagactcttgaggtacgaaagttcgtcgaccaatcgtccggtgtccttcggaacgttctctctgtagtcgccatcgtgtgtctggattaccaagatcaagacatacatataaagagttagtgccgactcttctttaggtttcctctattgtcttctgttgaaatcgttgtaatggatcactataatcaagcgataccaaggaagaactgcgtaccggtgattgttgtatcgatacatcttctacagctagcgcacctttagttgagcttcttaaatcctagtaaaatcaaatcgagggaacatcaaaagattaatcaacaaactgcttagtcggacagcactctcaacaacaacgacaaccgaaacacggacctgaggaagtatttctatcgttatggttttctattcgaatcaatacaaacccatcagtaataagtctttctctgtagaattcgctcgtcaacggagagatggcagaagacatactccatgaatactattgccatgaactctctttatgctctcccttgattcctcggatggatttgatagtgaaaatatggcagtccggttcgactcccatcgcagtagcttcattggaggcataccgcctagactgtccaaacaactatcaatctgatccttttggatattactgggaagattgtgtacctgagaagatttcaaaaagagaccgaagagaaacatgtttccaagaaaagaacggaaaagtagatgaagacgtaagcatatacgattggcatggaaaaaattggatatgatgagtgctagagatgagttttaaagatagagcatggcgtgtctgagataaaagacaaaatacgcacacgaaaagtattccatttctcatgttctagcccgattatatctgatgagtcagtcttagctgggataactcgaatattcacgggacgctgtagagcacagtatcaagaaagacaaaggagagtggtatcaattgcatgttcactttgattatcaaagtgaaaggcaagtattcactccgccaaaacagcgtccatgtaaacctaagatagattgtagagtttcgcggtcctgaaccggaatgactgccgtgcattctcctatcttcttcctgatccggtttatagaatttggatgtatatcgggtatcagtgtgcgaatgtacagcatgatatcttgacaagacattgctggagatagcgaagatatctgggtcagattgataatgattagaaatgaatgttcgttagaatcggtgcacttgcgacaacaaaattctcttattcagtgatagaaacacatacaagcagagtacgaccagataagcaatttcggttggcatttttatcggaggagctggacatccagtacaatggagctatgtcgagcatatcctttcattaaaattagataaaataaaatgagaaaaggccatcgtacgtacgaagatacgattaatggagagtcagaataagttgttccaaatcggtcagcaatttatggcgctgcaaaacttgatggacgaacactctgaagttcaggttgaactctcatgaccatcttcttcagttcatatacggatatacccccaatatctaccagaatttgttggtttaacatggctatgctgggtactgcccaaccttcgcgaaggagtaactcgcgtagatcgtttgcaatgtgtttgcgaggaaactttttcgaaaagctgatctgtgaaagatgtgtgacaattcgaaagtattgtctgttagtacaaaggataatactgagatgaatagacaggacaaactagactctaacctgcatagtgactaattcaggtatactgcttaggaacagtatccggctatcagagcgggatatatcgcggctttcatacttatttgccagaccaacttgcgcggaagaagacacgacacggggattttgccctctttttgaggtcgagagagcctctaagaacttgcgctcctgtttcggggacggaacgatagctgtcatcgccggactcgcaggcacagcggtaagattctgttgaaacgacacgcgtgtaatcacggtagactcgacggtattggcaatctgctattcaggataagagaatatagtatatgtcgagacagaactcactccccaatgtgcctgaatatcatggattgaactcaacaatttctgttggtcctcttgtgatgtctgaatgagcccggacacctcgcctgtcgacttccgagcatcgagcacgtttatactattagaccaaaagaagttccttaaggagtaagaattcatatcgggaggcaatggaaaaatctaggtagtgatcccattgaaagaagtcagatgtctctaagtcactgaaagggcctagagtcttagctcgatgatacgttaaacgaagagagaggcacgaacagaggtgatgacctgatgtccatctcttggtatctcttttgtctctgtccgaactgatacaccattttctttgagtcgagaggcagcggttgatgaacgtgatctaaagaatgatgccgatggtggaggactgtagcaaggcttgcctttcaaagtcactaaagatgacgatgaggacgagcgttggaatgatgatcctaagaacactaaacaagacgaaagctccaggagcaacaccatcaagtcagtctggagctgcagctctcacagaagaacgacatcaaatgcagcgtacggttgatataacgacgttgtatctttccgggcaacatcactttctactgaagaacaagccaacgatgatcagcgatatggaagtaaaggatggaggagatgtttcaggaacatagatgtttcagggcctagggttaacattggttacaaagatttggttacgatccatgatatcacaaactttggttacgatcgcccctccgttgtattccgtccgctcgtgcttacgctggtaatctggttgaagctcattcgatcctcacttttctccactctttctagtcgatttatcgatctggccgctcttcgttattacccacaacacaccaggtcagccgaaaaggagtaaactggctctggttctggaaagagacatcaaaagacgagaaaaagccatcccgttaggagaagtttgaggtttaatgagcccatgaatttactacgacaatttcaactctcgtcgctgccttctccaactatttcgtctctatcgcctcgtcatgatccacaattctcgtcggttggcgtttgttccgctgaaaggaacacccaatccgagtcctatgagctgtacgtactcagttgtgccatgctgtatgtgttctgtttaccatgcagctgaaactttacgcttctgtcttgttcttctataattttatttgtacgtttgggtttctctttttcttttttcttttttcaccttcctttactattcagtatcgactcgtcgacttgcaaagatcttgacaccaccttctttacctccaccctctcagttatcctcggctcgttcgcatactttggatctaccagttcatcctactcgttcccatgcctctcgcccaacatcacctcctcggtcttcatccaatgtacgactcaaatacatgcccatattcgaagatcataccctgtatacaccgagattttctgattcttcagaaccaccgataccgacatattcaatcggttcaaccgaacggctgactccttcgcctaaacagatgaaaccatccaagaaacggccggctttatcctcgccttctatgtccaattctcttcctgcttctgcttcctctccacctaatagatcgactgcaccatcatacatacccccatcaaaatcaacgaccaacgcatcttcattatcaccatcgctaccatcattatcatcgttgcggccactgccatcgacatcatcatcatcatcgtcatcaccatcattacctgcgcttgaagtagtacatcccttaccctccaaagttccgccatcaatattgatatcagaatccgtgaggctgagcgccgatgaattggcgcaactaccagccgacgaaaaagtctacctagtagcactacagtcgatatcaaacccagaagaactcgcccgattcttaaatttcgcaaaagcatgggtgaaggtggggaaaaaagtaccagagcgaacaggatgggttatcgcaggttggtttacataagcttctctctctctttctgtagacttgtatttactgactgactcataatactaaatcccatgcgctcaaacgaacatttatattaacaataaaaaggaaagctaccactgatcgatagtttaaaagtacttcgttcgacccgacaatatgagattggtcgcgtcccatctggtcaggtcgctcaagttctcctccgaaagcttctagaagagattcaaaagccaaaagggattccaccaccagtcaagtcgatggccattcttgaacgaatatacaatctatggcctaggtcggagaacgtctctccagctacttcctcatcagtctcaccgccgacctcgttttcatcagacgatccatcttctattgagaaggtaacggtgtccttcgtcgaggacccactctcttgggcgctcctaatcgcggcatacagcttaatccttaaacaggaccggtacccattcaaatacaactttatcgagcgtgaacaggaatccaactcgacatcgacgttcggaataaaagagaatcttttatctatacggaactacaagcttgaggacaggctggctgcgttgagttcgatctggtccgcttatgatgtacgagatgagaaagagcgatcgactatcaagaaagtcgttgacgggtttccctatcttgactccaacaagttcgaaagctggttcgacatgtttaaggagactatcgaagatgaaggaggaatttgggcgtcgagacatcggttagagaacatggttcttggccgagcacgattggttaagttatcgaaagactggacggctggaacggatgtgaaccggttgacttatccttgtcttccacccgtccgaccaccatcatcatcaccaccatcaataacacactcaccacaaccggcaacgacaacaaccccgtcctcaccacctcgattagctcctcttatcctatcgtttcatattcccccttcctcgcccatctctcccgagtcttccaatcctaatgctgtcttccgaacgactctttcgacaacaagggatcttgtatctgatcttcggtcttcctttgttcgatatccatccgacccgattctcctcctctttgcttttcgactggccttccgggtccctccttcggaccctgacaggtcaactctcctttctgatcttcttagtcgagtcaaagtgcctgtgtcgtggagtcaagtcatgaagttggagaacgagagaacgacgggaacagttcagaggaagagacggcagtggaccaggaaagtcgtgaaagagggcttggatgagttgggaggcgtgttgaaggggaggtcaagattgtgggaggatttattgaattcttgaccaaaaagaccgacggagaaactcagcgatagcctacaccatcttagtagtacacaagtgctgagactgagcaatatcaaacagaaggaaagctacagaatgtgacatcagcaatctttcctacgtcaaccggaaaacgtcttgataaggaagaatatagacaaagcacaagaagaacgagacgatgcccctcgcgcagaggggtcgaggtggggggttacggtcaagcttaatcgtcttcatgaataacaatcgttggttgttcaaacacgacctcctttacaacaaccttgtcttcctctcccttctctctctcgacgtcaacctcttcctccctcactttcaccacgatatcctcctctccatcttttgagcggtcgacatcagatccttcatcgtcatcagatgcgtctcctggccgtttaaatgtcacagcagccgctccacctcccagctttcttttcttctctgccccaccatcactcgcacccgtattagcaactcctgatgcatcggcagacgcggctcgaccggcgttggatcgggcggctttcttcttttgacgtttcagtcggttcttagacgtctttgcctcagactcggccaaggccgcagcttgtcgttcttcgaactctttctgctccgcttcctaggagagggacaaaaggaacaaacatattgaatgcgaggtagagggtgtgaatgacgcgtctgtttatgggtgaagacagaacctaagggacaaactttcttcgacttctcgtccatcatcttgagccgctcgtactctcttcttctattctgtttgtagacgtgaaactctccggaaccggctccggcagaagaaccctgaacgttcttcatcatctctctaggcgcacgaagcgtcttttccttcgtaggtttaggaatatgaacctccttcgaagggtccttgagaagcttctcaagctgcatcaagtttgagccagagaacgaccataccaatgacagaggaaacacccaaggcactgtcagtcgaccgcaaccagtaggtcccagaaagaataagggaaaggacgaacgtgaagtcgctgggcctcgaccggagtcagattgtgcttatttacaggggtagacgatccagaaaccggaagagacgaaggatccggagaagctgaaggagccatgatgaatgtaagagcaaaggatgagcggatggataagctatgagtaaagacgcaaagatagatggatggccgttggtggatagaagtgtccaaacgaaagaggattacgggcgttcagcagaaaaaaactatccagactacaaatcctcctaatcaggtctacaagaatttcctaataaaatctcgatcacaatttccatcctctctttcttctcttggctctttctttcgtttgtttccatcaatctatctacaaacagcactgactcttagcgaacaacgactcgtgctgttctcctcgtgttctatcccgatagatagtcttggttcattcaaggcccgtcagagaaatatatattgaaacctttggcgtctttttcggatggctgtttatcacccccatcacctgcttgccccttcatcctatccagccaattcttatccaatctcactcgtctttgatccttatgccgatcttctttggtcaggctcatctaccggtcttgtccaatcattctcatctcctgcgtctttcacgaggaacgtctgttttcccgctcatggaagcaaaccgcttggcatcactcaggccggactcgctatcaactcacccgccgtcagagagatttgggtaggcgatagagagatcatcagcttgacagaacgagggctcggcggacggaaacgaggaggagcagccaagtgggcactggatgaaggagcaacagcgttgagcagcatgtgtatctctcctacaaactcgtcagagatcatcgctggtggcacccaaccggcagcgctaatcgtcaacactcatacgggttcgctgattcgaacggtacgcttcatctttactcttttgaaagctcaaacatatctatcgtccaaaactgatcatggagtaatctgccgctcaggtcgactgtccaaacctgagattcgttcgacgagcagctagattggttgcgaccgggtcaaccgacggcctcgtcaggttccatgatcccagatcgatgaaagttgagcagagcatatccgcccatcttggtggtcttacaggacttgaggccgtggggtggaatgttatgactttaggatataccgtcaagttcgtccttccctttgtcttcatatccctcacgcgtggatttgtgtatgagcatgatgttcaagtatctatcatctggactcgttctcaacttgtttatcagacaaggtcacccactccctgatcccatggtcaaggtgtttgatgtccgaacgttcaagcctcttcctgcaatctcgttcgagacaggccctgcattcgtcctgccggatcttaagaaacaagactcgatgattgtcgtgtccgtccaaggatctttcatggcggtagagattggtaaaccctgggaagccaggttccatcaagtgagtattcatcttgaatcatcaggtttggagaggtcgtcgacatcaaactgaacttgacttcctgaatgggttgatcttgcaaagctcgacgtatcgacgtacgtgacatctgcagcaatctcctcgtcaggctcattccttgcatttggagacgccgggggaaatcatcatatctggtcttccatccaggatccgctttcttccgagatcgactcagtcaccttcaatggatttgagggtattcaaacagaatggcccgatgcagtcactgaggcttctattcctacgttgactgttgacgcacctcctccaccatcagtatctgtcgcgccggtgatgggaatgccaacgtccaacaatgaggaagatccttctcgactggaaccattgaatttgattggaatgcctcattatacgacccctctcctgtcaaacatccctgcatcgacatactgtccaccaaccagtcctttcttcaacccgcctgcgaagattccggcgagtgtgctcggcacaatgcggatggttgatttcgtgggctatgcacagacacctagggagttgaagggaacaagaaacagagtagggccgagaaagaagaaggcaggcgaaggtggaccgggtggaccgagattcaggagtgaacagacaagggagcctagggagggagatagggttgggacggaaggtgaaggagaggcaggaagaggagcggagggagagggaagcaagtacagaaaagttgaaatccaatacagcaaattcggttcgtactcacgttggcgatctctctgtgttctcatttttgggcgttataaagatgacgaggcaaataatgactttccttcattgtgtccgggaaattctttatttgggagtaacaggggtggaagactttgatttcgggtaaatatgttgttaccgttaatctgtcacctggcgtgttgctctgcgaatctgataccgtctcttctcgttataccctttccagatattacaatcaaacgcaatactctggactcgagacccatatcgcgagctcatacacgaactcgcttcttcaggcacttcactataccttacccttccgattgattgcgaagtctcatatttccacggcttgtacgagggagcattgcctgttatgcgagtgcgggtttctatttaggatgctggaagatgcagcaggaacgaattgtcaggctacaaatttctcgagggctgtcggaggaattccacaaagtacgcaattctctttgaatcttcccaatcccaagagtgatctgagttacactgttgaccacttgtcgtttcagttcatgcgctaggtttgttcgactcggaagacgagtcaggcccaccgaaagcgtatggtacactccttcaaaacttcaccagattcgctcttgaacacatgtcagccgaagcaaagacgtacaatctaaacccaaactcaagtcagtctcagagccagacgaatccctggttattcccgatgttaccaatacctcgatcgatcccttcgacagtcgcccaggttacaggtttggagttgaagcagacgaacacctgtctagcttgtggaacaaggacggcgaggacggggattcatcatatgatcgatctgacttatagaagaaaggtatgcattacatctcttgttctgcgctagaagtatcccaaagagacacacagaaagagaggaggaggaaatatcaagcgaggctcattatccggttttatctttgatgttatccaggccctaccaaacgaattacctaccaacaaagacttttcctctgtcttacacgactctataacccgagataccaccactaaagcagtctgcatacactgtaaacagttcgctcccctccgaaatcgacgatcgctttcttctccgtctgctatagaaagctcgacaacaatgttgcctcctgtgctttgcttgaacgccgctttacattcagcggatatcatggaggatttctggatggatcggccgaataggccaagacctttcttgcccacggcgtttggcttcgtacaggatggtgaggatttcaaaattttgggaccagaatggagaggatcgtggaaaaaggcagaggcaatgtatgagctcagagtatgttcctttctttcaaggatggcatgtttgttgagtgacagctcaggcgctaactcttctcttcttgactatgttaggctctgatcgtcgagactcatgctggaacagatgaacgtcatctagtctcaattgtgaaaagtgagttctttctcccttttcttacactttgatatatatcttttgtctccatactgaaatttccatcattgctgtggctcttctctatcatgatcagttcctgcggaagagttggattcagaagcagcctcgccatggtacatcttcaacgatttccttgtctcgaacatctccgaagaagaagccttgagtttcgccggatcttggaaggtgatgatctttcttcattcttcattctacttcttcactgtttggctcacggattttctctttgcttctatgaaacctttttctccctcgtctggatggggctgaacagacgcctgctgtgatcatctatgagaggacagactctcgacagcctcttgatctatcaatcttacctatgggaatcgagccttctatccttagtcgggatgtttccgtttcttggtaaaccttctccttccttcgtcatcctgttcagtttttgatccattctgggctaacaattgtatggtttgttctgttgttgtctttggtcatatcatgcatcaaggaatcgaaacccggctcgtatgaaacaccgatacttgacgcctgatgagttaccagaggccggaacgctggttgcgattgatgcagagtttgtagccatgcagtttgtaagtttaagtcgttctactgaaacacctgactctttcggcacgcacatcggactgacacgacgagtaaaaaacacaataataaggatgacttggagcttcgatcggatgggacaaagaaggtgcttcgaccatcgaagttgtcgttggcaagagtgtcgtgtttgaggggttctggatctcaagaagaagtgccattcatagatgatcatatccatacaagtgaaccagtggtggactacctaactgatttctctgggattcatcgtaagtttgcgcctgttcgtgttcttgtctccagtcgccttccatctaataatcgtattcatcatcgttatctacccttacagctggagacttagatcctccgttatcggaacatacattagtccctctcaaggtcgcctacaagaagcttcggttgttggtcgatctaggttgtatctttatcggacatggtctcaaggtttgtctcattctaacactcagaacggaagtattatgaagctcatcttttctcgattcttaatcatctctgtatctttctttcacagaaagattttcggattatcagttagcccttctcattctcagaaatgctttattctctccattatgtatgaatactgatataagtttcactccaccacaacctcatcataatacagacatattcgtcccgccaagtcaagtgctggacacggtcgatctctactcgagtccgcaacgacaacgaaaggtgtcgcttaggttcttgacttggttcttgctaaaaaatgatattcagacgggcgagcacgattcgatcgaggtgagtctgtttcatatgccttccttggttctcatttcgcttattttggctttcttcccttataaattcaatacatgaaaggacgcccgagctgctttgcaactatatcgattgtatcttggtttccagaaggaaggccgatttgatgatgtgatggatgatatctttgccgaagggaaacgtttggttagtttctcatcgttcggaagattcttcttcctagacccaggaactgatcctggctctcattatgtcattcggggcatatagaattggaaacccccaggtgctgcaccacctccgccggatagatggccaccggtggctatgtccacgacccaaccatcaactcccgaacctcgactcgctctgcctgcccacgcgtcgtccgcacaaactcagatgacatctactatgcgtcgattaccgaatggaccacctttccctcctcgaccgccaccgccttcgacttcatcgtcaggatcggtcccgatgcctcatttgtcacccattgcgtactcaaatccatcccctcatcctctctcaccacctggtcaagtaggtagttcttatttacttccccattctcatcttggtccacaccaacaacaggccttcccggtctggccttccatcggaggatctggtcaaggacaacatggtggtaataatggtacgggacattacctaggcccttcttctcagcctccctctcagcagacacagagccattggaggtcctatggaggaggcgcagataatgggatgccttggagttgagataagtgaggtgaagagagaaaagaagaggataaagaagaaaaggacagtaaaaatggatataatgaacacaagtacttgaacggttatggccatgaaagtttaagaatgatctctcgctctggccgttctcttttgcttattcctatgcttttcgttgagctctcatcaagtgataagacagagacacacaaagtaactgtttcttatcttcatttgcagatgaggctgtcatctctatctaggtcgttgtcgagagattttgttcaaatcctccgacgcgtgtctgtttttctagttattcagctgcttgccactctaggcagttctatcactcgtcatctcatccatctaatttcatctgattcactccttccgccctcatccatcctcttcctctgctctcccccttcccacagatgcagtcctcccgtgagtgtactcggccgagctcgccttcagtgcctccaccggatctggataattttgactggccaggggttgtggtgggaggttaccacgcctggtcggatacaagccttcctcatgtacacgatgcagaatgcgactcaatttcaaaacccaagacccacgtgtcaggaaaaaagcaggaaaaggtcgatgcagggattgcaccctggttggatgcagaacatggagggacccataatgtgagtccttcgatcaagaaggaggaggaggctggatacgtgtctgctcttcccaggagattcttcttatgagactaactgagatcgatcactggttcttttgtcgtggcttgcttgtccttgcatgccttgatttatctctataggcctctggatcagcatcagcatcgacatccaactctgtcagtccatcgggctactcgcaaccagttcgaacactaagttcatccacatcatcgcctcacctaccagccgttcgatcctcatcaaaatcaacgagcacatcatcttttaactccggcccatttggtcgatcacgacatgccagcaattctggaaagtctggtatctcgactccaagcatgagaccatcaccacctggagaaccagcaaccgcggggaaggtcgcttccgcatcaaacaatgcgtcgcctcatccggtagctccgatcgaggagaagaggaagaagtttctaggtcgactaggaatctcaaccaaacgaagaccagctacagttcagacagtagaagatgcgactccttcatccaatccaagacttgcacctgctgccgctcagcgaaaatccactcagcactcgacggacctcaagagccaacatcactcccaccttacaagtcatcttccaaaaggagtcgtcccgcctcatctagctcttccccacctgacatcattcatgccgatagaacaaaggcagaaggaagctccttcactggaagacccgaggaaggttcgaaagtctagcaagaaatctacttggtcagataattcgagtgaggaagctatgaaatcggtctcaggatcgagaagctctcagctgtttactcttgacaccaacctagaccatatggaaggcattgtcagtagggactgggacgacgcatctggaagcatacatagcggctcggtcgttggcttatggccggagggaggaggcagtgtctcttctatcgggtcatcctcagttggatctagatccggcacactcccacagcatcataccactttcactaatccttttgcgcctgcttccaatcaagcctcaagaaatccatcaaattcttcaagctccatcaaaggagcatccgtcttcacaacttcactccctcgacgtccatcccagcttcgatcgatggtcactccaagtgatgaacttggcacaaatccatttgaccaactggcctcaaacaagacccctcaattctctccaagtacagagttccgtaatccgtttgagatgactgaagtagatctcactcggggttccctcgatcccgtcacctcacctctttcgatgcctggtggttcgaaatcatcagatggccaaccagatttcatgggctctagacaagcgaatgtagcaccacctatccggagtcaatttcaggcatggacagcaccagagtcgtggggtgtcgaaggcgatcaagaggatgagtcatcagatgacgaagaggttgccgacgcgccaacgatgatggattctgcagctggtccttccagcttgaatgtggtaggtggaggtccaaggttggacggcacaagaacgggatcgaagggtgataatcaaagaggttcgcaatatacggtggacagttcagatggagttctagggaaagacacgttgcgtgcctcatcaaacggatcgatagctgtgccaggtgggataggaggtccgtcgacaaggccaatcgctagccgtggatcacaaggaggaaaacaaagtatgacaaacgcattcggaagaccatcgactggcagtactatcactggtggtattggtgagataagtagtagaccggcaacgaccagcgggttgtctaaaatgacctcgggtggttcattgggctcggttcgtattcgcgtcgcatcttcattctcctcttcatgggcctcaatagaagactgataattcaagaactggtttggtgtcatatagaccgcttttatccggatatacatctctgatggatcgtataaagtacttgctgtcgcgctgacggctactacaatggagatcatctatcacatctctgcgaagcttcttatttctaaaggtggccatcggctatacataagagagcgagggaatggtacgttctcactgcgataaatctatgggctctttacaccctacttcacctagctccatgccatccaatctgttgaccttcttcttcgtcctcgttctatgtgcagaccgacccttagacgctagagaaaagcccgcactgattcagagaaggagactgattcaagctgggtatcagggcattgatggcttagacgaacttgggaaggacgacgtgagcatgttgtgcaagttcgtcttccgactaccacaactcccgggaatcgagagtgtaggtcttctctcttttctttcaacataattcgtttgataatcaggttctgaaacaccgacttcgtcgcttttttcaacgtgggatgcgtacaggccgatgagaactctttcgattcatcatttgagtacgtcgatatatccggacgagatctacaagtctttcctatctttctacatcgacacgcacacaccatcgttctcctcaacctttcaaaaaacccacttcaagagctcccatctgattttatccaggcttgcacaaccctcagagaactcaagatgtcccatatgtctctgaaacgaataccacagtcaattcgccaaagttcctcccttacccggctagacttgtcttgcaatcgaattgccgatttggaccaaggtggcttcaatgatatccccgggttactttctctacgcgtacagaataatcggctttccgtcttacctgcttacttcggccagttacgtactctcaagtatcttaatctctccaacaactcttttgaggcgttccctagtatcgtttgcgagataaggtcattggtcgacttggacatctctttcaacgcgatctcataccttcctccagaagtgggaaaactagtgaatctcgaaaggttccttattgttggtaacctggtgacctcgatcccaagcagtttcgctaggctggagaacctacgcgagtttgactgccgacggaatcggattgtcgatttcgagtacgcatatgcccttccgaaactagaggtgctcagggccgagaggaacgatgtgaacgtatttggggccaggtttggaccgaagatgagcgacgtcaacttatcatataactcaatcaccaagttctcattgtcatcccgcagtccagacacagcgttcggccttaccaacctggatctatcgttcgccaagctttcctcgattgacgatgaggccatggcccatctggttagcctcgtcgtgcttaagctagacggaaacaagttcacaagtttgccagatagtatagcaaacctttctttgcttcgggaaatccactgcgccgataatgctctcactgttctccccgatggaatttctcagcttcagaaacttgagatcatcaacgtccataacaacaacttgggacaaattcctcctgggatctggtattgctctagtcttgtcactctcaacgccagttcaaacttgctagaaacgttccccgatccaccggaggaagccactcaggtcaaaagagatttctctaacgaggatggcgacgaaaacgatagtcctttccctctaggcgccagacttcgtcaattatacctatgcgacaatcagctcacagacgacgtcttccacccggtctctctgctcacctctctgcgaacgctcaacttgagttttaacgagattcttgaaatcccagcgtggactcttcggaagaaccggtcacttgtggcgctctatcttagcggaaacaagctgacaagcttgccagcagaagatctagagaatctgatgtctttgatggtcttccacgtgaacgggaacaaattacaatctctgccggcggagttatcagatatgcgtcgactaacggtgttggatgtcggaagtaatgtgctaaagtataacattgataattggcagtttgattggaactggtacgttccaacaaattccttgacctttttcaccattcactatatttcattctaggcgcttatctcttctcttttgaatctcttccatagggcaaaaaatgttgagctccgttacctaaatctatcagggaacaagcgattcgaaatcaagcccagtgccgatcgaagccatctcaacgagtactttggccaaggcaacagccgaaacgagtttgctgcaagttttgctccactcgtgaacatccggacgcttggtctcatggatgtcactgtccgaattatccctcccgatgagacagaggaccgacgagttcgatccacagtttccgaagtcaacaacatgtcgtatggtttctccgatacgttgggaaagtacgaacatctccttctcaatgatttggttgtgcctagtttccgagaaaaggacaacgaggcgctgtttggaatattcgggctcagtcatgcgacaaatccgggactagtcagtcggattccttacctcatctccgaatggtttcaaaagactttctcgaatcagctcagtaagttaaaagaaggagaaggcgtggcagatgcgttgcgtcgaacgttccttcttcttaacaagacctgttatgaggccctaacatcagaaagtatgaccggccggaaaggatcccaagcgagcgctggagctacgatgaattctggggcacaaaacggaccatcctccctaaatgccgccgttcttcgaacaggagcctctgctgtggttgcttatgtggtcgacaaagttctttatgtcgcaaatgccggagcttgtcaggctgttgtctccaagaagggaacagctgaagcactctcatccaagcatgaaccctttgagcgatcggaagctgctcgaatccgatcagccgaagggtggattactgccaaagggctgctcaatgaggagctcgacgtatcccgtggatttggcttttaccatcttattcccgctgttaattcttgcccggatgttcgctcgtacacgctttcggactcggacgaatttgtcatcctcgccaacaaaggtctttgggactgcatgacatatcaaacggcggtagacatcgctcgaactgagaaggacgattcaatgatggccgcccaaaagttgcgagattttgccctcagttatggtatggacggcgcaatcatggtcatgattatcagtgtcggggatctgttcaacacccggatgctagctaaaaaggccgcgttcgacagctctacactgaccgaaggttattacccgaaacgagctctgagaaagggcaagatcgatcatgtcggggaccgaacgctcgctcgacttgaccgagaaattccacctcccactggatttgttgctatcgtctttaccgacataaagaactctaccgcgctgtgggagacaaatcagggtatgcaaacggccatcaaaatgcacaacagcttgcttcgtcgtcagttacgaagtattggtggttatgaggtcaaaacggaaggagacgcgttcatggtgtctttccccacggttgcctcggctgttctatggtcatttacctgccagctgatgctgttacaggaagattggccgagtgagattctagaatgtgaggatgggaaagaggtgttcgacgaagatggtcagattatttaccgtggtctgtgggtcaggatgggcatccattggggtaacccagtgtgcgaggcggatccgatcacaaaacgaatggactactttggcccgatggtgaacaaagcgtccagggtaagtagtgtagcggatggaggtcagatcatggtcagtcagggagtcgttcaagagatgaaggctctgtttgaatccttggatgctcctcaaacggatgatgcgatggacggagaggtcgaggagaaatttggaccgcatgctgctcaattgagaaagctcggatttggtgtgtcgttcgtcggggaaaagaaattgaaaggtcggtctacattatgtttatgatcacgttaattggaggctgatcattgacatgttcctctttactcttctgaaggtctcgagaaccacgagaaactttcattggtttacccagcagccctttccggacgactggcaagcgtagcaaaccaagacaatgtcaagaccggacagatttttgagcccaagcaagggctcctcaatgtcgattgcgtccgatatctttccttcctctgcacccgactcgaggtgctttcctcgacgggcgttccgttcgctcatacatctcaattgccaaagaatacaccgcgacgaattcctactacttcaacgcttgtaaatcctcagatcacgttggatatgacggacgaggagctttttgcgatcgttaattcttgtaagcctcgatttgttttcttcatcgagagatttaagttggagcgcgactgatggatgtaatcatgcacgacggtttttttcccaataaagtgacggctcggatcgagaattcgttgagcacaatgtacctcaaacaactcgatgggttttctactgttctggccgcgctttcgcaggggctcgccatggattctaggttgctcgttcatgccatggggttgttcagtaacctgatgaacccggctgaatcttcttctttgccttaacttcttttttctctggcaaatcggtcggctgttttgtcctttttgttcatattctattctcgcctttcctctctttccttaagcattctcaagcctttttccttatcagccttttcaattgttgttctttctcttctgaggaaagtagagaaggatccatcttccatcttgcctttcgggctcgtcgttgtatatcaagacatcttcttctctccttctacactttatcctgtctcgttcatgattcttctgactcatgtctacttcttccctacatctgtccctcattaaatctaatctaactacttatccctttcccctcatcttcctaattctgttgtattttcctttcctccttccctctgcgtccacatgctggaaaatgttgttttcactcctttctcaaaaataaaggcgtatgtccaggccaacgggggatgtgttacatttctatgtcctatatcttcgtgtttcgtatctcacggtcttctataacttaaggttccaatgtttcatgtctggtgtgttttacacccatctttcttggaaggagagaagtgacagacgatcgtccgtttggctcattatcagccttatcaacaacaatatcatcatcatttgcgcccctagttgtttctaaaatttcctccgtgtcacggaatctatgaaactgaaaaaaggaaaagagaaggaagacggatctatggcatgcggcatttgttttagggtttcgtatataaaatcctcaagaggatgagcaatggggaataggggaggggcagggaagagtggaatgaagaggacagatggacggatggatgggggtttatacaatttgtagacctgagttgaataaatccaaatctatgacacacgtacgtgcttgaaagggggcatgaaggggaaggagaagagaacggagaaaaggaaggaagagaagcccgtgcgcatttgagtcgtcttgactactcgatcccaaaccaacgccttttcaattctcgagtaatcctggacgtctcggctgatgctcctccttctcccttgagaactgtcttgttttctatcgcccgtctgtttttcgcgcccagatagaagagaggaaaaggaaataaaggaaggaagaacaaaaaagagaagaaagaaaagttcagcacttgattttgcgaagaataaaagcaaatgaaaagtcgaaacgcaccggcctagataaggcataacatcttgaagaccaccccaggggacgtatttcaggacgaggggggacccttctgggacgaaggtgtttgcgatcgatgatgtcaatgcgtcgcacatgcctatcatacacaagtcaattgtttgttcttcaggtcaggattctttctcgttccatttgatttcctctttttgtaaaagattacgtctgaagacgaaccgtataattgtcccatggagactcgatctctgactgcctgggagacacttaacaatgtctttccgtcaggtccaacctggccgaccgcgagcttcctgtcaacgagaccggcgatgaccttggcgcaactttcctggttgtgcgaggcgatgatgacgcctactgtgggcacggcggtaccgctggcaacatccgactgaacatgatccaagagccagtccagaccggaatcgaaacaatcatcagtctctggcttctgctgccagactggttccggaccggtggaagcgtagaccgggtgttgtcgccatcgatcggattcgacgccgtggtaggcgcctcttacgagcttgacaccgagtgagtatccattggccttggcatgaatataagagtggcgcatgtgttccgggtttctgatgaagaggattttcaaaaaggtgaaggtttgtcagcgctttgtggaacgtagatgaaggggtagagatgtgaaggaaagaaaaatagcaagaccaaccgtcgaaggtaggcctggtaggttccgtagacaagaggttggacgtttggccaagattcggccgtgaccggaatctcaactgtatctgcgtttttcgtggacgaagagggtaactcgaaacccaactttccgatccaggacgaagagaaagaaccggtggtcgaggtagaaccgaggagggagctggagggttggctaggtgtcttgttgtactctagagataggatcgtttggaacgcgtcgattgccggctgcaagacgaaccgacaggatgatcagtatatagtcggaagaatgagttaaacaagccgaacgaacctgataccaagagtattctgcatcgatgatgactctgactccagagtgcctagctttgtttaaaattgtcctcatgtccttgtgaagcaatcgaagagcctcgagatcagacgtcgagactccgttcgagatgtttggcaagatgagcgtggtgtttcctttggcagtcatcaattcgagttctcgatctgtcggtgtctgcgggaggggacgacgtttgtgtaagatgagtgagtaagaccgggagactgttgtcagttgaagattttgagatgaaggagatgaagaaaatctcttacgccgggataatatgttgatgaggtggcatctggttgagctgctcgaagcgcgagaatggtgttcgacgcccgttccaacactgtgggatctgccatcaagccagactggaggatggatttgaatatggacagaatgagcgagatgggcgaggcgaatgaggcagatgacgtaaaagagaaaatcaagagacacaggggacctacaaacttgagggcaatccagctggaaccgatatcatgctcgttgttctttctcgcgagacttgcttcatatccacacacttcgatcgagtttacggtctgtgcgatcttcttctctgcctcgattctgctcgcctgaagttttctctgtccttcaggggagtcagccggcttgtctgtttggtcatgagactcctcatcagagacctcgaccgaataattaagcagcgtcccgatctggttccttctgagctgtcgaatggtgggcaggcagtcgaacgcggtttcgccacccacaaactgggcgaagaatgtgtgcttcaccgcgaacctgaccgatggaaggagaacacggggacgaagaagaaggtggaggtgaggatcgaaatgatgttgcggtgagcacgaggacgaacggtgaggcatcacaagacctagatctagaaatggagacctagagatgaagacctacatggttaaagaggatacaacgggaatctgactgagggtcgaaaggatggctggagagttatcgaccacccaagggatcttgctgaagaggagggcgacaacgggaagagcgtggaagaaggaaaggacataagcgaggataagcaaatgaagagcgacacacacacacatgcaaagaagagagaagacaaaacatagagagatagagagagaaaacgccgtctactgaccagcaggtatagacaaaccagctattcacgagctggcttgtgggcgtacttctcagttgactatctacgggtggtgttgaccagggtttgacgatttgttctgcctgcacggcattctccgactgggccttgtaggcgagaaggattcctacggttgtgatcggagcgagcaccttacctgcccgaatagagccaagtgaagccaagcgggacatgtgagctgggtgtgagtatggatggatgagtggacgagtatgtgagtgattgatgaagcgaagaagaaagaggaaaggaaaaaaaagaaacagattggctaaagatgaagagagaagagaagaaaaagaaggagaacacccgcgcgcttgccgcccgcaataaccgccagcgagtgactttgtatctgtgctttatcctgtttgtcctacactttgcaacccaagtgattctatcaggagctactttctattcggaattctacctattggttctatacagggagggagtagggtacaccgaaggcgaagcacagaaagacccaacagggaggtcgtctgcgttgggttcgattgagtgagcgcggtatctctgagacatagatatcgttatcctgtgaaggtcacgtgctatatctgtttgttatctatcgaagtttgcacagccctaaatgaagcgtgatcctgggcgccacaacaacgtgacgctgcatcatcaggcctgcgtaagtcattgtaaacaatcgagatagaaaaaagggttcgactataaatagcacagaagaaaaatgtatgacagacccgagatgttgtctaagtatcgctcagggctaccataggtgaatatagatggatagtttcatctatttctgaggacattcccgggcctgcccgtcttttcgtgtgcctgtgcccgtgcctgcgtgtcaagcccctgtttctgatccctagtgcctagttcctggtgcctggtgcctagtgcctgatacgtatccctgcccgtctgcttgctttccttctctaccatccgtttccctcgttttttctccttcttccttctccccctctcctttgtcttcttccctccgtcttgacattgctcgcttcctgcttcatcgcactctgcacacccaaggtccgagctcgctccaggtggtctcgttctagacggttttctttctctttggctcttctgtcggcctttctgttggctcgtttgtcagccagtctggttttctccccttcctctcattacgctcgcttgagaatccccttcctcgcccacttctcgctcttctcacgttccttccttgcctcagccgtcctccccctcccttcctctttccctttaagatgcctctcgaacagtaatcttcgtggtcggacgatcgacaacacctctacgccttgaactcagctttcttgtttgagaaaaactctattctttctcttccggcgtccagcaggtccgtgttgacgggcccgacctttttctcttccatctcggcctcttgtcggttgactgatccagacatcatcgctttcgtccacagctacacaccccacacacacccagcttttcactatagacgacttcccttcccgtttttcatagaagttagaaatagggaaacaaatcaagaaagaaaagtcaaaaaaacaccgcccgtccaggacttctagaccggtaagtatctcccatacgcgtttaccgacgcatatactcatcgactgactcccggtccgtcccgaattaatcttctaatcgttcccgttacaacagctaattcctacctcgtcaccctcagaccacctcgtagcttcaccatggcggtcaccacccttcccggcccagtaggaccaatttcggcggatacctactttgctccctcaccgacgttcctcccacatcatcatagatgctcctcgtcccagtcgaccatcagaccaatccccatccaatcgcccagcctgccccgaaatacttctggtcggatgtctgactccggactcacactctgtacggacagtcttcctttccctgcaaacgacctcaaacgtgtccgctttccttgtcccgtgggcgagccagacctgttttcggtatgtgtttgttgctttcgtcaaaaaaacctggttgcagctcgtcctcatacagattttttgtacttgtctcttcctcttctcattccggacaatatcagtctactcatcacacatggtccccactcgagtacgatcgaacaccaatcgagccgccgtcagaagaggaacgctcgtgtttccttcctaaacgaggtgaacgttgcttctccgcccccatgccgtgcactcttccatccagtccctcacaaagcccatatccaaagtcctttatcctttcggactttgatccaaacgactcccccgtctggagtgaatcagaggaggatgtttgttcagatagtccggtcgatggccaacacgccgaaggcagtagcgacgatcacaacgatcaccactacgacattgacattgacaacgatgataatcacggcgatgatgatgaagagcaagacgaagacgacgacgacggcgaggcagtcgagagaaggttaagaatggcggccggtctatggggaggtagtgagagtagcctgtcggatggagacgtcggcgatgacgatgatctcggaagtgcggtggctcggtgcaaagaaagactcagactctggcgattgggctgcgaggagggtaagtcctattttccttctctctctcttttatcactcacgccccctccctcttcttcatcgctgacatcttttcctttgcttacccctaaaaggtgactcgtctgtgcatcgagagcgtcttgatgagacagatacctcagatgatcctgaaacagactgtgaacagaccccttcgtcctctaccttagtctttcctatcactatcactcgccaatccttctctggcttccccatttctccctctccggccgattaccatcccgatggctcgactcccactccttcctttcatctcgctgcctcgacccccactccggccttccactttcccttatcgaccagcccaacgtcggccatggcgatctctccctcggaagcatccccatccagccgaaggctcatgtgggcccggtcgcttaacaaacagttctccggtcatctcgacgatgaagcaccagccacaccttcagttgatggcgaacgccctccactgtcgatctttcctcgagcaaactggtcgtctgtctcggactccccaccgcccacaccagattgggatctgacgagaacgatgacgatacccgagccgtcaccgtcatcacagctcaaagagtctcccaacaagcttccccgcctgaccagaaccgatagcggtttctttccttccgccaaaccgataactcccagtttggaaacgctttctaccatgatgaacttgccggattctttcgaatcttcacttcccctgtcacccgccgagcctgtacgccaatcgtatcttgttccctcttatccgtcagactcagcttctgtctcgttcccgacggccagcctggatccctcgaggcaatcaactgagcccttattgttctcgccttcactctccgtttcatcctctctctcgctctccatatcggatgattctctttcggaaggacaccccctcattcgtccatcaccacctgacctctcgaccttttcttgggctcatgctcttttccgagagaagactgactcggttgcagtcgaaggggatgaccgggtgtcgtttgacagctggtaaagcgacggatatcccctttttttccctaccttgtcgttttctgttctccctcaattcgtcgctgttgttctttcctccccttccattttcgatttctatccctttttcattacattcactttccctatacaacacacatacacacatcaactcacacatgcaatctgctcgcattcggtttgaggaattgacactcttctcccttctttccgacccctccctttcttaacccttacacgatccgtctctgtctcttttttacttcttgaatcaagtgcacccaacatacaccgtcatttgtccaatattcttcttttctctcgtctcgagcgagggtcttgtttgcctttttctcttcttccccttctgcttacttgcttgttcatttgatcattaagacttacctctttcgcttcgagtcccagtttcagttatggcgctctttttttttctcgttggtgaacataacagctcgatgggttgtcgaatacttgtcgtttgtttgtttgttctttcgttctttcgttctttcgttctttcgtgtgtgatggtgattgcatgataccctgcgcctacttcttttttttctctcaaagtggttttcgatacctttaccgataccaatatcgacaaatcagcgtgaaatatcaatcaatcgatcactaaaccgactgattgttagatagaagaaaagcagatctgaacgaaaaaaaagaagaagattatatgaaaacaagttgaataaatcgatagataggatcagtaggcaagggagggaggtcagttgcctcgcctggggtgggggagcttgagagtcagagaatgaactatcatccggtcgaccggtcggaaaaggtatattaaaatttgggaagcataatgaacaaaatgagaaacagaacaaaaacaaaacaaaacagtgggggatcaagcgtattatatacacgaaatgagcaaagatgaaagggggaaaaaggggagcagattaaaagaggagaatgagatgactggaaggaagaaaagaatgacaatgatgatgacaagcaaagatcgagatagagatatgttgttccaaaacttggggaaaaaaaagacttcttaaaggacaagatgggcttggaagtctagaatgaattgggaacgttcgtcaggggggatgccgattgggcggtttcggctgagaattgagagaaaaactattgttttccaccggtcccccagaaacaacagaaatggaagatcaaaaaaaaatcaggcgtaagaacgagtgttctctgatacagacatagctgcgagccggaagtcaggtagaaagagaacataccgaatcccatgaaggccaatcaaacatctggtttggtaccccactgacgagaaattcatctgaccaattcgaacttggtgtgccctgtaacccactttcagcttctccgctgcccgttcggtgcgcttgccccaatctcatctccatgttcgtccctgaccccatccctaagcctgaatccgggctttgaccagaaccagaactagatccggaaaccatgccgttctcgatcgtcagactcggtagaccgggcgttggcattggcggaacaaacccgacgagattgcccgtctttatgtccgggttgaagttccatcccgatcctgttcctaatactccaaagtcaaccccgtttggttcttgttcctgcccagagatacgtaccgactcggaccgagagccaccggccgggctaggtcgatcggaaggctcgatcgttccctgcaagacgccagactcgtcaagttgtttctttaacgcgtcagccgccatgaatacgcctcctccgggaagagatctatcggctttgaaagagacggcctcatgcaagtctggtcggttattccgaacgccatgggtagggttaagtcgtttgttgtttgcctggtgaggatgctgaccatgattaccaaaggatccacgaccccgggcgtgaggcgaatgtgcatgaagcgctgcgttgtacaagagagacattacttccaccgtctgtaaaacaaagcagagaaggaaggtaaagaagcggatgagatgatagcttctggaaagccaaaggagcaacaccgaaacgagtagagttgatgacttactctacgacggatactcatgtgttcaggttgcacagcggtttcccatctacggcacgtcccacttagcgttttgagcgcttccagcgccgccggatctttccttctagcccaggtatgatactgcaagaacgagaccaactccgttcaactgatgcatcacaactttgatctgacgaaagagaggggaacacccgtacctgaatgagcgctatcgaagtggccgaataagaggtcacaaaaaatgtatccaatgcggaatcattcgcatctagccaaaagatagcctctttagacaacgaaaagcactccgtccaggaggagatatcgaggcagaacgttaggtgtcgaggaccttcataggaaatccgctggtggactctccagctgtgacatgatgcaatggaaagaacgaacaaaattagtccaagacgcctcagattcggactcaagacgcctcgatagaacaggaatacatacaacaagaataagattgcagtataaaacacttgcaagagacctgatcaaactggactgtcagtgcactgcgtgggaatatgtacagaaagtcaaaagacagatacgaacctgcttgcagaccagtatgaggaccctgaaattgtaaagccggagcaagactagatcgccagaacctcaactctcttaacaggtcgttcagttgttggtcattcgtatgggctaaccccatcggacttgaaaacgaacggtcaaggaaacgaggaatatcagaagacgaaacgtcttgtgacagagatgaaagagcacatacccatagatcgtcttggtcacttttccaagtaagatgctcagtttgagaaattcgctgaggaaaagataaggcgcgccctggcaggccggatcggatattcgatcaggtaggggaacctcgaacggatcttttgtcgatcgttgaaaaggttcgttgagatcagcccgatgagaatatgagataaggaaaacaaagaaaagaggcacttaccgggtagaagaacgtcgcaatcgtgcagatcgatcaggattggcacacctaacgaggccgcgtaccatctgtccatgatgacacagcaactccatacccgtctcttcagctcgagctgagagtttcggaacgatggtcagacggaagagattttgatcagcacaaaaggcgacagggaatgctagagaaagagagaagcaaggtgaacgtacgaaagctcgttcttccaatcgggcttgatccgacaagtggtcggtcttcttgatctcatctcgatggagaccaagctcttgagccctgcaagacgtgttggtaatttgataagaggcaagtcagtttacagtctcggcgtcttccacggaaaagcctgctttgagagaaggtagaaaagagacaaagaccaagagaccgagatatgatggacacgtacattctgacggcaaccccgagtctgatgtttgcgaccgctccaccaaggttgacctccaccttgtgaagatcgccgacggtacttaggaccaaaagactctgtacgttgactagactgatttcactcagcacatcgttcttcttgataattccattgatgatctttctcaactcttggaagatctctcgggggatgtctcgcctggtagctgccacgccgcatatggcgtacagcaagagtggtggaggcgaaggaaggtcaagaaactcgtgcttggtaatgacagggaagagcggggaaatagtggtaaagtagatgttgagaagactttcgaacaccgccggggtcaacttggaagcgcctccattgtcaccgaagcgagaacaaggttgcttgccagcgaggccagcaagatggtcgccattttcttcggacgaaggatcgtaaacttttatcaatccgtcgccctcagctccgatctcatagaacgtgtggtgtttgagatcgtactcgctgaacgagcccgccggcaagctggcacttgaatggagcaagaacggaacggatgtcggaccttggactctggccagtcgaggcccttcgttagaggatctcggaacgatcttcggagggttcggtattgaaggcgaagggttggccggggacaagttgttcggcgcggacactgaaagctggtacgggctgtaagtctgagacgcgtagggcgacgcggccgaaaacgggtgctgatccggaaaagacgacggctttggcgacggatggattgagtacggatgtgaggctggtgcgtagtgaggttggtttggaacggccgaaaacgcgagatttgagatcccagaggccgacggagggaacgaacttgtcgttgaggagccagctcggccatgagtcacgatagccgaggtagacgcagaaggtgcgatagaagaggcggatgaggacccagatcgatgctgttgttgttgttgattaccaggccaccggtcatctgttggaggagatcttgtaggcagatcctcacctgaggtatcaggtgtggccagactcgacttccgttctcgggataggacctgggaagcggccgaactggtggatgccgcgacagctgccgctgattccgaacccctcttctttttgaatctggtctcggtgatgggaaggaaaaaagtgcattcaacctgggcgtttagacaatgcttacaaaccggaggctccgagttgggcagaatgtcgcatctggttttcgagcttctgcatttgtcgcaagctcggctcgttttcgttcgtttctcggcagacgattcggatggaggcgatccaggtccggtgagaaccggagtgagtacagagggagatatcactggcttctgcttgtttgacgaaggaaagggtgaggtattgaccgagagtgcaggcagagcgtcaatagtagccagctgcggggatgctattaatttgcgtttttttgatggtgagagcgagaccagaaccgaagcatccatttcagcaaatgatatgagcagatgcagagtttatggcaaagataaaggaggatggcggatgctgatggacgatggccaagcactggcagcactggagactcaagaacaaagaagaagagaatggaaagcaaggatatgcggcccaatgtctacaagatgagcaggctatcgagagacgacgatgagggtgtcgaagttggatgatggaaggaagtaaacgatgctgacgaagagagagtctaaaaaaagcatggaaaacatggagagataccatcaacccagtcgttgatctctcttcacatacatctgctgacgacaacgcacacaccgttttatcttctttctctcatgctgctgtactgtctttgatgaagctgacaagcgttgttgctgagccatatgtcgagcttacttccttcgctcgttggtccgcgcttgagacccgcctcttggtgatctgatcgctgacattgcaaatccacatccgttctcgagtatcgtgtgttccggaatgatgaccatcgcctgagtcaataagtttcgagagccattgatttgagttgccatgagagaatcatcaaggtgagactagatgctgagagactgaccatcatcagttctctcgagcatcattcaaccctcattctgccttgcccgtccttgacacgtccgtccagtccttccattttctccttgcccttcaggccatgcgctatttcctctacactaccttctttcgttcgaacggtaccatagatactcgcggtcggccggccatctctctctctctctctctcgttacaatgtacccgtcaggacacatatgttgaacttgttttcgggtttgtcattgaatgaaccacgacattgcttcggtagccacagacgctggcaatgcaggttctcatgagcataaacagttcagtactggagagaacaagttgaaggatccttcattctaactcagttgaatcacaccgcaaactttgaatgtcggtcggaacacttcacaatcactgattcaccaaaagtcaaactgctgcatccaaccaaatggcttcatctctgatgctactaggcatgttctataatgttacttgctcccaccctcaacacatatctgtcctagtatgcgcacacacaggcagtatggtgctccttccatgagcaactggaaggcagaaaacaagacccggcctccgacggttactaaccagccagatacagatagcatatcctggccggacgacgttcacgttggcattcatccaatcctcaaccaccaggtcatcgcgtaggactcttgtctgattcaggcgagaacaagtgagatgccaacagaacggatgttcccaaagacatgcttcccggttccgagaggtaggtatcatccgctcgagttcttaccttcaccttgcaagtcagctcacataccatatcaaacacatgtccgactttcttccttccatagcaatacactcgtacgaaccatttataatacccagatcatactcatccttttgcgagccaaacaaacggaacgatatctggaattcgccgggatggaaaccgaaggctgcgggaccaagattcctccttccgaagagtgaagcggccgcttcaattcgaatcgtacctagaacaccggcagactttggtatgaaccgatcaggtttcttcacaaaaaagacgactagaccagcagaaaaagaaccgaaatcccaacctgttcaggtcgtcacttgtgtttgtctcctattcttcgcttgttaccgtctcgtaacgttgtttcctctctttctttcttagtctgaccagtctggcgattgcgttcaacagattcacctcttgcctcccgaactagattcgaatactctccggaagttcttctggacatccgggattcgcgttcttgaagcttggaaacctatcggaaagcggtccggtatgatccagacatcttttgaagatcaattcaaggcgctgcgtcggataaatagagaacccaggccatggggggtgagttttgaacacttatatgagtctctgtgtgttttgattttgatgatcctgattcactgattcattgatggttcgttcgaccttaaagatcctacaaactcaatcagcaggattggcgacggttgcgatcgtattatctccattagaggaatcatcgttcagacttgcctctggcaaattcagcatcgatccaaatagaaaagacaacaatgcgtcaaaaatatcaaatccatc

SEQ ID NO: 1455 - DNA, 11677 bp, Xanthophyllomyces dendrorhous
atccacctcctcctcctcctcctccttatcctcctcctcctcttcttccagccctctccttgcgtccactctcgcaaccgccaaaaccaagcaaagcacacaaccgatagggtctccgttacccgtctcagtacgatcgaacgctccagaaccgaaacagaaggggtctgtaaaggccatggcaaagctcgaaaaggctcagaaaagcccacagacaaagaacgtttcaactcagaatgtttcgtcaaaaggcgattcctcaacatctgcagacgtcgtgttcaaacagaacacatcaaacgttcctcctccgcccaagacgcagaaaaggccttctgaaaccaacattgccggtaccccatcccgacctaaacccataaccagacagtctgataagaaacaaagggaaatgtctccaccgaaaatcaacaaacaggtcaacgttgggagtgtcgtaaagcaaaccaagtcgcctatcaccgaggctaaatctcgagttaaaacaccgaccgagaagaggacagatacgaacgacaagatagaacgagtcaagacgacgggcgaacaaaagacgcagccaagtgcctcatcaccctcactttcagccaaggaaaaaaaaaagaagaaagacctatcgatggagagatctaaggctattcaaaaggtacgactttctttattggaacttggttcagatgaaggcttcatcggctgagggtagtacaccgttctgtatgtcacacccccactcatctgtttatgtttcgttcaatttttcttgatctgataggttttgacgagtgtgtacaaagcggaccccaagcctgaagaaggggatcggaccagctctctcgccctctaaatcatctactggtatgttatttttattagtttaatcttacttttgtcaattctgcttggcgttgaccctcgctcgaccttcctgactgtttgtcgttcagaattctccatgaaggacgatcggaaatgcaagatcaagtttctagactgataccgggatatatagaattaatctccagagtgttcggacagctggcatgaagcgcagaaggaaatatcccatcgaatcacgatacaacattcggtgcggatctagatagacacatagtttagctatgtgggtggaaggaagccgactgattgtaagagtgtgcctctcggctcgggaagtcgaggaaggaatctatcgaatgtcctaaaggttaaggaaatcatcttcgtcttcgtccaaaagctcgttgacccatctgtttcatacatcgtgtttgtggcagtgaacaaattaaggaatgagaaaaaggagtatcagggacctgatttgttcatttgtatcgtgattgaacatgagccgatagaaaagaaagggggcaaacctgaagaacggactagctgggaaaccgaccacctatgatgttgaccacccatatacccaccatcaatgtagaacgcatcagaccaatcacatcaagcggctgacaactagagtacaaacgatagacgaacattgttgtaatcgccttcgatcttctcaatcaatagacctcccagaccctatacacaacagagttgattgattcagcatgtacaccagtcatatgacgcaaaattggatacaaatgaaggaaaactggtaggaaatgcatacctgaattccaaatccacctgctttcccctgatgtgtgtttcaaacagccgcgttcaacaataattagagtcgatccttcgagaaaagaagaaagcagagttgcttaccattccttcgttcgagtccactaagaatgcgagataaaatcaatcaatgacaacccagtgaaatcataaagacgaagaaaaggacatgtaagagaaaagtcttaccataactctctaacgcgcttactggattatttgcgaacgtcactaaagtagagcaggtggtcgaacgcatcgcatagccaggtgcgctaattgtgggaaatactgtatgtacaaaaatgaattacggctgagctctaagcgagtcgagacaagtcgggatcgaagaaaaataaaacgaggagaacgggaaagacacactcaaaacaacggaggtgataacctggcaggtttgactgttcatatcgagtaacattctcaactgtttcatcaatattttatacaaagtcaaattcagcttgatcgagtagattcacatatgaggaagcagatattcaaggcgaacattatctcctttcgaggagggtttctctaagatcacgctctccggtccaccagatcctgtacccagttcatatcttgcctgtgggtctctctgaggagggaacacaacgattgtatcggctatcaattgaacgatttacgcaagagaaagggtcagtgtcatgagaaggcttctcgatggtaggtttatgaggtttgacctgaaatcacaagttctggggcgtcttccggattttctcgaactagtctctcatagacttctctgccctaagattatttggtcacgacaagaaggagggttcagattgaacatgcgatctacattcgacttgaagggaagaacaggagcgcaccttttcaccggcggtcgccgttgggtaagcactcaggtcttctctgtactgatcatgcggtaaatcctcctcaaaagttgacggcacaatctccggagcaagtccctacattcaagtcagcaaacagatgcaatcaaatgcgtaagcttggcttacgatcagctcttgatagaaagtgattgagagaatcagacagactgacgagtgattgcaggatttctttccgccggggcgaggctgaggctagaacgacccgcttgttagccatcttgttgaaagccgggagggcgagcgcatgagggagcacggcttggtgctttgggagagctaccatgtttccgatccgatttatggtgatgaaagtaaggatgaggttgttgtctggccgggacgatgctgaagagcccagaggagctgacgtaatgggaagggtcactctcgtgcctgagttctgttcctccgctcagttgttgttgctttagcgcgctctactcacaccaatctcaacgggcgtggtgagcatgtgtctgtatacccataaggaaacctcgctcacatactatccatcatagaaacacaacaagacagatggtgtgtcgaacggaggggactctgaattggatggttacacttgctgatcactacttgtcgggaaggagccccgcaaaaatacacagcaagttttttcttggaatgcttttttgaacatcctaacggtcgtacccgttgcagcatacacacactcaccctcgcctgcagcccgcattctcaactcgatgggacctcctcaacgggtaaggtataactctcgcgctagagcctccacagctgggggctcatcccacaaaaagcgatccagatcgacggccgtcgtggacgagtccgttgctggtactaccgctgatggttcttccggaggagaccaccaaatggatattgtcgtcccaaaaacaaaagaggagaaggaagaggagaggaagcagagactcaaggccgaggttcgtatgatgttttctccctttttctttctgcagcgcgtatgttgtcaatgacccagcaagatctgttcctcgctcacgtacttgcacatcattctcaacagctcgtagcggcctcagagacgaaaatgtcgagtaagaagctcaagcggctggacggcttcatcgtacgtgcttcacacttcgtcggtcacctcatctgattcgttggctaatcttctctctttgtaccgtacaggccaagaaacttaaaaaggaagctcgtgttgagctcttcggaaaattacagtccgtcttattttgctccctctgtaaattcaataccgatcatattcatgaactgaatcgtctgtgtacctcttgaataaaacctctacctccaatgacagagcatcccaggcatcacttcctacatcattacttccttcgctcgcctcagcctcaacccttggttctagacatctctcttcccatgctgagcgagcggccaaagcagaagatttatctgtccgaaagttacttgacaagcagcacaaaaaacgaagactgaacgattcagaaacatctggttccggttctgaaggtgaagatgaggatgattgggagtccaaatttggagacactggtggagaggcagtccctctgcagcggtatattgctgaacccgaggacgaggctgagactcatgaagaattcatacagaaaggcagaccgacaagcggaattgatggggtgatggctgtagaaactctgccagcgacgggaaccgtaggaggtgcactcaagaaagtcgacttgggttccgtcgtcgttggaggggcactacgaaagaaagaggatggtggcgcgtcggtcaaggtcgtttcaatgaagaaagctaaaggaaaaggaaagatggtgagtttatcattatttgaagttcctgttgctttagcctctttcactgacctcgtcaatcttaaatctggacaagatgacatttggagcctggaaatcactcgataaaaaagcaagcgctccttcggattcatcattcgattcgtcagattcggaaatggatacagattcagaagacaatgacgatgacatgtctgactctgacgaagatgatatgtctgactctgaggatgacagcgactcagaggagaacgatgaggagagtgaggaggaggaggagatgagcgaagagcaaacgacgaagaggaaacgaaaggccacgaatttcaaagcttgggcgatccaacaactcgagtccacgtacaaacaagtcgatgagtcacctatcgatcctgcttctcttgctcgatctcaagctcgaccggcttacgaggaaggtctcaacttggtatctggttccgctctcaagacgcctgtcacggatgaaaacggccaatctgctgtcgaacccctttctaccgacttgaacaccgtccctcctccgaagaaagagtcccgaccgattccctcagtaaaaattggtcctctgggtgaaacccttcgaattcctgcttcatcccttcttgtccgatcgtcaaatcccaagaatagacaacttgtgaaccgaccagaggaacttcaaaagaagaggttggaactcccagtagtagctgatgaacaagaaattatggaaaagatattgatcagcaacgtcgtggtactctgtggagagactggatcaggaaaaacaacgcaagttcctcagttcttatatgaggctggatttggaactgctggtagtggtgcgcatttttctctacttttatttccccagggtctctatcccatgtaactcattctccttattctctatcgaacttgatagacaatccgggaatggtggctgtgacccaaccgagacgagtagcagccatgtcgatggctgctcgagtggcttctgagctctctctcccttcttccaaagtctcctaccagatcagatacgacgctaccgtgtctcctgagacagctatcaagttcatgactgatggtgttctccttcgggagatcgcaagagatctcttgttgacaaagtattcggttgtgatcgtagatgaggcgcacgagagaagtgtgaatacggatgtgttgatcggcttgttgagcagaatcgttcagctgaggaaaaaacggtttgatgaagctccggaaggtgccaaagtatgtgttcaattggttgtgtcgtgttttgccaaattttattgactttatcttctttggacttcactgtctatcgctcagcccccaccgttgaggttggtaatcatgtcggctacccttcgagtgaccgattttacactcaatacccgacttttcaagacccctccacccaccatcactattcctacccggcaacaccccgtcacagttcatttcaaccgacgaacaccatctgattacctaggcgaggccttaaaaaaagtcagcaagattcacactcggcttccaccaggaggtattctagtgtttcttactggtcaaggagagatccagacattggtcaagaatctagagaaggcctatggtgttaaggcttgggaagagaggaagagacagagagaaaaggcaaacctcaagctgaaagagaggaacaattggtggaaggaagataagaagacatcaaagaaggaagatgaggaggcaaagaaagatatgaagcttgttgcgaataatggttagttcatgttctcaggtctctcatacctgtcttattaatttcactaatgcatcttatattcactttaaccaaacactttgtccactatatcagccgacatggagatcgaagatatggatttcgcacaggagagggccgatctagcgggagatgtcgacgatggtgctgattctgatccagaagctctagatagcgactctgactcggaagatgaaatcatcttgaatgaggctgaatctgaaggtgagatatcttcgtcagatctatctctacaacctgcgccaatttcgaacaaattttgctgactctacaatatcggaatcttatctgtccttatctcgattagttccgatgcacatcttgccgttgtactcgctcttgccaagtgacaaacagatgaaagtcttcgccgaacctccggaaggcacgagactggtagtggtcgctacaaacgtagcagagacctcacttactatcccagggattcgatatgttgtcgattgcggtcgagccaaggagcgacacttcgatccggtgtctggcgtccaggcctttaaagtgtcgtggatttccaaggcatccgcatctcagcgagcaggtcgagcgggtcgaaccggtcctggccattgctaccgattatactcctccccggtctttgaaaactactttgaacaattcgctgaaccagaaattcttcgaatgcctatcgaaggaatcgtcctccaaatgaagagcatgaacatctcagctgtggtcaatttcccattccctacacctcctaacagggactcactagccaaagctgagaaaattttgacgctgttaggagcgttggaccccagtacgaaagaacgctcgttcgctacgattacccctcttggcgaagcactctcattctttcccgtttcgcctaggttctcaaagatgctagtgtctggtcagtcacatggctgtctaccttacgtgattgcctcggtggctgtgctagctgtaggagatccattcctgagagaggctgcattgggtaacgatggtgagggtgaagacgatgaagatgagtcgatggcggaggcatcggccgaactttcacatatcaggagcgcagagattagacagaaggaggaacaaagattgaagagacgatcattcttccaaactcaggcggttcgtttatctgtctcttttttccctttcctggtccgtttgctaccctccttgtaaagcgtcccggctgatattctctttcgctttcataggtttataactctctgggcaatggggcgagtgatgttttcaggatgctagccgtcgtaggcgcttacgagtacgatggcactggcgaaaagttttgcgccaaaaacttcatccgaccaaaggtttgtttgcatcaggccttgcttctttcgtaattacaaggtagctgaactgactgtcgtgatttatttctgtctattgacgtttattctcgtgaaggctatgcaagaaatacacaaacttcgagctcaaatttctcacatcgctcaagccaaccttccatctgcttctccttcttcatctatccaacctcttttctcgccaaaactctccccccccaactcgactcagctcaaagtcctccgacaacttttaacgtccgctttcatcgaccaagtagccgttcgaaaggacattttagatccatcttctcgatcggcaggtgcaaaattcgaatcaacaagaggagtagcgtatagagctatgggtgtggatgaagatgtctacatacatccgagctcagttttgttccatggagaacctccagaatgggtcgtttggcaggatgtagttcgaacgagcaaaatctggatcaaaagtatgtcctttttcctttgtccttcttctcttcgttcctctgactgaccctctgtatcaacttttccttttttgattggacgacttgctacttaaacttgaaaatagctgtaacgaaaatgaatccagcctggcttccatctctctccccacctcaatttatctcatattcaaaaccgctcgagacacctcgttcgatctcccaagcgaaactggtaggctcgaaggaaggagagactagggaaacgtttgtcattccgaggttccacatgtcagctcttgcttctggtgcagggttggatagcaaaggagtggaattgccgccgatgaagcgcatagaaatctggaagggtggtcgatggactttaaagtgatgttacagttgattcatgttctaggttccaccaaacttcacatgtttaagaatgtatttcatcgtcaacgattattcagtattccttcaactatgagaaactgaggtgtattttgttggtctacataaacagtacatctatacaaagaaagcccgcaaagcattgacatgaagctatgtcgacatgaacaactgtcgacaaccccttcattcactttcttttggggtcttttctccaaaaccaaatcctttaccgaacccactcttcttattcttcttggtacctgcttccccgaactcttcgttccactgcgattcagtcattgagagaacaaatcgattaagatcagttttcgataattgtaaaggtggaaaccatgcacaattttgacaagagtggtacgaaccttcctgagctgaggcagagatcccatctcctccgaaccagaacttgacgtgttttttaatgcatactcaaaatgccgagccataaggaccctcttcttgatttcctttttcgcagttttgccttctttcgtcgccgtcgtcgacatccttgatcctgagtctttcggtagaaccttcaacccctctaaatcctcttttggtgggttcttccaggtcggtatctccttctgtcggagaacgtcttccggtgacccttcggtagtcaccagcggagtctcctggtcagatggatctaaagagcattgactagcttgattctcaggcttagaactgatcgaagatgttgaggtgccggaagaagtctctgatgtagaaagctttggagtattcgttacgcttgatgagctatcggaggccgtcgagtttgaggtcaatccagattcattcttggcagaaccttcgttggcgttttgaggtttggcccatggcaaaacgtaaagctctttaaccgcttcttgagcagccatcacacagaggtctaagagattgatgaataaacccgaataagttacttgaaggttactttacttcaggtttaaaagtcaagagacaaacgtttcagatcactacccgaataggtgtcagtgtccttagctaacttcgcaagatctacgtcaggtgccagctcttctgttttgcaaagaattttgaggatggcttatcatgaaacataaccactgttcagtgtcgacaatctatgatgcaacaacagattctagctcaccttctcgttccttcagtccgggaaggtcaatgagcaaccgccgaggaagtcgtcgaaggacttaatcatagataaataagattggtcaacaccgtagcccattatattcagtgatatcgtttacaatccctatctacgcacctgcttcgtccaaatcttgaggtcttcatttgaggaaacaatgacatttatcatgacatattagtaaacggtatggggagatatcttcacaaatcggattgatcagcttaccggttggtggcgccaatcaccaccagtcttgtgtctttgttcaaggactgtttgataggtccaacagatcaataattctttcagtaatagctagtaagacatcaatttaagatgaaacttacagcggaggaaagtccatccatctcctgcataaactcagttaatacttgacgtctcgagttgtcaccagtgcctgccgatccagttcgagtctaaaatttagataaaccatcgtgaagttcttcaacttaaagccgtacggtgaacagcacagtagatgaacaaaaaacatacctggaaaagtgcatccaattctgtgataaccatttcaaattcaatgataagtttagcgtcccagtcagaagaacgtacattgatccaacagaagagaatggcaccaaccatcgatgaatacgatgcagggagacaattttcgagcgactgtgaagacagccttgaccagctctgatgagcacaggaacacgtattggtcagcccgttctgaatgttaacatttaaggttgagaggtagacactcactttcggcttctccgacatacatatcctgaatagcacgaacgaaattagctcgatacaatagatcatgagaaggaagagagacataccatcacatcagatggttgaatggacatcattcgcgctccacttgcttttgccaaagctctaacaagtagagtctttccagttccaggcgggccgaataatagagctcctgatgatgaatgatttttcaaaactgagaaacaatcaagagaaacagcgtaaatcgagtcagtatttcctcgatatcccagctttatgttgacttgataataaagaaaaccttcattgactaacttccagtgctaaacgcttccgggaagagaagaggtaaggagactacactcctacggcagacaataaaaggcaaatttacatcgggttagtctcgaagatatgatgatcgatgcaagaccaggacatggaagaagtacgaaccttatagcatcgattgttttttctggcagatgcacatcgtcaaacgtttctttcaccaattttgggtcaacaattgttggcaagattctcttctcatacttgtttagagatgagtccctcttcagtgcttcgatcacataatcctttccgtcctttgcatctttcacttctcttaatccctccacaggtagctttgggtttgtcttggatccttttactgatgcatcgacattttcttcaacctctttgactggcctggcgcttccatgtcgagtctcgttttcgatagcgttatccgtaacctctttgatcccgtattgaggtgatgcctctttccctgtaggaaaatagtagagatactcatcgaggctggatgtctggtgagcagcaaccttgtgcataaattctcggaaggcttccgcttgcccctggtgatctgagcgagcgattaccgcttttagaacatccttccatccgtatgtcaactcattgagcgaaagtcgatcttcgatggatgatcgagtagaggaactagactcagatcgtttggatgaagtgggcttggttggcggttggcgcttgagagacttgtgatcgatagacgctccagcggcgatgcccgagtaagcaacgacgttgtcccaaggaattatcgtttgcttggtctgtttgatgaatcgatttatgaactttgccgcattcgccgctcgttcctgaaacgccagcgccggaggttggaagagatggtgaggggtatgaatgagt

SEQ ID NO: 1456 - DNA, 7127 bp, Xanthophyllomyces dendrorhous
cttgaatagaatctttacttgcgaacaaatcggccatcggctgaagctcttcgatacttcccgtgagattcgctttcgaagcgacggcgcctagcttgaagaggatttcgttaattttgaaacggatgctttctcgttggtgtgtttctctcttacggttgacttttgttggcaggacatttacaactctccaaaccccgtgcttagacttcccccggcccttttttgaaccaagctttctgcctcgctcatcagatgggaagaaagggctgtcgccgcccagaccaccgagcccagagagattgatccgaaaagcaactccttcttccgggagtcggtccatcccaggaaacaacgggaattcaattggagccaagggagtagttgaagaggaagggtcgacaaaaccaggaatcagatctccccaagctccaatagtgaccttttccattctcttctgcaagaccgctgttcgaagcccttcttcttctccctccggaacgacgtttgtcatttgatcgcgtgacatgttcaaccgctggatcggagtctctcgtggatattcattgaattcctcaggtagttgcggccaggagtgattcgaaggtcgtttgcttggcgcagaattcaacaccgatggacccaagccaagtacgatcgtagctggtgcggtatcgtttctaaaagaatgaacggcgtcggccagagcatggaaccatgatgatcgttgatcttttgaatttcttgttcctccaaaatcatacgtgttcttgagaatttctgcgttttggatatatataattcgaggcttgactggctccttggcagatgcttttgagtccacacttggcggtttggaaacttgagaccggactagagactcgaacaacatctgaactgcttgaggcagctcgagcacagaatatggagaaaaggaatttgatggagatactatcatgtcggtcgactgtgatcgagaatttgaaaaagtgagctcgcttgaagcaacacccaagtcgcccaccggatcacacgatggtatacttggttcgaatcgagtcgcctgtgttgagagcgcgttttcttcatcgtccaagtgcgaccggaaagcatccaagtcgatttctgtatgcagagactctctcgacgccgttgaagaaggaggagctggcggactagcgctcattagtttgaacggattgctatccaagggcatgatagccatccctgttcctagaccgtcaccatgaccttctgaacacaaatcgatggcatctaagaagacgacttcagcttctatctgagcagctacctcctccaccgctgcagtgactacataaccgcctccatcgatcgggcaataacagcctataacgggctcaacccgaccttcgtctgaatcagccgagtttcgctgagcgtagtacatggactccaagatggccgctttcagaactgagagattggcatgggttggaatcgcatcataggcgatactgatatgtttaggcacctttggtagatttaacgtcgaaggttcatcctccgaaacaggtgcgtagcactccggcatgaaatctggatcggatgaatatcggccctcaagcgttctgcttgaaggagctgtcacataaacatgagggttgtaacctttcaatgacaagctaaggcttttactgagtgagaagcccatcgagcttgtcatcgagaggagtcgtttgattgagtttgctgatggccgagaaggattgttcttaggtttcgaaggagtcgaagacttggtgatgttcgtccgagggaaggccactaaaggtgaactggagaaggacctcctagaactaggaagacccgatcgaatctgggccaatatcgtccgacgggaaacacgacagggtagcatgactatattaaaagacgatcaagatgaacagatcaagattggcttcagcaaggggttctgtttctagataggttagacaagtgatgcttctcgactctgttcgctctgagaaaccaaggccggaatttacctgatacagagaagttatatcagaagaagacttccacaagaccagtttacagcgaagaagaagatgagaaggagagaaagagagaaagagaagaagggaaccgatagaaaggggtgaagattcctgaatggcgacttgatgcagacgttgtgattcgggtcctggaaagacagtcggaccgatttctatcgagatgagagtcaaggccaacgtcagaagagtgaacgtccaaaggaaagatgatgggcaacgccatgctctcacaaagaaactggaatatatatactttgtcaggtttctatggtcccacgtatgcgatgatgttgacgagatgtgggcagtcacttggaggaggtcgaagagagcgaactgaatacagcgagatcggtgtgtcgtcaacatctcgtgggagtaacgactgagtcatcaatattaataagtgttatcatcatcttgcatgtttccgtcgtttcaagatcaatgatcatttcaggacccatcttggtcgatggacatcaaatcagatatcgtctcgtttcatggttgatcataaaggagttgttggacgatcaagacccatcagaagagttgtgttagatgatagattgcgcgcatctggtactttcaacgcttggcacaacacagatctagaacgagttagattacaagtggataaatcgcaagaagaacaaaaattcgaagaggagggtaaatgatcccaatagaggtatgagatagaggtataagaacgaaggagagaaaaacgcaaaggagggaattgaaccgaataaagaatctcgctagtatagagaacatacacaaataaacatcaagcctgaaagtcggaaagagcacgaaatgaacaaagatattgaaatgacactaccgactgtagaggaggacggtggggaagagaacccttcggcatgcacacacatacaatctgtcaaaataaaaggccagcaaaagaacagagacaaagaaaaaatgacgaagctttccacaactgctcaagatgaatcgcgggtctcaaagaaaccactgtcgttttcgttcatccttactctcattttcttccttgcctttcctatgagggagggttcggccacctcctgctcaccatcgccatccgactcttctctatcttcttccttcctctctctcttctccccaggcttaatctcgctcgtcttcacatccccaaataccagctcagtacgcccaccagcggcagccactgtggctaacatcgaccttcctactgcccaacttccccttcgcttctttccactttccaggaacaagcctcctccggcactaccccctgccctccctggtgttgcgttgaacttgataccagggccgccgccgccgctgataccaccgtttgcttcctctggagtcccgaacccggcaccgacgtcccaagtgccaaatcctgcaggagtagcaggtgcgagacccaaagaccttgtcaagctaagtgattgcggtgatgaaaactgatggcccgaaggaggtgacgacgttccgaacggaatggattttgatgtcgaagacatcgctcggagagaggaagacgaatcggccaaggacggaccaccgagcctaaccgaggacttggctgagcctggtgtgggcctgaaaggcgtcctggtggacgaaagcgatggagtgtagaccagggtggttgaggacgatgatgatttgtaaggggtagggaatatagtgggtagtgtgacggagccacccaaagaatgaatcaacggtgtggttgccgtgatagatcttctgggaggtacctgaggtagcgcaaacacgggttccttaacgacctgttcgcccaactttcgtttcagcgtgttaactctatgagatcggggcgtcgaaacattgctggctggctgaggcgggctggaaagacagccccggaaccgaaactcgtccgaacgatcagatgaattctcttcatcttcaccttcagcatcactgtcacctgctggctcaagacgttctcgttccctggctccactcggtcgtccatccagatcctcttcatcaaggtccttagaatccaaccacgcaggcttgacaacgacgactctgcctagactggttgaccgaattgagggcgtcggagtgccgatcactccaaacggagctctcggctcggccggaccagcgcgatctagttctctgttggaattcagtgatgtttggggaaggccgacaggagatgataaatcctggtgtctgctcggcctgtgagatgtttgtgtggtccggagttgggatgcaggcgagtcaggtaccggcaacacccaactacctacttggggccgaagggaaagcgagtaggctccggatagatgaggtgtactatgtgaggtcttcccggaagaaggaacgggcgcaaggatatcatctgtcaaaggctctggaggatgacgtgaaagcgatctggatcgggctacagacggtcgaccaggcggaaccgatggagattgagggtccaaagatcctccagatgttgatctcttcaaagcgaacgggttgttgtgcagacgatgtatgttttgagaaggaggaagtgattcgtccgactcggatggatgtttcttggacgcttgaccccatggcagatcctgttcttcatctccgttctcttgcaattcatcccctcgcattcgaccgtcaaccctatgtcggtctctacgttgttctctatcgataccgtccggggcgtgtccgttcctgtctgttctttctgccgactcgtcaaacttcacaggtgagctacctgtcttgagctgtaacaacaattcagccgccccatcttcgacacctcccgtctcggcccatgaacttttgtaactccaccctgcgacgtctgaaggtcctcccgaaggaggatttgcccatgggtttgctcctccagtattcctgatgccaaggtcattggattcagacgctgttgttcgaaacgcgtacgatggtctttcgggcgatgctgcggccgaggcaggtctgactatcatgtcgtacccattcgttccagtcttgacagaaaattccaacgccttcgctaagagtggtaccgaactctgacgaatgatcggtgcgggtgccgtcagacgggatccgtaatgttgaggatgaggatggacaagtgaaatgttcgttgaagaggattgttcgtcagaagactgcggatggtgatagttgaaggtgttgtctggagatggatatatctgagcggacaagacagaagaaggcggcggactcatacgtgatggaggcggatagggtgaatatgggtatgttgtggatgttacattgatctgtcgttctgtgtgatgaggttggtgatagtgggtcgatagagtcacttggtgaggtgggttgctcggctgagaaggaggctgtccgtaggtcgcttggaacgcgggatgatggggatagaacgtagcgaagccgggtgaaggattgtgccacaccctttgttgatgaagttgttgatggtcagacacttgaagtgatggatcgtatgaggactgctgctgcgacgaggaggaggattgaatgaagacaggctgaggggcatattgctgttgttgttgttgctgctgctgctgctgctgttgctgttgctgatcgatagaatctcgtgagaagtttgaagagggttgttgggacgtatagtttggttgaggaatttgatgttgccatgaagaatcgtgtgagtccggataagatatgttttgatggaaaccagaaccgggtctgttggatgtttcgccattaggatagtaccctgtttggtttggactccaatcctggctagatatgtaaggttgggagtggttgctggaataaggatacgattgctgagatcctccaaacgagttcttctccgttaacactgtccgcgtcgaagtctgacttcttcgaaactctacttcatcgcctagcgcatcgagcgaggcccctcgacctttgcccttaccaagtcctcgagggtagttctgctcgtaggaaataggatattcacccccagaagccggaggatagtcgtatgatagattgccgtctgcaagatcacgagaagtttcgtcagaatcgtactcatcatagccgatgtccgatcccgatgcctgggagtcaaagtcggacgagagggctgctccttctttgacagacggtaatctagaacgagcctccgcactgaaaagagaagcatcgtcgtcaatagatgatgagtttgaaagcatggcaatttcaaaagttgtaccaaccgtttccgtttagcccagcgtctcttactagccaatgatcttgctctcctctcttcgtccgtcttgggccgtcgatcgtcaactgtatgttcaagtaaaacaagaagtcaatattgctgatgaatagaaatgttcttgccgtgtcgaatcgatcgagtaagaggcgaggcatatacctttgtcccatctggttctacgaggttgtgctgataatggaattttatgcttgtctgataagtgacgtctccatattgagcctattgttttgaagaagagagcagataccggttttccttgatgattagaccccgtctgtattctggcccgtccgatgtgttgtggcacgatagcaagccaaaggggatgaacgactcacgggcatgcttccctgtgtatatcttgtcacaaacgaaacattcgtactctcctccttccttgcctgcactcggattgaaatcaaaccaccttccttgtttacctctgacaagttgtctgcccgagccctcttcgattcgaaactcaaggtcaaattcggtcccgtccaccatgacgcccttctcgatggtggtgagttctatattggatttcgatagtttcctagacatctttggctttgaatgtttcgagcttttcgacccaaatatcgccgaagaggatttcgacgagcctgatgaacggggtttgccgatagacgcaacggatgtgggatgtagaaacccagagatgggtggtgatactgatgttttcatctgagtggaaactgctgctgccgttggcgacgatatcaacgatgggtttgtcg

SEQ ID NO: 1457 - DNA, 47331 bp, Xanthophyllomyces dendrorhous
gaagaggctgggcaggatggatggagggtgtggatgggctgggcttgaaggtcgctaagtcggactgatagtttggaggaagaggcgaaatagatgatcgagtccgaggaggcatattcggattagagagaacgacgagagaagatcggatggaccgagagagctgttcgggagaagaataagtagaagagaacgattcgcatgcgtttcagatcgctcgcatcaagacaccctcctgatgagaacacgaagagagcgagaagagcgtgtttgaggatgagttcaagagtgaatccaagcaggcagagagaattgttgtttagcgggacgaagagtaaacaagaagaggcaaaacaacaaggatttctttgttttattttctagtttgttattacgatttgtgtagtcttgttctaattattttcctagtgtcttttctttgtctttctatacctgttctatctgcaagctcactagcatgcactgagagcatttcttagatcgcagtgtttctgtctatgtggtcgtgtcgagtgtcagaagggtctcttgatcaatcgcagtacccttcatgaactgtttgagatgacgctcaaaggatccctccacctctttctattttctcttttctctcttctctcttctctcccctctatcgggttttcgatgaatgcgacgcgtcatacgcgctaatttaccaagacgcgtcggtttcatcggctcgctcaaacacatccatcctggtatctggtcgattcatagcctcgacaacggctgtatgcttgacgatcgttctattaggtctgagcttaacccaatcttcgcaacacgacacctccttctttcaagatctttgcgctgacttcgtccatcgcgtacgccagattatacaccacttcggacactccagactggacgatcttgatcgcacaattcaagcacggacatctgttcatgcacgcataccggcaaatttaaatcgtcagatcacacttgaccaagggaacacaaaggggaaaagacagggaaaagcgaaatggctaacgtgttgcagtacaagatcgaagatgatccgacacgctcccttccagcttccatcagtgcattttcctcggcatgcaaacagagacacatgttgactttcataccagatgaaacccaaggatcgtatgcacacgaaaaaaaaatgatatcagagaagagcagtgaaaaggtcacaaaacagggacgtacgtgctcctcctcgctcttcgcctttgttgcaccgggcgcatcctccctggttacaatttgtcatccctcgaggtgtgccgttgtatcctgtagacacaatacgcttgtcgcctaccgatatagaaagaaagagagagagacaagtggaccgatggaagaacagattagaggatcacgagatgatattgacagaattggcatctgaagacacgcacggacaaggatacaccccactcgtctcttcatgcaattcgatcgaagcgaagccaaagaggctaacgtctgatttgggaatagccgaataaacaagcgttggtctcatttaaaactacgacagaaaccaagaaaaagagagatggccataccataaagtacctgtcccaacccggtcgtaatcgttctccgtcttctaaatctatcttttctagatatgcccacagatcttccagcgtcgtatagttgttgacgatggtcaacccagatagatcgaacagttcctgcacaggcgcctgaagagtaggctgaagagtgagtgatgtcgcgagggaagaagagagcgacgtagtaggatgaccgtagaggcttagatcgtcagctgtgataaacgagggaaggtccaaacttatcggcgagcgatgggcaactttcgatgctctaaagttaagcgaagagatgagaagcagaccaggatcttcagccggctgattcatttcgcttgacgatgaccatcctgcctcttcagctcagacgatatattctcagaagaatgaacaaacctctcgaatctgaccatcgttccgctcttcacgccaactaataagaaccaaggtctcttgatccatccttcttggagcacgacggccgacgtaagatctgtcgtgaccgcattctgcctccatgtctttgtggcagtattaaggagtgagcatgaatctgagaacgttaagacattcttcgagaatgactcgcccggcagaggagacagtgatgttggctctcggagggaagggcaaatatcaacagatgtaagccttgcgttccgaaattgatagtggacgtctgcagctcactgtatttccttgatagttctagttgcagatgagagacagcacacacgttcaatccaaccgacgtcgtaagatagatgtctaaaaaataggggagcgtctgaaaatggatcaaaccttcgacatacctgatcgatggctatcctttggaagcccttctgagtctgtaaccaagtagcaattgtatctcttcccgagaaatctaagcctacgagcgctataaagaccattctatgtatctatgtatatatgtggttgtgctattgttgatgtaagagatctcagtctccgggtctgtgtgtatgtgtgaagctgctgaacaaaagaaaaggttgaatgaaacgcgtcgcgtgcgtgatgcgttttgaatcggtcagtcaattgtccttcccctttgatccgtttggtgtttcatctggtcaatccttttcttcgttgatctctcctctttcatctttccatctctatcaattctttttgttgtcggcttttcctgcctctcctattgatgaaccgaggctgaatcttgccggttgttgtacgctgactgggcagctcgttgaaagaccgatacttctgttaaagactgacgagtagctgactgaccgactgtacattcttccttcctttcttttctctcgagacctcaactttttctttcttttgtctcgcttgtccgtcaattgacttctgggtgttcgtcttccaggatctttttcttccaagcgcactttcttctgatatcctgatcaatcgacatgaacaagttcattcctattctggagacgagcctgcctgggaagactgaggcaaagaaatcaaagagctcaagcatagctttcgttgggctcaacatccttagagccatctcaacgatagccatattattggtggttgcttcaaccattgtcgtcatggtctcgtgagtgaacaccatgtcctttgttcttattcctatggcctcttcctgcacgtcaaggtgtctccagtcgactgaatttacgccttttcgatctcggtcatcttgatagtgatctcaaagcggtcaacgcctggatcaaggttagccgtacttttttttctcttgcgcaaaagacgagtcaagcgatatagtaacgctaaagagccatggcgttttgttttcctgaaggctggatctccttcttctggaatggcgaactcgacatcatcggccaccttggatgggattgactgtcaagtcattgagcactccagtcagatttcatctacatacaaaacgcttgttcttccttgtaattatacctgacatcaacttccttgctttcatttgatcttctgatctgaagccatcccaaaccaaacgggcggaccgttcttttctatattctatatgataattcttcttctcgtctgtttcgtcctgttcctatcggaactgggcggaccggaatacattcgcagatgcttcgagcggtacgtcttctgtgacttgcttgatcgcctggtgcttttggttttggttgaggtgcaaacgcttacatgcttgtttctgcgtgtcatcatcaacttagatatctgccgcctctcggtccagcgtacgggcttgccacccttggtttcactgaattattgtacgtgaatactgtactgtattctacttagcgcttgcccaatactaaaattgagagtttttgacggaatgtagtgtctcgaccgcaattctttcccatcatgtatccctgttcgctcagatatccgcttggattctgttcgtcatcggctgcgccaacttttgcttggttcgtcgaatcaatcgaccttatcctgaatccagtgcttctaagtacaggtcgtctgattttgtgttcctgctttcccaaactatgtttgaaaatataccacgtagggctacattggttctcgggtgaaggcgcaacgacagatcttttcgtttgagaacctatctacattgacccctcaaacgtcagccgcatatggaacttatcaagttggacgggcgtaccatcatgatcttggttccccctccttcgcggacgtcaaggacaaggttgtctctgcgttcggtcggaagcacaggtccgtcgaaatgaacgaagctttggagaacggaggtgaaaacaagaacaaaataaaggcgaagcaggagcgggtatatgtggatctggagagtggtcgtccaaacgtgcttaaggtaggaaagattcctggagtctcctttggtggacaagcggccagaagagaagctggcactagcattcttatttgtgccgattcagaaaatggtacagacggacctggctggggaggattcggacgaaaggcagagcacaaagcaaagttgaatggatacttgatctctaaacctataaacacgatgcccaagccatgatgatggggtttgtctcgctgttgtatatttatcttgtactgtgagtttctctctcttgcttttcatacctcaggttgcgcgcttatcagatgtagcacttcatcaatagatatcatttaaccctaaaaggagtttatcacgtttatacccgttcctctctattttatcaccattcgaccaaaggacgatatttccttcctaaaggacagtttgacgattcttccttctcctctttcttttatgttcgcatctcgttcggcttcatctcgacatgtccattctcgtacaagaaaattctaatatgacgcagtagctggtcggctttatcggtttcttccgccagtaaagtcggcggtgttcggtaaaatccatcttcggccatattcgggcaaccatatggcatttgtcgttcaccgccatatactaacagagtagaaacagactggaagctgatatcatggtgactctatatgttcgtgtgtcctgtccagttgacttgaacttgttcaatcgaatcacatcatgagggaggatagatgaggaagagttggtgggaaatggcgaagcaaagagagattggctgacgatgtcagaatattcagctctattcttggggattctcactgataccgttcactggtggctcgttccattcagccagtcattttaccgactgacgagcttctcacatctcatcactggccatgtgtttgactcgaaataaagccgacaaaggcgggaacccttggttgaaatcatatatctagacgctatccatcctctttcttcctcttctccttcttactcatcttctcaatcacacatagccgtctttctcaccaagccgctctaatatcaacacttcaccccaagttaaatcttacctagccaaacatgccctcctctactaggtctttcccttcgcccatggtctctctttaccgagtaagtgttcctgctacatgccgttcgacatagccgtctagggcttcagaactcccttggcttacgccttcatttctatcgcgttggttcaatagccgccaatgatatcggcctccccggcatatgctatgtctggagctgtagccaccggctctgtcctcaactttttacgcaagccgtctttgtcttccactgggttgctaggagcaggcctcgtgtcggcaggtctgttctatggcggtggaaagggaacccaatttggacttgaagacggtccctgggtctctgcgggtaagttcgagattttctttcgttctcagaggcaacgaatgtagtaacttatgtgatgttctctcctcgttcttcttccacgatatgttcagccgcctcatcgatctgcgctgccgtcactgtgccaaccgcgattcgaaccctccgaccagcgccgatcattctctctgcggctgccattggtgtaggcgcgtactatatctatgaaggtcttgaggagggatggtagatcatcacaatctctcgagaatctctctgcatggttcatctttcgtcacttcctccaggctgttcttttcctgctttattctcggcttttctgcccattgtagatatctaggtagactatcgagcgatgcttgtctgcattgtataaaaccactccatcttatagaaatatcattttgtatcgtctgttaatcatcatttagatcgtcaatttttggagtgctctcatctattcttccgggtcatgctgtcttatcatcacaatagacatagcctatgatgagttgatgaagcctgacacttgttctgttgttggttgctaagaacaaagagacgacactggagaaattcgataggcagaagccgcgctagtgaacattccttagacgcgaccaaaaatcccaaaattattcagaatttacacccactttttctcctccggcatcatcactatcaggactgttcaacgaccaccttcgattcatcgtatcctgtcccttcatcgcatccgttcccccgtatgccccccaaatccatccctcagccagctaaggaggctcttgagaaagaacaagatgttctccaagcagtcgtcctcgcagattcttataaccatcatttccaacccctcacccagcaacgacctcgatgtcttcttccgttgtgtaacgtgccgttgctcgaatggacgttggagagtctggcaatcgcgggtgtgaaggaggtcatcgtattttgtacgacaaaggcagaaatggtcaaggaggctctcaagtacgttctgctctgttcgctgggcttcctatatgatgtttctcttccctcttcttaccctctgcgtccgatggtcgcatcaccttgtctgggacgatgacatgtgttgacctctgtctatgctatctttactcattcaaccggcagaaaatccacgttctctcgaccgtcttcgcccttgacaatcactaccgttgtctccccttcggccctgtcgactggagacgctctgcgagagcttgattctatgaacgtatgtattcattttgttcagcccttactgccgtttcttccttggttggcgaagaaacgattactagaaaattatttattagtcaagtaggactgatgatcgtggttttataacatactctctaacaacagattatcaagtctgatttcattcttctgtccggagacgtcgtctcgaatattgatcttaagaatgctgtcgaagctcacaaagagagaagaaaggtctccaaggactcgatcatgactattgttgtcaaagaaggtctcggtcgtcgaattcggtaagcctgatggttgaacttactctcagttcagaagaatataggctgagagttgcttgacgttgtcgtaatttctaatattggttctctgtaggccgataccatcctcgtcgctctttgttctttctcctaaagagtcgaaccaactgcttcattatgagcctgtgccagctgttcctcgaaagaagcgggcgcatatccctggaagtgtatttgatctcaaatacggagaggaagaagttgaggtccgaaacgatttgatcgattgtgggatcgatgtgtgcagtgtagatgtgagtcgtgtctcccccccccttatttccattgatatcagcgtgttcctaacgagagtgtttttggtctcactcatgcagatcccggggctctttactgaaaactttgactatcaatctatccgtgtcgactttcttcctggaatcctgacgtccgaccttctcaacctgtctcttcatgttcactttgccggtaaaggctatgccacccgagtgagtgatactcgaagctatgatgccgtcagccgggatgtccttgcccgatggacatggcctcttgttcccgatggaaatctaccaggcgttgaaggcgaggaacgatatgaattcagaaagggaggtgtgtacgtgaccaagagcacggtgttgtctcggacatgcaccatcggaccaaacactctcatcggttcaagatcccaaatatcttcgtcttgttccatttcaacttcgatcatcggacataacgttcagattcacccgtcttgtgtcatcaaagattcttatatctgggataatgctatcattggagagggtagtgttgtcgaggggtcaatcatcggacatggagtagtactcgggaaaggtacgaaagttggaaccggatgtttaatcggagagggtgtgaagattggggagggagcgaagctcgaatccttcacaaaggtcggacgaagagcttggagagaggatggtagtgacgatgaggatgatgaggacgaagacgagggcgaggacgatgatggattgtcaaacgacgctcgagctgccatcctgggaccaaattcaaaaggtttcatctggccgagcgatgatgtgtctgccttttctgattctgaagagtccgacattgaagatccttacgagtatcatcccaacaagcgccttctctctctgggtcgtcgactatccgatctctgcctatctgattcctcgggtacaatctccgttctttcccgagagtccactccagcatcatctcctacatcatcgacttctgatcttccttcggttcccaatttgacacttgtgatggaagtcggcgatgaacctcaattcagacttgaatgtctagccacattggatcacgccttcgagaagggaggcgctgtggatgatgaatccctcgatttcgcagcattgcagatcaaatcggctagagcaacgacgaatgtcggaccaggtatcgttagagaagtggtactgttttatttgttgagcaaagtggaaggtgtggatgagaaggcgtcgacagtgaaagtcatggcggcgagtgataagctgttcgagctctggggcccgttgttgtctagatttgcagagaccacctctgagaaggttgaggttttgcagttcttacaggtaagaatctactcttccctttgatttctctgatcgctgtcaggagacgaacgaaagtctaattttttttcttccaattttgattaattgaaaaattcccccttgaaaacgcttcttctttagaaaatcctcctggacgaatcagctcttgaatcatactatcgatgttttcaggtcgcgctctaccaaaacgaggtcatcgaccagcaaaccgtcgctgcttgggtgactcatcccggatccaaagatggggaggacatgactagattatggaaagctgctgaaggattcgtcgagtgggcgatggagccggatagttcggaggaagaggacgatggaagtagtgaggaggagagtgatggaagtagtgaggaggagagtgattgaagataataatttataatgccttgtttgatgaacctctgtacgtttgaatccctagtcattcgatcacacaatgaacaagattaccatagaagagcggtggacagcgacaatctatacgatccacaagcttattcgaaacgaggaggggggagggggggaggagcgctaacaagctgatgcgcttttgcatgtgcccaagttgaaaacggcttgaaccgcaaagaaaagaagaacgaaagaggacgaagagaagagggagatagaaaacttggaagatgggagaataaacacgaaaagacaaaaaccccacaggcgagacataaaaagagaaaatctcgcacggaaagaaacatcatactcaagcttcgttggagctcggaaacaacccagaaaattactcgacgctcacaccaacaaactatctctattctactgtaatcgccaatctacctgcctaacagataatcaatcgttgatttccttcaacgcagccaaaaaagacgccttcttccttgcataagcaaagcttgattcgctcatacctcctttatagtatcgacgccaagcttcctcttccgttactttttcatccactaccttccctgccactatctcaccatccgaagtcatcttgttcttcagcttcttgtcttctacaatctcgagtcctacctgttccactctttcgactttatgttcttcctcatcgtcttcttcttctccctcctccttctctagttcccccttctccatcttcttttcatcagccagtttatcttgaacgctcgtatacaattcttcctcgtcttgaccatcaatgacttggagattagccatgtactctcggacagcatcgtttgccaccaccctacaaaagccggttaacatttcgaccgaatacaaagagtcagtacagcgctcaaatgaaccgtcatgccagcagtttgcccgaaaagacaaggaacgaatggaataacgtacgattccctatcccagttgaggacttgcagaccatcaagagatcgagctcgcgacaacgcgacgtatgcttggcctgttagtagaagatggcccgacaatattagcattatgacgggttttcattgagtaactcggtagaataactcaacaacagaggtcgaaattcattctgattcaacccaaagtctcaccttcggcaaacatattttgaaagttgacctgcactcgattgatagtttgaccctgagccttatggatacttaaagcataaccaactgagatgtcgaaacatcggcaatacaaggtgatcagcagtagatctgaagacacaaccaagaaagaaagactaacggataagtgggagctgtcaaacgcaaagttcaaaataagatatggaagcgaaggacgagttattaggtcctgagcagctccgtatatccctcgataaactcgtacaatgaaaatgattcacgaacttgatatctcgccgccaaagtttgcttgtgcgcctggttctcacccggcagctcggtcatcctgtgaaccattggtttaatcaaatatagatccccctcgatctcaaccaccggatacaacgttgggtcatccaacctcgccctctttcttggttcgagatcgattgttacaacatcatcgatctcacgttcgagatcatcgaatctcctgtcatacaacacggtcggtgtgagatactcaaacacatcggctcggatatggctttctggtatttcgatagcgagctcatcatgttcgtgggcctgtctggtcgacataaaagagtgaacgacaccggttgttccgttgacaatcctattgggaatcatgttctatttcgatgtatcgacaagagccagtcatgagtttggatcgatgcaatgtttcagtcatttggtacatacccggacaatcatcacccgagctatacgacggatggttcaaagaaggggaaaaaagaaagtctcgcaaggtggtcaatcaccatgaactgactctcgaaataattcatcggtcacaacagagaagagaacaaaagaagaatcgaacctccaactttgagatctatgatagtgggtatagatggcttgaaagccgagctgatgtaggctaagtcgttccgacgattctctcgggtcgtcaagtagttgactccaacatatcggtgggtgtcccccgcgagctgaaaaagattttggaggttctcctcttcgacttggtttcttgttggtaggctatacgtcatgatttttttcaaataagagttagtttatcaatttgttattttgtcaccggaacaagtggaattcttaggacgaagaagagaacacaagagaaaagcatacagtttcgttaaggtcgtgtcatcttcccaatctggtctctcgagtgctctgaaaaactcgtccgtttccgagtcgactattccagaccggattttgttcagatgaaagatcaaggttggatctttctgcctgaaaatttgagtcaacttgacctccaacagaatggccgttttccaacaatcggcttggaaagcgtacttaatcgaagaccatgacgttccaacaggaggcaattggaagaagtctcccgtcctagatagaaaggagcgttcgggttaaagatcagtgatgaactggttgatgtgataagggggctgtagaatgaggaatagtacgccgacttacacgatcaactgaagacccccaaatggccggtcatctcctcgaatcgttctgccaacaaaatccagtttgtcaaacagatcaccatcgatcattgatactgtcataagacaagagaagaaagcaaacaaaaacgatcaacatcagtacggagtgttcgccgcttgagttcttgagcgcatttgatgagcataccttcatcgatgatcaaaacatctgtcgaagtccatctttttctcgccgatttcccttctacctctgtcaacttgatgatcatctcctcagccgttccgtctccgagacctattccagcccaagaatgaagagttgttcccccaatgttgaaagcagaaattccggtcgaagaagtgatggctacggtctgctggagttcccggaaggcgtgaacgagatgattaatcagataacttttaccggtacctgttgaatgttgaagcagatgagcgattctgtgtgagaccggagagcggatgaagcgggtgcgtcactggaagagactgaccagcagcgcctgtgaagaacatattcgttctacatggtcccgtagaacagagggtggagaaattagacaagaacgcttcgagattgtaagacgattaaaggagagagaaagacaaagaaccagacgaaccgatatgttgtcgcgtactgcagtaacattctctgctcgtacgacaacggatggatcaacgctcttgacttgtattcctctaacgactcctcttcctccgtcaacagagcaagcgtctctgtttctatattcgggtcttttaagagcttgctctcagaagggacatgtcctcgatgctcaaagtgcatcatttgacttggcgaacttggtcgttttaatcggatttgggtcgtgctgaaccgttgtctgcgaagccatgagtggttgagactttgttgaaattggctagagggaccatgggaaagaggcgaacgatatgaagttgaagagcggatgggcagacttaattgggagagaagcgagggagtcgataaggagctgatagttcgtctgttcaaatgaattcgttccatcatccatagaaagagaacgagtgagaggagtggaagagagaagacaaggaaatgacaataagaaacacatcgggtcatccacgacaatcatcaacacttgtcgtctaaccaatatagaaaaggctaggttgagagtaatccatacctaatcagatgaactgatgagaaatcatgaggtcttgaagacactgcgatgcctgtattcatcagcaacgtcgaaggcctgcttgagaggtaggatccagtggcggatcgcataggacagaagcggctcatgcttaatccttcgtcttttgcttatttcctcttcttttcttgttcttctgagagcacagcggaaggagaagaacgttaggccaaatatctcagcagcagcagaatatcaagaaacgcctcgacatacacacgcacacaacatacaatgggcagaacccatgcgaattatcagaagtgtttgtggattgaacccagaatgagaggttggtcttaccgtgactgggcggtgcagagttctcacgtgaggcttgcgccacaatctgccttgaactgtacgcatagatacattgcctttaagtatgcttctttgtggccgttgaagattcgggcatggctgttcgctctgatcttgtatatgtgttcttacaggatggagaggcgctgtccggagttcgtcgatagaaaaagatatatagaatagtaacccaatcgacaaccatgtatacgacagacacttttacaatcttatctgatctattcctttgcgttccttcaccctcatggctttttgtagtatccagtgggtacgaacggcattccggctacgactccgtcgtacaacttcttccggacctggatactgatctgaagatttcaaacgacggcgcaagcagagctttgtaagaaaagtctactttcgagtagcagatacagaataggattgtcggcctagaaccacaactaacctcagtccccttcttccaggaacctttcttgagatagcccattcctatattcttcttcaagctgactccgggtattccgctagtaacaactccaacggcctgatccgcaggaggaacgtccgatcccttgggcaatcgagggaacacgagcgagccctctctaaatggaggcccagactcggagagcagacccactcgacgacgcgtcagagtcgacggactcgcaagctgagcgagaatgatggatgcgccagggaagtcggctgcttcacgtcgtcctttgcctgtttgagatcgacataagcggatatgaaggaaaaccccaataaacaatcagacaaggctcggcaaatcaagaacagagtctctgttaaagagaacataccgataacccagctcagtccagcttccactggactcacgctctcatcgagatcgtgtccgtagagacacattccagcttccagtcgcaagctatctcttggtccaagtcccgtcaacttgacgtcctcgtgttctttcaataaggtggtcagccgaaccgtctccgcaggaggcagagagatctggaggatacagacaaaggtcagtaaacaacatctctcgtatttaggaagtgcgtgtggaagaaactaacttcgaatccgtcctctccagtgtatcctcctcgggcaacgtgaactttgaccccagatatctcaatgaatgtagactgcccaaagtagagagtggacagatccgttgacgtcaacgactgaagaatttcggccgccttcggtcctatttaatggcaataatgacattcagtctagcttgaacagatacactccaatctctcgtcaatatatgcacctaccttgaagggcgaccaaaccccagccatcgaggacctccatctcgaccttgcccttcccggccttctcccaagcctggatcttttccttgaacaaatgcaggtcctcagctctcctacccgcattcgtcactacataaaaagtctcgtcgttctcgtgtttggtgatgatggtatcgtccacgattccccctttgtcgttcaataggacgctcaatgagccggagaagggaggcaaagccttcagatcgctaggcgtgatagactcaaggaactccctagcagatggtcctcggaagtaggtttgaaccatgtgagacacatcgaatagaccagctttggtccgaacgtgggtgtgcgataaggacgctccgccgtcggaaccgtaagagagaggcatagcaaacccggcgaaaggaacaagctttccctcattcgcgagatggaaatcatagagcggcgtcttggataggtcatcaggctgagtggacagaacaatcagaaagggaaagttcaggcgtaaggaaatgctctaacgacttcacgagaggaaagagagaagaagcggaagcagaaacagacagagtcggtgcttgaagcgtaggacctagccgaaacgataggcgaaagatatctccaggcaggctggacgcggattgcccgagttggaagattccgaagaagagatatcttggaggattgcatcactgcagaaaagggaggacaagcaagaaggaaataaggctgagagacgaagaagaagaagaagaagaaagaaaaaacggagagagaaaaattggagagaatatataatgctgatggtgagcaccgaagaaagaaaaagcggtccgatggttatcaagcgtgattgcctgttagataaggcgcttccttctcctagcatgtcctagttcttccaacatggatggctgtgatcatcaattgaataaacacgatcatagttgaccattcgcatttggagctagatatgtttgatcttatatccagtatcatcagagcggtcaagaaggagaatgtttagaatccctggaagcaagatggtcgcaatctttggaacagctttcgagataagatagatgacaaccttcaactttccaacaacctcaactgttcgtcttctggaactctacatgtttcttcaaacacattcagaaccagcacgagtcaagttgctttcttccaagatgtatataaaacatgagaattctcgagcgcacacaacgataccttcttcaaccggcgcaatccctttcctctaatgaatcttacttattttctttcttaccttgcatctctctatttcccttcctctcttcacttcgaaagctttccctcaatcatgaccaacctcatccacccgaccggcatcaacagacaacgtcgtgttgtcagagccacgttaaggttactgtgagaaaaggggccattacgtgtttcagctaagcccacgttgtggtcacgtgattctcaaggtgcacatatattttgttcagcctcgtttacgcccacaactacataccacatcatgcccggcgctcatatggtatccccggaggcacacgactggtctcgccctcctggggtctcatccaacgtcaacattgatggaaacagtcgaaactcgaatcctgtcgtcccaagtaggagccgtcagacctccaatgcgctttcggttgatactcaaactggttcggaaggattacgctccgatctctcagtctcccatgaactagatttcgtcgatgacggattcgaaattgaagaggacaacacgatagaagaagaggaggaagaagaagagatgaacagcctgggcgacattgattttgttcggagacgcgctatcaaagccggaaaggaaagggcgattggatgggatgcaaaggatggagaagagtctgttggatcgaagaggatgtcgaggataagaggtacctagttcttctctcgtttctgttccttattcgacatccatcccatactgacaatacctctgttgtattcttcggccgcctcttgttccagaagatgctaatttggatagctcattcctgcctccctcgttcgagaggtcagaattcgaaactgtatgttttcctagtatataccatcagctatattgacataggccaatcgccttaacgcccaatacctgcgcttcactccagatcgtccgtcgtctcaagacacaaacccagcctggaagtctcaaaaggaagaaagtgggaggagctttaaatacagaagacgttggtctggatgatgattgggtcggtcctttgttgtagaactattcattcctccttggtcggcgctgatttctgattccacccatatatgttgcttgctctcaattcatactctcaggaattcgctgtaagtccggttttttttcttcgttctggttttcagtgtctcgtcctgatgaataataagaccatatgggggcttcacgttactacagggttggggctctgtagcatacattcctctttcgccttcagcggttcttcaagccgagcaaaaggtactttccagactagataccaacaaccttttaggtcaattcaaggcgacaagtgttgccggaaatgctgtctttggcagtgtcttctactcgtcagtccatcataaactctttctattctctgtgcgatgtatacaccagaaagtttattgttgattcaaacttcgtgttgaatcactctcattgaacgatagattgcctgcattgtgtcaaactggaaaagtcctctcgcctctctcaatgatgatagcctgcttgatcctgctcctctggcgaggaatcatggtggagcttggaggagcaatgcgaatcaacggaggaaacgtatgtatcaacccgggtgtgatcgccgtctcgaacctcttacccatgctcaccgtgctctcacgtttttatccttgttaacacaacatagtatgcatatctcttgagcgtctctggaaagacaatgggtcttgttggagccgcagtcacccttcttgacgtgtgaggtctgtactcgaaaagagtatattcgttgatgtgactactcgtatggatctgtcatagctgaagtcactctttaaaaacgtacagggtggccaccgggaccgtatcggctggaacggcagcggcatatatcaacggagaagcaaagaatttgccgttcaaagagtatctgattgggatcctgatcttgatcggtaggttctactctcgatagccatgtgtgcttcacatatcataagagaggagaaagaatccgttgactcaaattcagatgtacattcgttgttggaatcgatctggaatagtgtttaccgctctgctgttggcaggtgttaaggactcgaccaagttaactttgtcaatttgcttattccatgtaagctttctcaaacgtatctttctggtttgtacatgtcttctaatcagtcgtgattgatttttgattcgctcgctatcacttgcttggtattgatgcgtcatcgaataagttatttaccatggcccttctaatggtggtctctaccgtggcctggattcgagaaggcaacaccacactgttgtctaactggaatctctcagtcaaatcgtgggacggcggtaacggggcggtcagagcagtattcaatgggatctgtattggctttctgggcgtgactggagtagaatgcttaccgacgtaagctatgttgctctattatccgaagaggcgtgtgtaaatgcgttcaaggctaatcgacatacgttaaattttacatagatttatagagcaaataaaaccgggagtatactcaaaagcattgaggaatctactgtatggtacgttgctttcaacctcgtcctctctttgcaatccaaacctgttaaccgtatcctcgttctgcatccctcgatgtaggagctctcctcttgaacgtccctcttctcatcatgttgcacgcgctagtccctcttccctctcttctctcagcctccaacgttcttgccctcttagcttccatctcgacttctggcggtggaggccgatggctctcgatctttgttgtggtggatgcggtagctgttctctgcggcggcgtgctctgtgggggagtggcctgttgtgcgttggttgaagagttgagtaaagacaatgtgctgcccgagagttgggggcgaaggtgggagagaacacaggcaaactgggttggggccatcatgtactttggtttatgcttaggttagccgctattttcatcttctcttcttctcgtatcttttaatgcttgacgacctagttttaatgacttgatatgtttaaaccatgtctataccaactgggatgtctaacagcgttctatgctacggctgggttctccttgacgactctgagcaatattttctcgatttctttcgaattcatgatgcttcttgtcagtgctttttttttgtttatctcgtctgatctcaaagtcttgacactatccgaccttccgttgaatgttctgtcttgtgattttagttcgcgctatctcacctcttactccggataacgctccctaatcttcctatccctgctccattctgccggtcccgtttttcagtcacccttctcgtgcatgctctcatcttcactattctcatcgggaatgccttgttgaatccactcccgttgggcctcttcgcggcctatgcagtcggaattttcagtgtcctctggacggctgagattgggtttggatcgattctccgcgcaatcgtctgggcagtcgaccagagtgaaggaacaatgattcctaggggatcaggttggatgtcgatcggatttggaaggaaattgaaggaaaacaaggacggtgatgttccgatggaaaccaagacgagtaagcttggtgatcgtgagccagaagaaatggaagaaggagggaaaggcacaggagggaaagagaagggattgagagtcgcgctgagaaaatcattgatcaaaggagtcagacggtcgaaacgaaaggtgatggtcgcatggattaaagaggacgaggtttgtatttttgcctctttttcttttcttttccggatgagaagaggaataaacggtgtatacctcgctttccttcccttaaatgttgacaccctctttgttttttcaatcatccatagatttctgcgctcattcaagtagttctatatgttctagccaacgaacagacttcccacctgatacttatccacgcgtacaactctgtgagggacatcccatccgaattacaggctaattcaaaactgttggacgaagcgtaaggccacaattgttcatctccgactttttgagaatctttcaatcctagtttgctgatgtggtctgttgctcattgatgatataggttccccgctttgacgatagacttgaagttcgttcaaggaagtttcaatccgatcgtaagtaccctctctttttctgattgtctcattcatgctgacatctgtctaccttgacttttctgtgtttggactgaaatcgtagatcgtccaagcagtatctgatactttggaaattccacattcgagacatataatcggatgtccatcacccagtcaaggagatctaggctcatttgggggcgtccgtgtagctacattccggaagtgatctggaccgagttcattcccatgactctcttgctatttcaacatctttgcctatctattttctttgtcttgccttttttaatcgcattgctttgcattcggtaacctcgatactatctacattgtatatctatcatttcggtgctttctttctctgtctctttttctattccgacctatatatgcaatcaagtgggctaacaaacttccaaatagccagaaatctgtgattgtgacattccaacaaaatctctccacaaagatacattctgaataaagaggcacgacgtgagtttccacaggaattgaatctatacaccttccacgaatgagaagagggtgaacaggcaagcgcttgaactctaacagtctctagacgtgaggacctgtgtgaagaggaaaggactcatgtcttgagttaaacctgtgcgaatgaaccttgctatcggtgtccaaacaacgactaacaaattcagtccaaacagatgggcgtgagctgaaagagtccagccttctttcaactgatacactgcttcatatctctgcccccttgcgctcgataggctgtgtgatctttgaagggggatgtcggttatattttctaacgaagcggacagcacaagacaagcaggggttgataaacaccaagtgaagaagaaaagaagacagaatgccacaactttgaggtcgtcggaacttacgcttcagtgttctttcgatcttgagccagagccgctagattgacgactcgctcggaactaccgtctggtttgtgatggatatcgaccaagccagatctctcgactctgtcttccgaactctttggtcctgtctgttggggtgcttcggtactagatgacatgatggcgactgtagttgatgatggtttgtagtagaaagagatgtgaattgtgcttgggggagttaacgcgtcatcgcccacacgaaaccccacgtcgccagagctcgtccgctcatcagagactctcgctttacttctttctgccaacgatgagtcggccaacatacatcgtcttcaccaatcctccgacccgaaaggccgttcgtcggtatatccagagccctcctgagatctctgaacatccgtttaagcgagtgaaacttcaactggactggcacacctcggatatacttgatcctatcttgacggtttccccgtccttgtgtgatcatgctttagtcccttcaccttcatcaccccggctgacgcctgttcagagcacgtcagcacgaccaacctcggtggcttttgacgcggcttctggtcatctgaaggatgcccatgtaacagtagtagaggccacgttcgatgaattttctcgagaaggacgaagaagttcaaacaagcctcaagaggcggtgggcacagttgccgagcgcagaggacttcagcaaactctcggccttgttgcggaagacgaatcaaccaagatagcctcaagtgaacatacggaaccgcgaagagatggaaggtctgagacacctaaggatgaagcaggagacgtaagccgcgctctggaagaacagacaaagttgacaacagttctggacataccggtccagagaaatcaggacaaagccatgcaaggttcgttgttaccttctacttccttctctgtctctgatgtcgtatgggttgccttccttctcgtttgtttcagctctgtctcatctcttgcctggtgtttttcatgtgagcacacaacagaacaatcttcctgtctggactacgcatctatcattctgcctacgaatcaccaaacattgccccttgtctcctctgcctctaattcgaataacgatcctgccccttccgtggcccagccgacatattctactcaaagctcagtgccatacccagacatgacaactttctcttttcttcaccggactaggccaaggatagtcgaacctcatagtgatgtcatccagcatactactcctgctgatcgtccttctcgtgagaagagccaggaacaagaaaccgacaagcgacaagacgcaggagagcgttctgttcttcactctaccagactggaagagttagtggcggcgccgatagcatcgatcatgaatcgtgacgaatcgatcgatcaaggtatcggtccttcgactgacgaccgaccgagtaggctcgaagtgccgaacttgaggactgactcgacttcgattgatatgaattctatccgcgaattaagcatgacatcgttctctttcactgtcgccgccgatacatctgcagccgcctccgctgtcagtcccactgctgatgtcgacgacaccgtctctgaaccaaatgattccacgagaccgacagaaggacctcgacggacctcgaacgtcctgaatcttgtgaaggagtccctacgagagttgaactccgaagagggtttgcaaacccggtcctctatctctcggaaaacagcccggcaagcgacgcgctcctctgcttctctcctgacgcatgttgaccaaccattagagacttcacttacaactcactcaccctactctctccaatcatccactgaatcttcattcctccctacacaggccgacactcagcctcgtccatccgttccatcatccgttcattctgaaacttctatcgatcaagcatatcctcctcatccaaaccaacctcagaaagcccatcctacccatccctatatccattcaaatctccttagaccacttcctacattcggtcaaccactggatcaaccaaccgctaacttcttgaccgtggtcacttctgtcgaactgaaatccttcgtaggtaaggacggaaggagttggctcttgggtgaattagaattgtttgatggaaagaacgttgggaggttggtcgtttggggtcatcaagctagagaatggtgcgatggcgttgggatcagaaagggtgatgttgttttgtttgaacgtccgtgctacattatcctcttcttctttctttcattctttcgactcccgctctgttttgcttccttacatgaaagcatctttgtgcgttgactgacgaaaagtaaaaccccaacgcatgcactggtttgcgtgcgcgcgcgctctgatatactttatggattctcaacagggataacgatcgtccaacccaaaccaccctcgcgtatccaaactctccaagccttccctctcgaccctcaacaaccacgatcccgacctcggaatcaaccgatatcggcgtacacgatattctaccgaacatcccttcctctgcctggtgaatccgcggaggagtggggatcgaaaagagcagacctgaggtggagaacgtcggacacaggtttgggcttggtagggcgattgaaggattgggtcgagtctgccggtgtctgaaaagagggttttccctttactttcggggaggttcgtgtgacctctttttcatctttcgatctccactcaaggggaaaaacaggtcctttagtttacaggagagaggtcagatcgaattttgctcgagctatttgaccaagtaagtccgtccgtccgtcctcaactctatatagacagcaggttgaggcctgaaaaccagagaacaactgacacaatagttggataacaagatatgacaatttcattttatcaggagaagaaataagatagatagagaaccgttcagtgagcaacaaacgagcggacgagaaacggggcacagaaagggaagggagaaaagacgaaaaagggagaggaaaaactggcaccagatagaagtacaaccgacgatacatggcgtatcgacagataacaaggaagaagaggaaaaagagaaaaaagaaaaaaggaaaggaaaaaaatgaggatagacggagagaaaaccaaacgttgaggtgatgatcaacagtggcgagagagagaaaattgagaaggatggaccactacggatggcagaaaagcaaggatgaaggagaccagagagaggaaggagcgaaagaaagggagagcaggagatagtcaggagctcttaaatacaaagaagcaaacataaaacaacaaagagtgaagaaaagcgatatgaaatacggaagaaaaagaaaccaagcgtgttttctcaataatttcaaacaagagataagggtggcgtacaagagaagaagaagggggttgttggatctctcagtggaagaaccgtttcttcttagtcgcaccctcctcgacctcgatctttgcgtgcgtatgatccatcgagtgcccgatcgggaaatgagaacagcaagtgatccccttgatccattcgtctccttcatcactgtcatcaggagtaacggcctcgttcggcggcgtgttcattcctccgccacattcgaccccttcacactgacagacaagcgcgtcgttccctgttccgcgtagcagatcggccagagtgcaccgagcggtgggctcgatcgtcatcatcgccatgatcgcaggccgagtctctctcggcaagagccggaagattgagtcgactccggtgcagtcggcagcagaagctcgggcggcactcgcattggaggccgtcgtcttggtcgtcgtggtggtcgcggcggttgacgatcgacctggcgtggcaagaccgctcgaggccacggccggaacatcgctagaaggtaaagaggtcgttccctgttgggggctagggatgttccttccggatatgttctcaggaccagtcaccgatcgttgacggacagccgaatgcgattcaggtatagccaagccctgggtggtgggtgagagtgtcgaattggctagttggttgaccagccggttatccgtatctggtccgtctatcaattcgccgttaccagagggcgagaccacaccggatgcggttcctcctctagcggttttctcgacatgagaagcaaacctcgaggcaggctcactggtggtgtgtgccctcggtcgatccatatggagcacactagggtccatctcttccggggaatcctgaagatgataatccttgttgtccacagggtggaccattgagatcttcaaagccgatttcatatgagctttctcagccgcagatattccgtctcgtggtctggcatcaatgtagctgtcgggttctgtggtcaaatgagcctggttggagggcacactctgattggtcgataacgaagatgacatcttgagatgtgcaggcagatgggagcatataaccgtggcctgagtatttggcttagacttcgacccggcggcaggggccaagagttgcgggtgggtgttgacatagagctttttaagaatgagaacgatgcgttgcttcgtcagatgtgaagactaggaatgtctgcatcagagaggagatctgaaaataccttgtagcttgcatcggtcttggcatccggcaacttccaggggaaccgtctagattgccgagaacaagacaagtagatacacaccagatcaaccttagctaacgtattcgctcaggaaagtatatgttgcatagagcgcgatgggaaccttgatggactgacctcaaaatcatacaaaggaacatcacacccaaactccagacgtcggtcttcctaggatcgtattcctggccgctgagtacctcgggtgccaagtaggggtcactaccgacgactcccgatgctttgacttgagctttgcctgggtattggaacacggtggccgttccaaagtcaatgagcttgacaacgttgctcgtagtcatgacgcagttatcgagtttgagatcacgatgggcaagtcccatgccatggagatagttgacaccgtcgacgatctgtcggaacacgcaatagatctcaggtcgagccatcttgccagacatgacgaccgagaataagtcgtacggagcatattccatcacctagatgtacaccaggaggaaaaaaaacgtcagcaccaaagatgcctatcgtacaacagaggtagacgaccaagtacaaacctcataataatgcccatgatcgttcacgatatcgactgtctctatgacgttgacgtgtctgagtgtgacacccacacaaaactcggcggtgaccttcttctggtactctttctcgctctctcccaatcgctttggccggaactctttgacggcatagatgacactgccacctttggttgagcccttgatcaaccggacggttcctccagcacccgaaccaaggactttaccccactttccgtactttttagaaagctgggcctgggtcgcattcgccaacgaagggtgtgggttgtggtggtggagtgaggacgagagggctgtggatgaacccgggggtgttcctccaaagacaggggtgtgagttccgcctgagaacgaatgctgatagttgggatttagatgtttctgtccggcggtaggaagaggaggcgggttagagggaagaaagcgttgactagccgagcgaccaagtgagccagcaggcgaaccagcgacgctgcctgtcacagcggaagcttcctcgcggacttgcaagcttcgttctgggacttgaggcaatccgggagcgtttgtcggatcaaagacgtcctgcgaagctttgggtaccggccgattttctttagttgaagttcctgccgtgctcgcctgagtgagaccgaggacagaactagggggcgaggtgcgatccttgttcgagtgggcggctgaatgaccaaagtaaccggttttcttcgtggtggggaatttttcattcaaaggagattcaacatgttgtggagaaccgttggcggtcccaggcgcatgtgcgggtgtatcgagcgcgttgagatggtgcttgtgagggtggcttcctccgatatgggtgtggagaaaccgcttgaggtcgtgtagggggccggtgtgatgtttgacgggccgggtgacgatcgaatggttctgatgggtgggtgatgagggcctggtggacgtcgagttgtttccggttggcgtgtgagttggggagtgaaaggttgaggacgcccgcttggtgaacccaaacgtgcttcgtctggacggggcgacggatggagcccgggaaggcgctcttgaggatgtgaccgaatcgacatcccgacggtcggactgcggggaggaggggacctggagaaacgaattcgaagacaaagaccaggacgatgaggatgaggagggtggttcgttggaggatgaagcaaacgaagagatgccgttggtggacgttggcccagagatgaaggaaggatggttggcgagatcaggagaagagatggcgtgtcggcattgcaagggcgacgaagggaccgagggtgatttgcaaaacgacaggcggattaaggaacgagacggtttgagggttttggtggacgagggggatatgggacgaaagtcggatgggtatggggagagatatttcatcgttgggcgttttgatttgtcgaagagagtagaaaccccgggaagtgttcaagatacggggtgagaacgagtgaagcgacgaggaatgacggatcgaagatagcaagaaaggagtgaaacgaatgtcagtgatgttgattcagaaaacacaaacacagaagaagataagaaaagctcgagatggcaagaagggatggaaagaatgtccaagcaggaggtcgaaaggggactgaagctgggcgagatgttcctttcttggcagggaacttctgtgagcgttctatgatgttttgtagaggtacacacggtcatggacgccctgttcttttcctctataaggaagctggatggcggagggtgagggtttgttcgaggatggtcttctcgttcaggttgtttatcgtcatctccttcacccagactattgtttcttgaagggaaacatcaagtttgaccctcccgcctcctgcctgagaacgtttctggcccagtatgaagcatgggacagtgtcccatgctccttccttgagagttcggttgactcggggcgatcatgtccaactctctgtctttcggaacaacagatccgactatctggacggacaaaacggatacgaggaggaaggaacgcacactatcggcggtagccatctgctctgccttggcctgagtaaacgaactggatcgcataccgtccatctggtgtgcaggcggatggatctgggtggatgcctatgttgtatttggaaggaacagaccgaggtgttgacgaccgcgatagaataggaacgaggtaaacagaaaagaaagaaagaaaggacgacgatcggcgacagaaggggtaacccaaggggagagcgaaaagatgggtatatgcagacatggacatgaacgatcggtcagcttctccgaggtgacagaaaacttggttgaacgatgacatcttcaatctgtttgacccaacgtgcgaaagggaatgatcatctcattctttctctcgtcctttttatctgacagatgagatacacattctctatactggtcttcttctgggtcattcaagaatccaccaaggcttttgcgatggacgaatgtaaggatgggtctccccaacgaaactataccctgcttggccaaaagaccgggccaagatctcgccgcgcgtcttttcccctttttcttctgttctctcctttcgcccttttgagatgaagaagaattgggaatcgggagaagactgacctgaatcatgttttgacgttcgagttatatgatgtttgcctgcccacgatgatcgctttgagaaaatacgaaaagacagagaaacacaaagaaagaaagagaaagagaagaggaaagggatcaacgaagagaaagaagaaaggaaaagaacagaagaaaaaagagcgatagcaggaaaaaaaggccaggcaggaatcgaggccgggtacgaaaactattaggaaaatgatgggagtctattaggaaagcgattagaaggctgattaggaaaaaaagaagggaccgtttgcctgattacaaagcatgctcggccgggcaatgaagccgaccggcagccggtcggcagccgaattaggccgggatgatttaccccagaaggaaatatatttatacatccagcttcggagggaaccccacaggattcttcggcaatcttgttagggttatctaattgaccggcggcctttctcttgattttctattcctctgcttttcatcacgttcccttttcatcgaagaaacactagcaagcagcttgttgatggtaatgatgataatgatgatgatgacgacgacgacgacgacgacaggggactgtcagcaatgagaacaataatgctggtggcgatgatgctggtagcgttaaagcatccgtggctagtacaacacaatgcagaattccaattcatatcttgtccggccacctccttcatctctggccttcatccgcgtcatgtggatgatacatctccatgatccattcctttgaatctatttcacataccatcatatcagaaagagagccggaaggacatgttggttcttgtttcggacaactctctctgcgcaagctctgagagaaggtctggtggtgtcggttttgtttcggtcgggaatttgagattggttacatattcaataacacgtgattgtggcgacaaccgcatagcttacatcttacttctcgctgttacctatcacaggtaaccattctttgctcttgtccctcctggttctactacttctctcgctcttcactcacatcccccgtccgttcatcaactcatcgagtactggaccgttcggtctatatatcgacacatcagctcacgcaagcacgcactccctcctagaacagtccctctcatataaaacacgcacatacttatacacgcaaaagcgagaatgttccgttcgactctccgaccgacactctcccggtccttcagcacgaccccctcagtgtcgtatccccgggcaccgctctaccctccattccaaacgaccactgctcccagaaagctcgatgctcgactgcgatcgctacaagacccactctcaccaactaagcctcgagtatccgatccacctcggccagacagaaagtatccgtccgagctcgatcagccattgagaaagtacgcaaagccacaacgttccaaatgggatgggccggagagtgacgttcgggatttcaaaggtggaaagtgggccgggaaggaaggctttttggctgatcctcagttcgaaggcgttgaaaacatcatcgagcaaagaggaggcctgagaaagatcaagcccagccaagtctttgtcggaagggccaaggtctctggttttgtcccaatctatgtagacgtcagtccacgtgtttttgtcttctttcctcttcttccttttcttactcacggggatatggattttgaactcacaacaatcaacgtcctccacgtccttttttttctctttttttttctctctctttctggttctgactctcctcggggctatctagaaacgaaggacccagcctttcaccatcatcaagcagattcaaggcgatcccaaggtacgctatcccttcagatggatctcatccccctcctttcacttgtatcatcgtgttgtctccctctatacagcctttaacttacacctgctcttccctgttcccgatctttgttcttccttccctcttcaccattcaggctctcctcagcccattgctcaagtacttgacgctcaaacgaccggatcatagacgaggagctgagggcagaatcagacctgtcaccggcgagattgagatcaaaggtgcttggaaggaggaggttagggagtacttgcttagccaagggttctagagggtgaacaggaagtaggccgggaaagagacgaaggaacgaaaacaaagcacaatatcatgatggatttgcttctcaagttcttgcttgcttgcttgttgaggctctcgtttggatcctttctctgccctcatggctggtgtgactctttctccgtgccaattccccggatccaatgctcagatccagatggcgaccctttcattcaccttttttccagacacagacagaacaatgggtgaagaccatctatagacagtttccttcaagaagaggaaacgaacgagttgaatttcgtagggtttagcagcccaggttctggtaacctatcgacctcctttccctatgtgatccaatacatatcccatcgagagcgaagagcgagaggaaggaacaagattctgtaagaaagacttctagggaatatgaaagcacacaagaatcaagaagagaagagagtgagagacgaacgttgacatatttgatgatcgtagggatacaagtcaagttgtaaggattcttcctaaagactgaatccgaagatctccaagacgaccggtcgcctacgtattgtatctcgagatctattcgttcatccatcggatcgatggggcatgcgaatcaagtgggaattcaggtagaaatgtgcagaaagatcgaaggtttcgacaatcaacagattaggacaagtctgttagctcttgcttttgacatggtggtagacattatgcgaaaggctacgtactatgcttagggctactcttctggtacgactcgaccaatggtatagcttccacacagtcctttcattttgaaagacaacaacagcgatagtcaaggcatcacaaacaatcttagtcagaccattgagaagagaggagtcgagctttgcttggtctggctaggaaacaaagtacaaaaagaagagtacgagcctgcgctgcgaaactcacaggacaccacaggttctttttgacctcgtcgtaatccgagaaaaagatgatgaaaaagttctcttcaggagaactagccgatttggacagtacggatggaaggatctcttcgttggccatcgttcttgctcaaagatgatatgtcgaggatgaggttgatcaaggaataccttatggaggttgcttattcaatggatcaaccgtcttctgggaaacaaaacgtcatatcacgtgatcacactccttgcgtttgttcaaaccccatccagcctcttgacttggatgtgtgttaaccatccttgaaggacccagtgtgttcacgagtcatatgtattggttcaaaagtaaatagaaagcagatcgagaacgaccatagcgatcgctagctcagatggtgagccggaagaaagaggagaaaggaggatagaccaaccgattcattcattccctcttcacgacaattcggtcttacagcccttcaatcttcgatcacagaaacgatcgcctcgtatattacccagacatactctccatcaatcatgagagcaagtccaagccaacgtgagtgcagggtgttccagtcgaagctgatgatgatgtatgtccgaggacccagtcagagttttgactctgccggccgccgggtttggtaataaccggggaacgtcgaggtcaacttcttctccttcttcttgtccttcaactcgacctggtcagacactcacactcaaatacacacaatcacatacacactcgcacacaaccacgcacatctctcacagcagtactgcctcacataagcaatatgcccatctccacgcccttaacgaaagcactcggtatcagaattcccgtcgtccagtcagtatacacacattgctcttctagtcaccttgatgatccaattacctccaccacttgaacggacgaactcatcatcatctaattcttcttaattctattgtactacaggggtgggatgcaggtgagtgtgtgctgcttgacggagagatcttgatacgcaccgttgttgacctgattcgattaccttatatggaaattcccgttccaaagtgggttggtgtaccgttcgttcatatattcactcccgtcgttcacctacctgttcacggctgatctccttcatcgtcgtaaataatcatatcgatatagagcactggccagcgcagtgtctaacgctggaggtctcgggatgttgactgctcttagtgagcacacctttagaaattactaaaggctcagtttgagtttctgaagtctgacgtgcaacccttgatatcccacaaatcagctcaaccttcgcctgacgcgctccgcaaggccatcaaggagacccaaggcctaacatccaagccatttgtcagtacaacgataccttgagatctaccatactacccttgattgaacgtcagcggcatgttttctggggattgttagggagttaacattacgctgctaccatcgatcaacccacctgattatgaaggctatgcgagggcagccgtcgaagagggagtcaaagtgtttgagacggccgggaacaaccgtacgtgagaatctatcggattcgatgacccacagccaaccaacatgctaatcagtgctacaaacagctggaccactcatcaagttcctgaagtctaagcgtgagtcacgccttttgaatggagtcattcatcgacgcgatgtctcatcctggcttccttgtctacatatatgacataatcatagagtgctacataatacacaaatgtaccacgattcggcatgctaaatctgcccagaaactgggcgttgattgtttgagtatagatggctttgaatgtacgtggtcgtactgccaatttttaaaaatttagatctccggggcttatggtatctcttttacaactcgtgctatcatcaaaaggtgctggccatcctggagagcaagatattggaggtctcgtcctggtatgcttcgctatggccttatacgagctgacgaaaatagcaactgatctacccgattaatcatggttctagctggctcgagccgctcaggacctctcaatcccttacatcgctagtggagggtttgctgatgctgtaagtcacctaattacaccttctttctttcaactgtgttgaatcgaaaaatgtagacctaatgaatattcttctccttcttatccgaatgagtagagaggattcgtcagcgctcttgcgcttggagcagcggtaagtgtctctgtctcgtcgcgaggtttatatgattatagtcagctcaatgacactgataactttcgatcgcaattccgggaactggctgacatagggcatcaacatgggtactcggtatgtcttttcatcaaggtccaccatagtttgtgtcatgtcgcgctcaaacaccattacggtcttcagtttcatgtgcactgtcgagtcaccgatccaccagaacatcaaagagaagatagtcgcttccgacgaaactgacactgtacacagttcgttcatgcttttgaaatataaatcaagatggcgattggcatgtcgatctttgttgtctgaccatgcacgcgccaacgtgaacaatgattctagttttcaggactctcggaaatactgcgagagtcttcaagaacgcagtttccaaagaaggttggttgttcgcctcttcaaaccacagatagatatagaaatggatcttgacgttgacctgcaactttgcgttctgacagttgttaggctcgagcgtcgaccacaaggtgccaagtttgaagaactcagagatctcgtttctggttcgttatcatttcttctttctctctctttggcttttgatcattcataatcgagctctcgtggaaacgttagtgaaacaattggatctactaactgacgcttctttctctcctttcatcgatgacaggtgctagaggacgaagtaagtctttcctaatttccttcaattctcatgatttatcatcgcatttcctcttgagaaacaatcagaacacacatatcaatcaatcctctcttcgtttatgttaacccttcccccccggaataaaaaaagccgtatatgaaactggagattctgatgctggaatctggtccgccggaatttcggttggactcatcaaggacatcccaacttgtcaggctttgctcaataggcttgagaaggaaggggaggagatcatcaaaggtcgactaggaggactttgtgtaggtgatgatacagatcaggtcaaggcaaagctctaggtggtcaaggaatcttttttcttttttctatcatttcgatttacctttcttgtttgttagctgagagagaaagagagacgaaaggcaaagagatcgactggggttgcgagtgttttcaattgtatgtatatcatgcgcaacaaggttgtatcttagaaattccaggtgaatcaagacagagaaagtctagttcgataacaagcacaaagagaattccatctgttatatatctgaacatgcatcaagctagggcctttcaatccagacgtctcgtccaatctccgctcttacccccgctcttcttggtgacacatacgtcctgaatgatcatctcttttccggcgaccgctttgaccacttcaagtaaaacgcgcgaggatgaaacaaggaagatggtaagaatccgagatcgtgtatagctcaaccgtctttctcggatcgtctaaacatgcgacatggtcagactcactatcccagatggttaaaagtgtgaccgagacggaagtcagcgcttccatctgatggaaccggcaggaacagagtacccccgagagaatagagtagatgaaaacaacgacaataagcaataggatagagagagaaatatttgtacagaagactcacctcgacccccgttccacctacacattccgccacgctatccactctgacccaacctccgttatttgtccctgtcttttgaatcaattcaaacttcacgtccaccgagctcagattgatctgatgacagagcggaatgagatctgacgttcgtttggcacccatgatacctgctagttgagcgacgatgaggggatctcctttcttgtttagagaggaagacggttgggagttggaaagcagagaaaacgctgcttcgggctagattcacaaaagagccaatgttgagacagaacccaagtgggataaaagaggagaaggatacatgaaggtgaagaaaaagaggctgacaaggtagatctttccggaagcagtggccgatcgcagagtcgctacctttggcgtgatagaaaccatgcgaggcttgcctgtctctggatcgatatgcgttaacgtcgaagctgtcgaggtatatttggacgatccctctcgaggtggtttgcggctcgtcaaaggcgaacgttgtgaggcagatggtattggggaggtactggaaaaagaggaggagtaagcgcgcaagaggcgcggggctgatggcagattcagattgggaagaacaaagagagagagatgggtagttttgaagggggttctgttcagattggacagcaagtaggaaggggtgtacgttgcggttgtcccggctcgcaaagatcggtttgaatgactatctgtacgatataccaaatgatccgataccacgtcaagccaaaatctcatgatgttcagaagacaaatcaaagacgaaagtgaggctgatagagagaatcgttgaagactgaccctccgatcaagatcatcggtctgttcattccatccttcagctgtttcatccctgcatgcttctccttcttccttccaacggccatcgcgattgtctcgaccaactctgcgtccgatgcattcgaccggagcttatcccttaacgagacttctgtttgcccaaacagacagacctgatggatcggccaaaatttgagtcaatgagatcattaatcaattgaagcatttcatctaaccattcagagacaagtagaagattcgtactttgaggtttccatcggcagtgattcgaagtcggttgcacgttccacagaaatgttctgtctgttgtaaccggaaatatgccaaagaaaacaaggctgtaagcctgtgggtttccgttttgaatcgctaagcggaatatgctattttgtttaagactaaccatactggtgataaaaccaaaagagccttggaagccagggactttccatcccttacttgtatcattggcgtcgtcttgtttcttgataagttttttgtattttgatcgtatgaccgaaagcatatcttgataagagtaaagctttccataggaccatctattacctttgagatatgcgcgcggaggtgtacatcagtttctcgtttcggtcaaacataagctctgaggttgacttatagacgtaccactgaaaggcatatattcgataaacctgatttcaacctttctgttcttagtgatctctatgaaatcgagaatctcatcttcgttgaatcctttcatgatgacaacgttcagtttgactgtgagccctttatccgccaacccaagcgcagtttccaacgaagccatgacgagatggtgacccggtcggcgagtaatgaattcaaacttggcagggtgaagtgtatctagagagatgtttaggtgagttagaccggaggagaccagcgttggaagtttccggtgcaaggcaatcccattcgaagtgatgcctatctgggttagaccaatatcttgaagctggttcaagctagctggatatggtttcaccacaagtcatgaaaagtattagaatgagacgcattgtgttgctatttcaagtgacctagacaaaccgatgagcttagtgattcccttccgaacggtaggttctccgccagtcaacctgatcttcgtcaccccttgttcgacaaatagcctggccaatttgagaatctcgtcatctgccaacatgttgaccgatggctgtaagggcacaccttcctccggcatgcagtacgtgcctatgagagttcatgggaacagtcagagcgaacattaaggagagaagacggaaaaggacacgagtcagaacatggccattgaacgagtcaaacatagtgaggtggatgatcagcctacaccggagattgcatttctcagtgagagagattcgaaggtaggtatgatgccgattgaagccgtccgtcaatggagagacatatggatgagcttcatcaatggccttgactttagactgttgttcagttggacgaatcgatgatcatcagtgttcgccagaaattcgagtcagcgtatacgatcaaggagacaagcaaagcaacaagagatctgtcgatgtcgatagaaagcgatgaagcaggtgggtatgttaatcaccttgacggcctttttgagcgcctctgaatttctactgcctctgatgccatcttcttcgtgagaagcagcagctagcccatggttgaaggcagcaggactcgtggaaagaagtctctggtttgtaggatttgccaggccgaagagatgatttgacaagactctggagcatctcgggctggaaaacgccaggaagaaggacatgcactgggataatctgaggccttcctatcctacgagataggacacgggtagacgatgaacggaaggtagcgaccggagagaagagtaggccagcgaacgatggtgatgatgacgatgatggttgtgtatgattaataaagtggaggaagcacgagcgaaagacatcaacgacggtcaaccgataacaacgatcactcaccatccacaccatccacaccatcatctctctttctcagagggccttgctcaagtccatgctgaacgctcttggccgtaccatacgtcgatatccccctgcctgtcggtaatggctcctgtcgtttgctccgtttgccgttcgtcggctagcatgatctgtgcggaatgtgtacttcgtcggtgagtctcttgtgcacaccatcctatcgcgatgtctccatcgtttacctctatgagaggctcattgtatatcttgaacaaacatatagccttctccaacaccgtgtagcagagactgcgttgaaagcttctttgaaaagacatatcgaacgcacaacagccgacacacttgatggcccaggtgggttgcatcaagtaagagacctcgagggcaaactggctgagaagcgacgaagtttgaacataatcaaaaagtacactgagctcgctcgaagaagaaaccaagctcgtaggtctgattgtgttctactcttgtctgaggatgaaatattgtcgttcgataacgagctgatcatgatgtgcacaacggggtatcgtcatcattagtcaaactacagatcgttaacttggactctcatctgatcctcagacgatcatacctcctccaggctcctcatccagcttctctttctgttcctacaccatggcatgcgcttgcccttctccaaaccagacaaatcctcttgagagaggtcatgttcgcgtttgatgttcacctaggaggcagagacgaggaggacgactctgaggacgaagaggggttgggtctaggcgccagagccgtcggagcaggttccaacggacagagtcaaggaagcaaggggcaagaagatagcgtggcgggggtggtgttgcctcttcctggagacatgcaacgtcagtttttacctctgtgtcttggtctgagatgtaaagtcgtgaaatagagaggagaatcttatcatcctgacgagtatgcttttgtttacgatcgaacgacagtctatcctccattagaaaccacggctgcactgcaacagacactacacctactccttcttttttcgtcctatctggcgttgcctaccgggcttccctttactcccgtcctctctcctccgtctctattgccgtccccgcattttccctcgcttggattaaacccgacggcgcttcccttgacatatcctcaaaagtcatccaagactatcaccctgtctctcgctgcggtgcagtacgatgtctgttatctagctgcgcacgttgggattcagattccgcttcacgaaagttcgtatgtgctgagaaatctctggcgaatcatcgaggaagggaacccgcctggttcaagcgggacggctactgctggcgcagggatcagctttgacggaaaaatcatcgagccagtcaagttagaacgaatccaattaagtctgaagggcgtggtaggaagttccagcaagagcggagttgatagacagcttgatcgagaggtgcgaagaaaggagaaagaacggttgaagagggaagaaactccggaagagagagaagaccggagacggaaacgaaggattcgcagagaggaaagagatagaggtaaagacagagataaggacaaggaggacgaatgggaagttctcgatactggagacacgaaagagccagcccaaccaggcaacccggtcgagggcgctcataagggagacggctgagagtaagcctggacgcgaggatccgggctggcagatttgtaaagaagattgacaatgtagatgttaatttaagacggcaacggtgtcttataagtcctgaagccgacgatggtgatacagaaagttctgccggtgttcctcagacacacatctatcagaccaacaaccatcatccgtaccatgtcgaccgtacctgccaatccactactagatagctcagtcattcccactatcgacactcgggttcagctccggggaagagatggcgacgtggccgttccagtcatggccactggaacctgggcttggggagactctcagatctgggattacaaggaggaaggttcgtgctttccatccatatccttgtctttatacgttctccgatcgaagacggatgcaaccagcggatcatagaggcgagcaccagaacagtcgtgtccatactgacatctcggctggtacggatggttagatttcgagaacatcaagcttgctttcttggaggcccttgagcaacagggtggtttcttcgatacagccgaggtaagatgtcgtttacctgatcgtgtgacgtttgagtgttctttgtctcgctcgctcgatgagactgatgttgcgtttggaacgtcctcatgttcgtacacatctcaggtctatgcgaaaggagagtccgagagaatcatcggacggatcatcaagtctctgacacctgagcaacgagccaagatccatattgctaccaaggtctgtctgttttcctccagatcgaccggtagcttatgaaagatgtttatcgaacgcgtttgttcatcttggttcgatcttgggtacacatgtatatggtgtagtggcttcctattcccagtccctcaaaccctttcttcttcactcctggacttgtctctgggttgaagaaaagtttggccaggttgggtttggactcagtcgatctctaccaggtaagttcccagtgtgtctctctcaagttcccttctttccttcatgctatgtgggcaggatcgacaactgaaggagctgaatcggcggcttgacttcttcgcaacatagatccatggtcccatcggtttccactcgtgggaggcccaaggtagggagctggccgaatgtgttaaacaaggacttacaaaggtattttcttcaaagatctctcgtttccttcttcagtacatgcatcaagcgcgaaatctcaaatgttctccttgacccgggcaccttagacggtgggcgtgtccaacttcagtaaagagcagctcatcaagatctcagacgtgcttgagtcccatggcgtgccccttgcgtcaaaccagatcgagctcaacttgatcaggcagtaccctcttcgaagtggattgatcgaggagatgaacaagagaggtgtcgtctgcttggcttgtgagtgacctgatcgttgctttctgttttgcccagaagcttacttgggcctttcgctgattctgggttattcaactcgatgaattcttccagactctcctctggctcaaggtcgattgactggaaagtactctgcggcgaacccacctacatcaggtcgaaggtccggtttgttctttttactttgtcttttttttcctctactctcagctgacatacatcctctcctcaacattccccaggttctccaacatccccatgaaccttgttgatccgctggtagagggtatgcgcgagattgccgagaagagaaacgtctcaatcggagcgatcgctctcaactgggtgttgtccaaaggtgccttttttctttctctgagttcctccctctggtgtatgtgccaacctgcatcggctctgactctgggtggcttgactcaacaggggctattcctcttggaggagccaagaacgcatcccaagccaagcaaaacgctcaaggcaagttcaacgactatctcttctctcttaaacaacttgcgtctaacaggcacatcttcggttttggttaacaaatggattaatgaatgaataaacaatcgatcgatcgaatcacttaacgcagcccttggcttccgattgacggaagaagagatcacacgactggagacgctaggtctcgagggtaccaagacgttcgtccttcttttcgtgttcattcgttccaggtaactatcattacgaaagctgatcaaagatccttttctctcttcttcttgaaaccgtctcgattggtttgacaggacttggtggcagaagggttaatctttgagatcatcctgggtacttctttctctatgattttcatcttgacctaacttgccaacgtttgcgttgtgattgctcttctgcttttctgctcccatcgtttcgagagatgtgttatatatgccgaccgcactatgaatgattaacttattcgaactctctgagaaagatcgcatgacacaatcaagtgtttttctttttcctgattatttatttgattcttcttactatctactccaaaaaagccagatcgtctgaagactctactggtccaatacgccttcaaagttgagccttcctagtattcaagactttttccgagatccacttttcgagctcctcattaaaccgagctggctgagcaagttgaatcctgagacgacaaaaggaaaatcattagtcggtattagcgcatgaaggaagataaacaagtacgaaatatacgtcgagagacaaaaccggtgaccgtttgaaaaaacaaaaagagacgaaccagtgatcggtatcgaaatcaacgatcgtagcatccaccgcgttgtttttgaatgattccttgccaatctcaggaatacagacataatcctgtagggcagctgcgaaaaaacttggtttcgatagctttgttcgatcccgcacggctgttagaacgatcggattgacaaaagagcgcgaaagagtcgactttagccttttgattatagccattcgacataatagaatcacaaacctgcgttgtcatcgttctccagtccctgagcaacgatccggtagtagttcaatgaggcatacatcccaccttcgactaactcggctactttggcatcaaagctctaacgaagaaaccggaaaccaaaaagtttatccattactcgtgtcagtattgactgagcgcatagaaacccaacatagctgggtttaggaggatgagaagggtcaagagcgagtgcaaaagaaatacggacggcttgcgacatgtaagaaggcaaagcgcactgtttcttctcttgaagccatcgatccatcccaccaaccggtgcaacgtactctctccacaaggtaggatcgtctgggaacagaagatgagcaaatccttcaacctgtcgaataaatagagtgttcgaagaattccaaaaaatgttagcttctatcgatcgaaatcacaaaccaagagtaaagcaggacaacaaggcaacatacgttctcgaggagagtcttctcgactccatcgatactgagaaacttccagtacccaaagagttcactaccgaccgtcttcttaaggtgccccaacatgatatccagaggaggaacaggccgaggagggttgaatggaacggcagtgaaggcaaagccgagaaacctatcttcatgataagttaccaatctcgaagcagtggccgatcccctataggattatagtatcgcaatggcaaggtcaatatgttcaggccgttatcatatgattgtctccttcactgtcgaagcgcaggaaaacataacacataaggaaatcagaaaactgaccagtcatgcccaatgacaatagcatccccaaccttttcgctttccaagacttccatcagatcatcagccagagacttgtggatgtaaaggctaggatcatcaggcttatccgtctggccgtagccaagcatgtcgggacagacgattccatagcctttagaggcaaagaacgatgtctgagcgtcccagtctcgatgggtcgaaggaaaaccgtgaatgaaaagaagggtgggaagccatgggtttgagggtgaagtgtacagataggagtatgtaagagatcgtgaggtcttgaatgtcttagcctgcatagcaggatgtacgtgggtacagatgtatacaagagagagatgaagctgatgggttagaacggagagatgagatggaaggagaagatgatatacgttcgatgtggttagtcaccctccatcaactttcataactggagtccttgctagcgttagacacagcgccaagtgtcgtctaggatgtacagaagacaaccgaatgcgttcggatgaaaggctactaaaatcgggtgaaaggcatgtctacgcatgttaatgatttatgtatgaaatcttgttatacatctatttctcaactcgctcaatccatcgcccatgcctctccactaaactctcaacgataaccttctcgatctcttcagttgactcccttccaccttccagcctgatccaagtttcatcgtaagttctctcagatccttcattcgatatgttcgtggttgccgatgaacaggacgaagaagaaggcgtggaagagctggaggcaggctcgacaaagacgacttcaaactttcgacggtgaagatcgttgccgatgaccatctggtggttatatcgatcgagggcacctcgcgctttaggaagaagtaaagattcatccgtttccaactggaaaacggaagatagtagaatgctagcgtcagaatggtagtccaaacctttggatacttcggaaaacacacgggaaagcctaccttgaaagagacaacataaccctctttagtccactcgcttaccagcggcttgaggatttttggtacttgatccatgaccaacgttagccggccatccgaaccagctactggacccgattggattttatgctccgcctatggttttctcgtccgcacaccacgtttgaagaggaaaaggcaatacatcagcccctttcaaaaactttatgtctcgatctataggacacagataaaccgaccattttttcttcaggcagatagaaatcagagaccgcggctgccagatagaacaacccatgtctaccaaccccgtgttcacttcccatgacctgactgatacctctcaacaaccacaagtactcattcactgtgacgaatggaattgttagtagcgtgccttcctcttggacttgatgatgcttagccaagataggcagcagtcttgagatctctggaggatggacttctatctttgatgaggatgatgtttctgctgaagttgatgatgagggagagacatccggcttgatggttaggagatcgagaaagggccgagtagaatgagagtaatgtctagagaatggcagaagggaatgctgtcggtggagaaagatcacagagtatgatggatgggagaggaaatattcggctgaggtcgctcctcttgttcctgttcaaccattgagccatcttcctctccgagtaagtaaatgcaaagggccaccttcgaacggatacccaattggctttggcatacgtaccagctgagaagttatccaagaaccggaccctgtggttgagatgagaaatcaccggaagtttagatctttcccctctaacatctaagcaacacttagaacgggagcagtgaaaagaaaaaggagaggtgggacactgtacatgttcttctccaaagggacactagttcctccgctctacatacgtattccagaaagaaagaccatgggtttgaagattaacatctgcatctttatatccccttctgctctgtggtcttcacccagtgaaaccaggatcaaattcaagcagggagaccgacaggagagagtcagacgtacggtaaccaaaacgacccgtcttccaagtcccttcattctcgaaatgaactcttgtgctttcgcttgatcatgctccaactgaggcggtggtgcctgggtagtaaaatatgatgtcgttgagattgacatgcttccgctccttcttgatgattttccctcgaacaaggatcctatgtttcctagagatgctctacgttggagttctagatagtttaggttgaggatttgggacaatgtggccgagatggatccttcttttctctctcttcttttcggagtagtgcgataggctcaagcaaattcgtccccatcgggtcttcctattcttctcaaccccccatgatttcaactcattatagccaggctagccttccggcgtgtaccgacatcaggttttttctttctttttacccttgatcttcctatcccttgattatatctttaatcttctacaagccaaggaaaaaaaagagaaaacgtcgtctctctttgagggatgagagaatcgttatgcatagatcc

SEQ ID NO: 1458 - DNA, 2771 bp, Xanthophyllomyces dendrorhous
gcatagatcctgacagaacgatagagtttgagaaagagagagttctatgtgccatagaaggaaagatggatggagaatataaccacaaaagaacaggatagaaatttatcaaatgaatgagaaggattgagtggaagaagaagatgtgatacaaaatcaagatgggcggtgaaggatgtgatgcgttaagcagtcttcgcaggtccggaagtagacgttttaggggtaagtttgattcccttcgtctttttaaggtgctttcgagtcgagtctgtttgaaggggaacaacaatggaagaaagcaagcggtaagcaaggtgagatggtcatccctaaaactaacaaagccagaggtagaaaggcacgtacgttcgataatcttcttgtcctcttcatcgtcgaacttgacgctctctccctccttcttgaccttctccgcctcttccaacgccttctcctcctcttcaacagagattggcagcggaacgaacggctcatccacctcatcggctggttcagcctcggactcctgggcgagtcgagccttcttggacagtcgggaaactttgaactttgcgacgtagaaaccgtcaactgagagaaaaagtgtgtatggtaaagatgatcagcaatcagacacaaacacagaaaacatgatgaaaagatgaaggttgaaacctaccattgtggacgtgaggccagtatcgtctagtaagcttcattctgtctccaaacactctgcccttgtagtttgcgaaaccttctcttccaaactccagaccagtatcaaccaacttgacgttcggtcgcttcctcaacgcgtactccaccaccgactcgttctcgtccacagtgacggaacaagttgaatacacaaggtaaccaccagtgggcgagtctgggttgatggaatcgatagcacaaagaatgagttgcttttgaaggtgggaaaggaggtggaaatctcgctcggactttaaggtagatagagagggacatgaagataagtatggacagacaacgataacgagccttgtcgaacatgatacgtatagcacacaagatactcaccttgttgactttgacactggcatccttggcgatgacacccgttccactgcaaggcgcgtcgagaaggactctgtcgaaaccacccatcaccttagggaactctcttccatcgtagttgcagaccaccacgttcttgcaacccagtcggtggatgtttgccgtgagactctttgttcgggccttgtttgagtcgttcgcaaacacaagtccggtgttctgaaggagagcagagatgtacgtcgtctttccaccaggggcagaggccatgtcgagcactcgctcgttcggttgaggcgcaagggccatgaccgggaggaaagaagaagcggcttgaagcatgtaatgacctccgaggtactctggggtagcaccgatcgggacggcactttcgaacacctgcaatccaaccttggtccactttcctatcggctcgaggttgactccacgactgatcaacgcttgagcaagatcccgtcgcctcgttcggagtgtgttggttcggatcgtcactggtctcggcgtctcgttggcgtcaaagaaagcgatggcctaaagcaataagaaaggcatcagaagatgaaagctagtgagcgagacgaggtaagaaaagagatgatcagatgagtatgaaacaaacctcagacaaggggaaaagctgaagaagcttctcagcaaggaactcgttatagccatagtaggttgcgatatcggtaatcaattgctcccagtactctgacctggacctggttagatgatcgtagccatttacaagagagaggaaggagaatttagcgccatggcctaagtaggaaaaattccaaggaagaagaaccacatactttccgtctttccccccaaacttgctccagtcactcaaaatccgaatcaactcgcccaatcgtcgctcaacctttcggagtccaccttcgccaacacctttcgtcttctcggtctccctctcttccacactgggtagctcgaacttctcctctccatcgaacgaatcatcgtcctcgacgtcctcgccatcgattggctcaccatcctcgccaaggatatttgtctgaatctcgtctccgtccgagtcgacctgaggaactttggaagactttgctgctggctcctcatcttcggatgtctctgctcccgaagtatcctcttctccagacaagaactcgccgtcttcgtcggagtcggatgggaagtctccttcatcgagattgaattggttatcagctcctggtggaagttgaccagcctcatcatcagagaaatcatcagattcggcttccgagtcactaaattgcaactcccgaggagcgggtcggggcatgccttcgtcatcgttgctgtgaatatgcattaggtttgacagaccgggacacgcttagcgagagcaggcctttgaacaaagaaaaagacgattacgagaaagataggaaaaaacctaccctccagccagctggaactcctctccgatctcttcatcatcgctgaatccatcaagcatagttctacatgaaccgaagaagaaagtcaaagtagaggaacgatcagaggattgggaggtgagctcaagaagggatgcagagctaaactctcaggagcatctataggaaacatgatactcacgcctcatcttccatatcatctgcctcagacttcttcttccccttagtcttctttgccgagccagacac

SEQ ID NO: 1459 - DNA, 18347 bp, Xanthophyllomyces dendrorhous
cactggactctaccggctttttggggttcttgatcttacgacctttggcatccaatctaaccttctttccacctgatcgagggacgtagccgtccgcctttcgcttggatccttgaggtccagacgaagctgcaggagtctcgagcgtttgggggggtccctgtttgttcttcgctaatcttcccatggtaagcgtgtctctgtgggtttggaggggaagaggggaggagttgcaaggaaagactgaggacgagggaagcgaaaagtagagtattcaggcgggaatttttggattggcagtcacgtgttgattacacagcaattgagaatgtaagtgcacgtgactttcaatcacgtgctgttgagatcaatactaaattgtcggctctagctctaatcaaaaagagataagtttatcctgagaaggccgaaacagaaggagcccgagaaaatatggagattggggaaaggggcaacgggccgcactgcacgtgggtgtagagtagaataatataagatgaaggcaagctggtagtgagagaaagacagacaactggagacagtgagttggttgattgtatggctcttgatgcatacagtcagactccacaggccataggatcatccggcgaaaagggaagaccggggtaagatggatcaagatatacaattgcaattaagagagggcaaagaacgggaagcgggaaggcggagaataaacatcaagaatacattgcacaacccacaaagcttgataaatcttccagatgggaaaaaccttttcgccaagccggaccgaccaacggagtcttgctcgtttagattgtatgagatgtgtatgatgagattatgattgatgtctcctgtactagtcaatttgggttatgagaaagtctatctcatttgatggacacccaccgtcagggcgatactgcgccagagtgagctgaacggacaacaattagcattgcccgatcattacttctatgacgagcttgattctaagaccaaacaagctggcgaaaagaaacccaacctgaatactttatttcttttccaccaccttctttcttctttctccaagtctctttcttcgcttcttttaaattttctcaggcttctcttggtaaaacagtcgcagaccctttcgtttcttggactgagtcctctcagttgaaaacactggctatttgatgggacaacattatggaacctacagacagtcatgacacccgcagcgcaaactatcattttcaatcatctataccctacagcgttccatccaatccttctaccagcatggccgaccgggaggaggctattcgatcagctccctgggatccaccggatccatacaccagtgattcttcggccaacaactcgatagccgttcagccgacagcacctctttatccggcctttctaccctcatcggtagccgcggcaggccgttttcctgaatcattcagatctgtcccatatgccggctcggctaacgaattcgatccatccaagatatacacatactccattccattcatcggtcatcctggacagcaacctcccactggtggctatcatcatatggaaaacgagttgagccgaccggacgaacccgatgagccctctccacttcaaatagcacccgtccaggacaccaaagtttcggccaatttccttgaagttatccagccgtcaggtcttgaacaaactgatcttggcttcgagagcaattttctagcagagcccacactccaagtaccgtcatatccagagaagtccactgactcggtagatagtactcattaccgccatcgcgaggcgtacgtcccatcccatggtcgatcccacactcatttgacctcgagctgtcatgatacacatcatgaatctcaagccaatccttcaacccaagtaagggtcgagggagatattggttgtcattacatacatcaacccagcacaagctcattcttacctttcacatctactgttagcaattcgttatacgccaatattcccacccctcaccacacagagtactctcttgcccctcatccccagactcacccagttccttcatacccaacctcttaccatccaaatcaaccagctggcatctcaatcaattatccgaccatcgtcgagacagaggctgggatgccactcggcccgagaccggaagtgatagagcacggagagaatacaagcgaaggatgggagctcaactcatcctttcagccgccagcctcttctttgaccgttggaagacatgagttctacaccggatcgacattacttccctctgattcatctggctcaatatatccaacaattcatcagaatccttcatcagccattcacctttctccaggccaacaatactatcagttccttcaaccatcactacagcagcaacatcaaattcctatgcacaaagcaacgccagttctacacaatgctcttccctcgccgtcaacgtcttcatcatccaaaccaagccagtcgttcgtctatccagatcaggaacacaattcgattcccaatgctagttcggcatattccttcttagaatctcggtctaggtcgatctctcattcgaacccgtcttcttccccgccctctcacaacaccccttcatcaaccctacaatttccaatcttggctccagccggtcaaccagtttcatatcttgctgattctgaaccctcctcagctcagtccttgacattcgccgaccagccgattgatcctataaaatcgaccacgctccccttagagttcctgaagggcaaccctaagcagggcgctaccagcaagaaaaagaaacgaacggtccatccaaatccaccgcttgcgtcatgttccatctgtcagaaatcattgatgagactattgatgcgtggaacgacggaagattgggagactgactggtttggatggtgggtctgtagagaatgttccgagagtcaaatggatgatacatcccagattgaagtttactcaggtgcgactaggtctggaatggtatctcaagactcgttcaattcagtcttaggtccggagaaggcaaaacgtagagaccgaccaattggatcagtctttggtcaaatcataagcggtagtttgtcaaatggaacgagagcaggcggagttggaagacggaaacgaacaagggaaacgatgaataccgaggctcctttggtttgtgatgtttgcttcaggttcaaaggacagggcggaattgttcctaaagacggaaggagtgaactaaagttcagcgttgaggtttgttctcgctctctctctcactctgttttctttccctttctctccttgatggaggttttactcctcaaaatcaagaaaaaaagcgcaactgactcgcagacgaacgctttctgaaatgccatattgaaagtttgtatgtataagctgcgaggaaaaatacaggcgttgtacagactgtggatctggtggaggagcaaggattgggttagttcatagccatcctctctcctctcaaatctgttttacaccagactatttttgttgacaaagtgacttgatgcttcgttctaatatctctctgatgcgctgatgaaatccgctgtcgttgatgtttcaagaattggaaagtggttagtcccttcttgatcggctcgtccttttcctcctattccagtctcacgttcaatttatccttctatcgacaggcgttcgaaggaacttttcattaataacagaaagacatgttcgctctctcatgtacgaattggatcggcccctatgaaagtaggaacatgggatgtaaaagactttgaaaatgatcatgtttgggttgagttgcttgatttgtgcgtctttctgcgttcttgttttcttcttatcgacaaccttcgtctttgatactgaacggcttatctgtgctttttgctccgttttcgaaatctgcatttttttccagatgtgaagcgttatggaaagatagactattgtcaaggatggccgttccagatgtacttgaagcgaacctgggagatctaaacgatcgacctgtcagtttaccctctgtctcttctgttttttctcttgatacatcctatttaccctccatccttcacgccttttctcttttggcactcgcgcatcatttatatatcgcctaatcaacgcagaggacattcgcagatgttcaagccaccctcgacgctggttggccaagccgtcaacctttaattgatgcccgtcaaaagatgatgtcacctcagctttcttccgagctctcacgcacagtcaattacggtgacaatcggatagatacaagaagtgggcagaggtttaggaagtatctcggtctgacgtggtgtaaatgtaaaccgagaagatccggtctggtctcaacgtttaccaatggtggtcatggtgatagtgggcttggtgggagctcaggttcaggagatgaggctttggagattgttaaggaagggaaacaatccggagaagaatcaggggaaggtctgttgtctttccttttttgatccactccggtagatcacaagctagatcacagtcattttggggttcaaaaatatacatgataggtctcattggacacgagagcataaataatatcatcccaccgggctatgaactcgtagggctctatatcggtgattggaacgtagatggtcagtttttccatcatctttcccccctttcttgatcgatcgtgtttcgatgttgactggatatcccgcttctcttgccatcttccatccttcatatctctgttgccccatatcagacgggacgctgcttataaccacgtctcttcctttcgaagggagtgataggtcagtggttctattctggtttcggttatgatgcgggtgatgatcattgattgttttgtgattctcttcaagtagcgaggatcgaacctgtaagacactttgagtaatctctcccatagagcgatgagaaaaggagaagccctgactttcttgacggtcggttatctagctctgacagttggggaaatgatattacgcagtaagcgcctttcgccccgttcagtcttatctcgtcgtttaagaattttccttctcataacaagttgtgtcgattttcttgtctagtcgtgactgaaatcgaagagaccaacgctgcactgacggcccacggtcaaacccaaggagaggaacaagtcgggagaaaggcgccatcattagaacatatatggtgcatttcggatgggatgacctcccagattagggataagatgcatggtttgtctgaacataatatgtctaattcctttttggattctctgtagtcaacctctatctttcttttctgataactcttctaatggtattccatagaatctctaaccagaaaaagacagtttcttcccctggatgaatacctagctctgcaccgaacagtccgaccagagatcttccatgagctcccgtattcccttcctggaccttgggtcgatggcgtaggcataccaggtacgatcatggtccgatggttggggccacattttgaccgggaacaacttgaagaagtgagcgtcagttttgttttgtttttctcttccttttgtcgttctctccgatgtttgtttgtatcgtcagtattctgacattgagaaattgtgcgctacccgggaatttgatacatctcagtcgataggaaagaacgatatcgggaaaaagtcgatcaaagctagggtcatcaaggggtgacgggaagacggtgcagcgtgtatttttaccataaaataatcctctcatcaatacttatggcataaggtttaactgttcgagtgtttctttcatgtctctcgtacttctcttgcaacgcaagcgagcttgtccggacagtctatctgtgcgagttcaacctattcctttcgcccactcaagagaagagatagaagaaaggcacagaatttctcaagaggtgtaaccactggttacaccagctgtcttgcgaaagagaggcagctagtcagtcaagccagacggacccacatcgacagcgagcatacacatccagagtccacgctacatacttctacagacatttgtcggtctgatctgtcgatagccacgctctctatccataaagaccatatattgactgttcggcgtgactcaaaaagtcaaacagaaaggtgaggcagagacaggtcatacgcgtttttcctttgtccgtggagtgaacgggaacacattctgtgcaaccgttgtttcgattgcttttcgcctttcctcttcctcctgttcggtccaggtgtcttattaagcttggatcttgcactgtggacagattggactcgtagtgtcttgcaggattcatccggggaaacatctctggtcgatcatctggattggacggccttctttcgtcatctgtacgttgggcaaacacgcgtctttccggaaggctcttaatctcgaactcatccgttctctttccttggtttcttttgatcacctttggaatcgtctctctttgggtttctctcttttcttatcttgtgttcaccagagcttttctgtgtggatagatcctcactttcttcgaaaatcaatctcttggttcccttgaacgtctctttctctctgagcagtatcaggaccatcatgcctcgagctcaaactagtgggtctaccaccacagctacccttcctcagactcggtaaggcatttctatgtttattgcctttttgaatctatgcttcaaaagcttcgtgcagtcgagaaacaaggtcgatctgacaatcaatcattttgaatgacttggacgcgtcttagatcccgtcgtcaaatccctccatcgtcttcaaacttgtcatcagcaaccaacttagctccatcgtcatctcgaaaccagcttttacctcctcatccagactcagatccgaacgtgccgtcctccagaacaatcagaccgttagctggggttcttcccactggcggctcatcttcttcttcctctctgaccacacctgtgtccttcaaggttgaagcccataaacttccatccggacagatcgctgatgtgatcgtgttggatgactcgccctcacctgctcctccaccactgccgtcgtcttcctctacttcgtcatctgtgagtaaacggctcaaaccgatgtcatcgtcagcaactacaggcagtggaggcgggagcgtaggtggagctggatatgcagtcggcgatacgaattcaagttcaaagttcggtcatagctcaagtaaagctcagggaagctattctggtgaagtttatgcaacaaacggaggaacgggaaggaagagaaaagccgatgagggtttgccagtgggcattggatccggaaaagttagtaagatcacgaatgggtacacggatcataaagtgagtagtagaggtgccagccatctttcctttttgccggtgttttctcgagtccgactcttggtcgacccggactcaacgcgatttgtcatgctttgattcattcgcacttcttacaatcaagtcgacacatgcgtctacttcaagttcatcatcgagtcatcgacaacatacccagccactcctaccaccttgtgacgacgccgaaggtcactatatcgttcatattcacgccgtcatcgccgatcgttgtgcgtctactctttccattctttgtcatctgttccatacccttaggaagagtacgagtttgtcttaatcgccgtgttcatatcacgtggtaccattcagatcggatagagaaaaaactgggagagggaactttcggtaaagtggttcaagcgtgtgacattcggcggccagagaggaaatatgcaatcaagatcattcgagccgtgcagaaatatagggatgcgtccaagatcgaaattcgagtcttaaacgagctcaaaaatggagaccgtaccaacgagcagtaagtctcttctttttttcgtttctttatacctactttcatacagtccaaccaaatttgtgttggatcggtgcgtcgtccagagctaatgactgtgctcatgttctaccgatcgatagcaaatgcattcatctactcgaatcttttgactttcgaaatcatgtctgccttgtgttcgagcttcttggatcatcggtgtttgattttctcaaagaaaactcgttccaacctttcccaatgagacatatccaggattttgctcggcagttgcttgctagcgtgtcttgtacgcttttttctcttttctttgtctgcggacttgatctatggtgccagctgcaagaatcgatcctgaatccttcgctttctgtatcatagatctccacgcactgggcttggtgcatactgatttgaagccggagaatatcttactggcagattcaagttcgagaatgatcacatccaacaaggtccgtgccagcttgtcttctctctttcgaatttgttcctcactcggctttatcgttaacaatgataatgctattcgttatgtcggtcgcttctatgaattcagggcacaagaaggctgttactcaataacacggatattcgactcatagattttggctcggctacgtttgagagggaataccattccaacgtggtttcgacgagacattatcgagcaccggagatcatcttgggtttgtatcagtctctttccctcctatcacagcaaagaagaatttggctgactgcgtttttcttcatgccgaaaaaatataaaggcttgggatggtcttatccgtgcgatatgttctccatcggttgtatcctcgtcgaattttgtacaggagaggctctgtttcagacgcatggtaacttggaacatctagctatgatggagatcgtgatcggaaaaatgtcgccggactttcttaaaaaggcgatgtgcgtgatccttttttttactttggtgtacgcatgtgatcctttcctaatcaagtcagatgaactggttgatggcgttgaaccctgtttgggaaacaattcaatagacgatcaaaaccggaattttttgtgaagaatcggttagattatccaaattcttcgacagatcaatcatcaaaaaccttcatcaaaggcatgaaatcaatcgaggttcgtccaacatgactctcaactcttgccttttctttcttttcccccttcattcctatagaggctgatttcctctcatttgttcatctgggatggaaacaaacgtaaacagaggattatcgatagcagggcttcgccgagaatagcgaaaccgttctgcgatctgatcaaacggcttttacatttcgacccgaaacaacgtctggacgttcgctcggctctccatcatccattcttcagtttacaattgtcagtagtttctctcatcccttcgacatcttggttctagtgagagattgttaatctctcttcttcattttggaattgatttgatttcatcaggcctttggaatgagggaggtcgagactgaatgtcgttgttctgattccagtttttggtttccatcatgccctttttcatttccctcctccttgcaatgtatcgatcaccttcaacccttttccctctcgtttttctttgttcgcctcatcaagtccgaggttttgttccctagatattctcttcctcagtgttttcttttggtctttttcatgccttactcttcttgaatactttctttcagcgctgtttcttctctttgtgcatgtcatagtcttctcatcacttttcctgttcttcaattctccctttaccgtcctcttcattcttctttgttctattcaatttttattctgttcttgtgattctcctttattcgatcatctttccttgtctccgtttgtcttcgatggattttttttttccaatttagtcgcagggtcagataagggtctaagaggataaaatagaattttgaggaaaagtaaaggacaagagatagagtcaagaagaaagacacggaaggggacggaaagaaagcagataaggcaaatcctccatcgcgtccgtctggcttttacttgagcgacatcacaaagctctgttcgattcgaaggtgtgatgcgtttgagccatgtcaagttccatggagaggaatagaaggacgtataggatgacgagaatgagtgcgtgacatctctgatgaactcaagatctagtacgaaagtggaagggaaggtggatgaacgaacctgctccagcttctcggcggcggccttgaaatcctcaacttctctccagcagtccagaggagtcgttgggtttttgctatcgtttccaaaagtgcaaaaagcaaaagttcaggacgagaaacaacagatatctcgacggcaagtaactctggccaagggtgtcgcgaacgagaacaaagcttacaggtagcactgcttgatgttctccttagtctggttaatctctggccaatcgctcaagcttctcttcttctcgaatctctcaaccttctctctgatctcttcgatatcccgtcggagaatctcggaagacgttccggacccggaggcggatttttcggtcgatagattcgaagcctggagttcggcgtgcagttgggcgttcaaactggcttcctgagctttgagggattgaagggaagactcaagtttctgacggatgtgctcgctagtgccaaaaggaaagcaaggatcagactaagaacaaaagaaagagaggcagatagaaagaaaaaagcttatagaaggctcactcgatggatgattgccgggcttgagaaggagatgctgccgtcgagggatcagacaattgagcaatcagctctggggaaaactggacggtaccagcctgggaagccggataaaagaccttttccgagaccggagaggctggtgaagattgctgggcacccattgtgagagagaaacagagaagaaagaagagaaagggaaggaagagagagaagggaaggaggttgagcgccgttgtcgtcgtcgtcgttaagaggaaacccccaagctgctgacggaacgacgggttgaccgcatcaacaaccacccaccgttccgtctcatccgtcctttgtcttcctttctttccttcctgttcttccatctcagcttgctatccatgtcgctcagtagggaaagcaagaagatcatcatcgaatgtaagtgtcgtcagaacttgtctgctcaagcgacataccctctctcactccggatcggtcggctttatcctatatccgatcaacttggctgactcttgataatttctatcttcagcttcggtctatctgtgcacctcagtgagctacttgctactttttactatcgatctggttcaattgactaattgtttggtcatcgctgctctcatgcgtacagttactagcactatatgcgtcatacagattgatggaaaccctttcgccttctaacacggagcgccgaaagtccagcaagaaaggcaaagagacgctcgaacgactgaaggggtcgggcaaggcccgtttggagaatctaggagacctcaacgaatacgaagagactcttctggctgaggtcgtccacccggatgatatcgaagtcggcttcggcggtatgctttccgtgctttttatctcagcactaaagaaagacaactgacgacctttacatccgctcttttgctgggaccaactggatcagacgtaggaggattagaacctatagttgattcgctcagagagtcggtcatctacccacttatctaccccgagatttataattctacatccggtctattgactgctcccaagggagttcttctgtacggtcccccgggatgcgggaagacgatgcttgccaaagcgctggccaaagagagcggtgctagctttgttagtctctttcttttgttataattactactcattttcaaaaacgatgaagaggcatctgaagacttgtcctatgtttgtgtcatagatcaatgtccctctatccgctcttgccaataagtggtacggagagagcaacaagctcatcgctggtctcttcactctcgctcggaaattacaacccaccattgtaagtgttcgcgttagctcttcttatatttctttgatgcatttatagacgaaaacgattgtgatgactcatgaatgatctccccacctgttgaacgtgaaaaacaaagattttcatcgacgaaatagacgctttgcttcgaaacagaggatcagataatcacgaagtcacgtctacgattaaagcagaattcttgactctttgggacggcttgacgtcaggagaacggtcgagaattctggttctaggagcgacgaaccgacccaacgagtaagcattttacactctttgtctaaaaaattatcttgattctagtatgatgttgtctttttttggtgtacgacaaggctcatcccagttgttatgtttcgcgtggtttgggattgtgttctactcgggtttcaccaaatagtatcgatcctgctttccttaggcggatgcctaagaagttttcggttggtctgcccgatgcttctcaacggtctcgaattcttgctctggtcagtttctttctctgctcttgatctcttacccatacgctccatactgattggaatgccttaaacttgttttcgatgattttagatgttgaaagacaccgctctttccagttcactctctatctctcatctggctgaactgacggaaggccggtcggggtccgatctcagggaactctgcagggaggcagcaatgagaccgctcagggaggaaattagagggaaagggtttgatcctgtcaagttgggcgagaaggtgaggccttcctttgtgttcctctatcaactgagtcctgggttaagattcagacctgactgtaatcttgtttcgtctttatttattcttctcgtccaattgggtaattctcatccttgtttgtcccaatccaaccagggctttgaactaaggccattggagttgaaggacttctttgacgaatcatcagctctagaagatggcttagtggacggttgatccaaatccaggatttagattcagcatcttcctctatttctcttcattcccttaccactctcgccctttccttttcactctgtattgacgtgcatcattcaatgttcaggatcgaccgttcattcatctttctctcgtctaaacgtacacatgcacaaacgtacacaccctcttctccttcgctgctttctcggttcagttttatctttatatgcaatgcgcgatttaacggactacgaagtactgaatatcgaacacccacattcatttcatataccatgataaaacaccatgataaaacctcgcttgttctgtaagacctaacgatcagaacatcagactatctgtttagtcaagaagttgatcgcatccatatgtttgatagtttgttctctcaacgggttcttgccttacttttgtcgctgcctactatgtttacaaaggaaaagaaacatattattttcaggatgatgtttttccttattcaatgaaagatgagaggcgaaagggtacaagaaagcacagaggtagagagaagagatgattaggcaataggacaagatgacttatacgagataacagaaggtgtttttaaattgcgggtgagagatagtaaggaaaaagtattttacgatatctatatggacggaagcacgaaataaacacctgcacaaaaagaaagaacaatccggtagagtggaaacaacgacagacgatgatattaaggagaaaagaaagcaaaaacaatcataaaacaaaaacaaaatgaatttgaaaaccactataaccctttacgagactgattcccgattctagttcttgatgttgttgggatggttgggcgatgactcgtcgatctctcccgtcaatcgaccagaaagatcacgtccgtcgtaaacgttttgaacatctccaagcctgacgtcgtcaacgaagaagaaggcgatgatcggagggaagacggctacgaccgtggccccgatgcacaagttcctcatcacataatcgtaagcatggatagctccaactcgaatcggatcggcagcaggataagcggcgatgatggtgattgaagcgtatagctcggcgttcaaagtcgcgttatttccggggacgtatttggccaaagcggcgggcatctgagaagtccaaacggcagtggccacggcagaacccacactgtttccaacctcagtgatcaacagcacaagcgcggtcacggtggcaacatcgacatgaggaactcgagcctgggcagcaacttgaaggcagatggcggcgaaacctccgcccattccttgaaggacttgggtcataacaagctgtacatacgacaaggggaaaacacagtcaagtcggatctagaaccgaaacgaagaagaacaaaataacaggtgatggacgaacctcagcagcgctaccgttacctcctcgggagtgaatcatgataccaactccaagcagtcggatcaacagaccaccaaagagagtccacttgagatttctagtaaagaccataaggataccggccaagaatccaaagacctgaaaatatgccgaacagatattacaacagatcgtcaacgaggaatgaaagaagaggtgtggaaaaaaaggacaatcgacgtacgcaaagagcgatggactgggtgtatgcaaaatagttcaagttcactggactccaggtgggctgagacacataaacgaaggagtacactagcagtcaaaatgaaatcccattctaaagaagtcagtcacgctgatttgagagagcaattttgagaagctggatactgacggtaagtgtagctcaagtagaaagacacaaagtcgaggaaaccgatggcacaagcggccgagatgtttcggtttttgaagaatcggtaaggtgcaacaggctttttggcaatcttgacttcgtagatgacggtgacagggataagacagactccgaggacgatcatgacaatcttatttacataacacaggaaacaaagttaatcttgagtgaagcagtgatagaggtggtgtcaggtcggcgctcaccatgctgggagttttccatcctctgagggctttaggagcaagacccagaggaagaaggacgagtgcaagcgtggcggcgatcaagataagaccgataatctaaataataacagaagaagagatcagttcagaaaaggatcttgtcttttttgtttggaaagttgactagaaaaagcacaacgtacatccatctcgatgaaaagaccctttaaggtagcaccgaagttcttgaatccggtctggtagatctgtggaacaacgttaagtccggcgtccaccccgtcatctccagtggcggtggtgtggacggggacactagcggcgatgtactcgggaggagacaaagcggcggtagcgagggtgggcactctaagaagggcagctttctttgctttacgctgggcccaaaggagagtgatgataatgggcaggacgcagacagggatgataatacactatgaacataattggagacaggtgagcaatcggaccttgtcagcatttagcggagacgattgaagctgaagagaaaaggaccaaagaacatacgaaaattccgtatccccatcgccagttgggattgatagcggcggcgatattactaccaacaaaggcattgatgacgaagggcatagtgcagagtccagaggcaaatgcacgccatcgtagggttgtaatatctgcaagctgttcagaaaatagaaaaacatgagctgagctttcaaaatgaacagttcaaagtatgagaaaacgaacgatgatctgggtgaggatctgaagaccagtgtatccaaaactgtagataacatctccaccggcaacctggttgatggtgctggcagaggcgataacggcgtagcctacaatataggcaacgaccgaaatgatgtacgtctcccctcgtccaaagctgagaggagagggaaaaagtagaaaagaaaccatcaatattgccacggaaaacggatgctagcagaacagaagacatacacatcagcaaacttggcgaacgcaggctttcctaccgcgataatgatcgcagcagcagtggtgaccgttccggagagagagtggtcaagaacggttgaggtggcctggtagagaaatagataggtctagatgcacccgcaagatatgcagtaatcagtatcgaagtggggttgagttcagacagaacgtaagaccttacagtgacaccatcgagagagtacacatatgaggcgagtccaattctgaatggggaggacagagatgagggatcgaacgaatcagaacaagcggcaagaggactgcgtgtgtgcgcattcaatcaggctacaaacaagacttacgagatcagcaaggcccatttgctcagtggagtccaaacggcctgggcagcctcgacctttgccactccgggctgcatctcggtgtcgtgaacatcgtgcttctcgagtgtgtaggcggcgtattgctgaccagcctcttcagaaacgatacgcttgttcgcctcgtagtcggtgtgggtgtctgacattcttctgaatgtggtggaagaaaactagacggaaggaggggttaggctggtttgttcgtgatctttctcttctttaaaatcaaagaaagagtaaagtgtaagtttctcaaagaaagagaacagaaacagaaatgattttccctctcgtctggatctttatattctctggacgaagaaaaaaattcttgtgccgttgagtgaactttttcttaattccttccatccttggtatagcaaaaaaagggagattcaagggcagaataatcagacaaaataatcagattacttttacagagcccgtgtgctccaccaggctgctaaccgactcgtaatttcgccgatcaacgcttgaaacaccgaagacatccgatgatggtggacgctcagcaaatcagattgcgtacctgccgacaaacggcgattcagccttcgtgccttaatcccgtctattccttcaggtacgactgcgtaccagggcctttgtcttggaagacgattgactgtagaagcgccagtaacagaacggcatgtcgaatctgggcagtcggtggccaagcgaggtctgtagatcagttgaggcacataagcgagccaatcagattagaccaggcgagttatgcattaatattctctctcgagttcggccggattttcttttcttgggcatgtcttcgttctactcgattatcgtttcttctgattcagttcatccgtcttgtgcggatcgattgaaacaaagatgttctttttcccttcctcgtccgaccgatctcggccagaatgtccttttcgttctgtttatattgtttttcagtgctgtccagagactttgtcttgtctggatcgcttggaagaaatccaacgacgcaatgatattcgtcagctcttttcaagagagagagagagagagctcggcgcaccccacagaagcaccttgagtacaaggcagtctgtggccgaaaaaaaattgaaagaaaggataagaaagagaaagagaaggctagaaaagactatcgagcctaggtctagaactttgatcataagaaaaacaagaccacaagcttattgttcaccacatgtagtcgtttacattcttcgtcctcgtatccgtccctctccctgtctccgtctctcggacgcttgcgagccaacatcaaaggttgctggcatgtttaattcttttcggtagcaaataggaagaaaacatcttgagcgaccagtgaatagcccagggctgttgagagagatcagaaaggaggaggaataatgactgctgatgcacagtagagagtatcaaatcgactggccaaatcacaaatacgacgcatacacatacatgttcgcatatatgagggatctgcgttgatcatctacatacaccaaagtcgaacacgctttcatccctatgttctacactgaactctcgagcaacctcttttcttctccccaaagctattgactctattcgcgtctccccatcattttccgttgacctcgagcttgaaaatgtcgggtctacaaatttgagcccatgaaaccaaccatatcagattgaaatgcacttgagtgaaaccgtcgctttaaaatgtgagaaggaagtatagcacgaaccgagtatagtggccggcgttatcgaggtcaagctttgctcctagaatttcatccagatccaacactgcagagatcaatctgctcatttgtcatcccaaacagcacagagttagcatgtagacacacacacacacaca

SEQ ID NO: 1460 - DNA, 87697 bp, Xanthophyllomyces dendrorhous
acacacacacacacacacacagagaaagaaaagctcagagtccagaatgaaaagacaaaaagatcgacgaaccctgctttccctctaagaggcccggcgagaacctctcccaagggcgacacgatcacacttccaccggcaatcatgataccctccgggtcaaccggtccttcgattgggtgcccttccggataatcctagagtggattttcgagcagaacacgtaagaagaccgatcgtgtttgtatccgttcaagagtcaggtgagaacgtactttttgttgagcaaactgtcacaaccaggggaaaaaaacaatcctcatcagccttgtctcccttgcttgcttgcctcgcatgcccaacggcatcctaataaaaatcaagggcagtcactcacctgacaagcgttcaacacgaaacatcttccctccatcgccagatgtttgatcgtgctctgccagttttcccttccatcgacggtaggcgtgcagtgaatctgaacgccttggttccagaagtgttgtcgaaggagaggcatcatgttttcccaacagattgcagaaccgattacgaccggtgaactctcagagttggatgcgagcgtgggcgcttgggcggcaggcccatcgacggcacccacatcgacctcggcagcagcggaaggaaaggtgtgggtgacggcagagatagtcgagccatcaccgaacccccagatgagtttctcactagccgtgggcatcaactggatcactgaaatctccacacgcccatcagctcaatttcagaccgcgtgaaagctcgagtcggaacgtttttccttacctttcgcctcttgtagaccagaccttcggtaggactgtaaaacccgacgacgcaatagagcgttcccccatccttttcgatcaaaccagtgatgatgaacacgccggaacgcctggcgatatcctcgatccgagtgtttgctggaccggggattgtgattgcggctttgtgatacgcggcgaaagtttgacgaccggccgctgatcgggtacctacgactgctccgaaagattcgaactagacggtcaagagtaaagaagcaagtaagatgaaggcaggaacgtttaggtaagtacacgcgcttgcaaatacgaatcgataagatgatctcaaagcgctattcaacccatggggtcgatagattgaagaaagaacacacacggcccgactgacttttgggtaacctccaacgctatctcgtcccacatcacagccggcagattcatcattgatagaaaagagccagggtcagatgaatttcacaccctagacccgagtttgaagaagaagaaaagaaagaaaagaaagaggcgagaacatacaaagcctcaggaaacaaaacgagttgactcccaacggccttagcttcctgaacataaccctccattcgatctaacgtcttatcaacgtcgtatcctgctgtcccgcattgagctactgataccttgattttcatccttcagatctacttgtctctcttttcttctcgttttatttaggtgttccttaagattagactgaactagactgaatgatgagtagagtgaagaagagaagaaagaaggataaggtctcgtcgaccgaggtatttgacataaatatggactacacccttggtcatctcctatttccttcctatcaaacgacatctcatcgtataaacagtaatgactcgacatctgtctttctctctttttcatgcctccattatcaatattttatcatttgatgtctctattcgtccttccttattgactcgagtcatgacattcggagagatcttgttccggattgtaaatcattattcgtgatggatcttgtcaaaacgttgagaacgaagaagatcgaaaccagatatgacaagaaaaacaatagccggtccactatcactctcagaactaaatgccacttgcagtgttctctattatccggtagccggtcaacaatcatcgtcggttcacggtgtcgagttgataaggagtaaaagccaatctatatgatgttgagtacaggagaaaatctgtcttttctttcttggttcccgaaggagaggaaattagaagggatttacatatgctagatctctggtgaacgggccccttttcggatcgttcacaagagagaagaaaagggagtattttaaggataaacgcggttatatagtatgaagggagcagataaaaaaatgcaccgtgaaatgattggtgtggaactaggtagagatgtgtaacctcgaatagatgagaagggaaccaagatagaaggttcaaaaaacgtatgtagagataaagagagattcctgggatcgaaatatcaaacagcccaaatgtgagagaaagaaagaagagaaaatcgaaagaacccgttcagatggcccttcggctgtcctgctggaaaccagggacaaacatctggacgtcctcgttggtgggactggtcttggggacgctatcatcatcctcggacgagtgcttctccctggagtcgtactcggaagtcttctcagaggtgtacagggcctgctcccgtcgagcctctcgctcccgcagactcttggacttgtaaccaaacaaggcaaatcggccctccttccacttggcttggaacagaatgagcatgatggcgatccagtagcagcagtaggatgaaacagtggcagcggtggcggtgttgttccactggaaaaggaagaagttaagggaagaaagaagtgggaaagttagtaaactgtttagagatgagatggagaagaaaaagaaatagaagcagaaacgcactccgaagatggcgttaaagatcatccatcctccgttgctgttgatctcggggtttccgtagttgacgtgccaaacaatgttggaaccaccgacattgtacgaaccaggaccctctccggactcggccacatcacctccgaccttggaggcccacgggtagtactcgcagaagtagacacccttgctgaaaagaccggcaccgatgcagaacaagaagcaggtcgagatgatcaagaaagtgtgaagagcaaaggcagatcctcctcggtagatcaagaacccaacctgtagaacgagcgcaaggaaggtaaggggtgggctgtaggattaaaggacggcaatcaatcacgacaaacgtacaatgagaccggcaatcagaccaataacaacagggagcggggtagccttagcaggttgagagatagaaacctgagagggggcaagaatagcgaacggggtaagctaaatgtaaataggcagtgcaatcaaaaacgacaagaacacatacaccagcaacgaaaacgacggcctcgagaccctctcggaggacagtgataaaaggcaagaggaacaaagcccacttggcggatcgaccctgcttgttctgaccggcctcgacgtcgttggactttgatttcctaaagatcgagacaaaggcttcccatctggtgaccggtcgagagtcaacagcgacgttctcatattgctgttggttgaaagcagcctggagcttaattctccacttggctcgagctcggtcgagtcgcctatgacggaagaagatagaggatgtcagtaaatgtgcgcaggacaagatgaatcaaagaagagaaaattgagagtggagactgacaagaaggcgatacccatgaccatgatgacaccggaagcgacgatggagaagataccctcccagagagcctcggactgaccccagagatcggtgaccttggtgtaccagacggcgatgaaagcggcaccgatagcgagagcgatgaagagaccagagaaagcaccgaaccaaatctggatgaggggtgtagtgtaattgattgagtgagtaaaaaggttgcagatgaggacccagatgtggaaagtgaccgacctgagttctcattcgtcgaatcattcccttgacctgcctctcctcatctgcagcatcgacggcatcaaacttcgaaccgtacacaagctgttcaacgctgcgagaaagggatgacagaccggaacaagaaatgagctttggtccgaaggaacaaggcaagtgagaacgaggatataaatgaacactcacaaagagagcagcacggagataacgataccagcctcgatcgtctctcggactggatgtgcgtgtgaagaagagatatatcaagaggggaaacaaggcaagtgagaaggtgagaggaaaggaagaaaaggtatcagtagaaggtacgccaacagctgacgggtatcatacatacacaaataggaagccaggacatacagatgatgaagaagatggggacggaaaagatatcctgggtcatactgggctaatggaaggcgtttgatacacacagtatagacttgaagagaagaagaaaaagagaggcaaggagcaatgggaagaagctgctcttatatccttcgttcttagtctgatcgcagagctatccgattagtatttccgttgccagctgcccacttgccacacggaggatgcaccacggacaaccacacagaaaccggaggaatgaaacgaataaaaaaaaatctatagagggaaccaaaaaaacaacagtaaaaaaattgaaccaacgagcgacgagcgtgagcggggaagcggaagggaagaaaataaacgatgaaaggagacgaagaagagaagggaaaacaggcagtcgggcaatgttcagccatatctgattaaaaacctagaaaggtcccgggcccctgtgctttcacgaggcgcctggccacacagcggcgggcattcagcacacggcctcaggcaccatgactggatcacacattctctcttggcgcagacaatataccatcggtcatatgctctctcgacatgcctctacattttcgttcagggtcccctctttcgggctgtacggacagtagcacattatctccaaaaatagaactgctgtccaatcgagccaatccggagcgagcgaggatgcgtcggccgtggacggtacatctatgtgtgggtctggggaagacaggaacctgccgatcgaatcgagatcacacaccgacgtatctgatttactgtcaatatctgattgtcactttgtgtgggcgtgcctcatcctgcataaaatagctgtactgcatgccggagagcaatcgttcctttttccacgcttgccctttctttttcgtctctctctctctgctaatgccccgtaacgcgtgtttctgttcctttctcttgaatctgtaactataaagacatagaagatccgccaactctgttcggattggtctacttctacagccgtcattcgctcttctgtctcaatcgtccttcgttttctttgctttctttttaatagaacgaacagcgtcacatcgtcggttttcgtttccgtcccccattttttctttcgatcttgtcgtttatagttcgttttctgacgatgaatggccggccaatgacaatagtaaaaaaagaacagaagagagaaatctcggttattgtacaagaagagatcgccaactcttttttttttctctttctattattgactataaaatactgataagagagtgtactggatggggaagcaacgggaggtgagaaaggaaagagagaaagaaaaaaaaggagaaggagacagaagaaattccatccaatccaaggaatatagggccatctgacacggaaagatcctatccgccgttgacaatcattggcaggttcaccaataggaaacgaaccgtctggcgaaccacaatacaccggtcacccggattcgttgtcttgttgtatcttggagtagataaataaataaacagccttcttggcgtggagagaagaaagcgaggaagccgggtatcacatctgctattggaaagagacatacgttcttccaccgatgagtgctgattcgttgaaaaccagcaaattcacatggagtaattcaactctcctgccgcctcttcactttccagcaagggtttctccggcaagaactccggttgttgaaatgcctgatgtaaatttccgtaccgtccacatcctgtcatcttgtttgaatcggtcaatcagagaaaaggaggaacaacaaaccatgatcctcactcttcactgaaatgagagaacaagagctgatagcatattagtctcgacccgactttcttctcttgatctgctcatacttgttgaagctacgatctcctctagtctgttggttgagtctcatcgaatcgtctcgttaccattacactcaagcatgaggatctcatacagacatgctacattatgatcacacacagaaagagaaaagaaaaaacaacgaatcatcgatacacacgtacgtttacgcacaacttacatacgtcttttcaccgtctgtcgtctgtaggcctgtaagaatctccgcgcgatctcccatagtttcctctgtctctgtctctgtttctttctctgtctctgtctctagacctgcttctactcctgctccgatccctgttccgccctacccatggaccatctcttttcggcgctcgataatccctcgaatccctcgaatccctatcccaagagggtcttgaatctcttaaatctctcgggttcctctccagattcctatctctttgatctcttctactactcttgaagttttcctctcttcttcggtcggccgcggtccaaccaggtcgagagtcatgtccgttggtcgacctaccaactgtgggtctgacggtcgatccagaaggaccggtcggcacattcgcgttcagagacgggtgtgaaggaccggctcgtccggcaggacccgtcggtgggatccgaggacccgtcggcggtcgattggatgcgtttgatctgcggtcgtcgaacgaacccggtccgactgggcgcacggccgatgaaggtcggaacgcagaagggccaccacccccggcgggaggtcggaaaccgatattcggtatccctcctgttggacgtctattccccaccaagctgacatcccctgcgctcttgtactcaaacacccagtgatccgttccttgctgattcaccgacgactctttccggataatcaaattcagctttttccttcctcctcgccaggaagcctcttcctggtcgaccaatgatgggatcacacccgtagatagatattccaccttgagagccggtggatcgattgcttctggtggaaatccctcgagcgattgtaaaccttcgtaagccctcttggccgaagctgcgtccatataagaaacgaacgcgtgggactttacagggctcaaccaccaaccaccgtcgctttcgtcgtcaccgccgctgtagccggcatgatgatcgataggtccgaacgggtccagtagacttcggagcgcttcatcaggaagcggccgtcggagattagttatataaagtgaacgtgtcggtggatgaccaccttcgatgaagttcgagggttgctcggcggacggatcaatctcttgaggttgaattacttggacagcggcagtagtgacggcgatggatgtatcaggcgaatctggtcgggctcgtttgttcacgctttcgatctcttcctcttcctcttcggtatcaaggcttcgcttcttgttttcggcctcggcttcggcctttggctcaactttgctctcttcctctgcctttggttctgatccgacctcattcaaagcaattcctgcgttagatgcaccttccgccccgtttgatccagcacccaactcttcagcttctttgacagccgcttcctgttctcccgtcaaaggaacaggaatctcatctggattaggagctaccgggatatccggctgctcgtccgcaggctgctcgacagatgcttccgccagtggttcacaaccaggaacaacctcggcaggaggagggatggatagtgtagacacaggagcaatcttgccgttcacgtctagttcgagttcgaatccagtcgagggcgttggttccccgccgacgacggactcgtccacgatcggcgttgacgctgaatggctctgaagaagagcgacgagctattcatccggatagatacgtgtccgggagaaaataaaaaaagatgataagaccaagaacacgactgattgagagtacgcgagatggctgggaatacttgcatctgctttttttgatgactttgagtagctcactccggccttgtcgagttccgctttgagctctgaaagaaagcaacatatcaatcagtaacataaataactctccacaccaagccaatctgatcgacaaaaagaaagactgacctgtaactttcaaagagggtatatcaagcatgatagatggtcgttgattgagatgttgatccgatgtgtatttccctgttttccatctcttgcacgcgccgaccaaaatactcagccgattttttcccctcctttctctccttctgctcctcctgtcacaccacacaacaccacatcgactttgcttctatcttctatctgtcactccagacaacacgcatacacataccctgtatatacctgatatcttgaaccttctcctctggcaaacgttgcttgcttgctttctgggaaatctgatccctaggtagtctttcccttccttcatcaatagcccgcgtatcatcgccctttcagttcagctaagctgtttgtttatcatggctgaatccaagcggacaggtacgtgatcttcttcttttgttcttcttgtcattctctccatctgtcttgtcttggtgaagtcattcaaggcagtcggctcaccttatcatgtctctctcagcctcgaattcgtctccaaaaccatcgaatggtgcatcagccgcttccctcatcacgcaaccttccttggacgtgctgacgatcccaaggagtccgtccaatctgtccagcctgggctctctaccagccatgacggtcacaggtgttctcgagtccaatggaggagattacagccgtgctttagaagccgtcgtcagagacagaaatcattctgtggaagagaacggtgagtctggagagggtctgttgtcatgttctggcacaatcaatcgcttctgctcgggctgacaggttttatcgtgtgttcttctccttccctcgttctctccgctcttctttctctgctattccaattagccggtctatggaaaatcattcaaaaccttcagctcaaagcagacgcctcgaggaacacagagagtcgacttcgcggcgaacgagaccgggcgttgatagcgtgtagattgaatagagcagtctccccgcctgatcagggaggatacatgccgtcagcctcctacctaccaaactcgtattcatcactcggtctgggcggagattcgaatccgtctctggctggacccatgtccggccttggcgttggtgggaatgcttccggtagccttcctcccagaagctcgtcgacttctgccggcctgacgcttggccaacaacagcaacagcaactttcgttaggcaagcgtcaatggagtgaggagatcatccggagcacccgtgggaatagctctcgggacaggatggagagcaactcatcaattatcagtaccgacacttttgccagcataaacacaaatattagtaacctgtctcaatcgaccatcggtggtatcctgaccgacgaacaatggactggtggagctagattggctagagattggggtgatcttgacgtcggggcgatcagcagtccaaaattgcaggcagattcgacaggccgagcagacaccggtcgactggcacctataccctcgtcaaccgagcaaccgtcctcctctgcttttaacaactctagcttacacgacgatcaatcctcctcttcctcctcttcttctcccgctcccccactcatcactccaacaactcctcaaacttcttctggccaacactcgctctcgtctccaatcatactttcgaaaggtaggccaatcgaacagttgtctttgcccggaaatcccgaacaacagtctgagggttcctctcagagggaccatgtaggaagaagcctgctcgattctgagagacccgattcaagcaagcctaactcattgggcgtaccattagcttctctgcccgaaggatccaggcctgacagtctttccactcaagcacctacctacgtgctatccgtgtcttcgcccgaaaacgatcgcagccaaagatctcgctcatattctgcttctagtaattccgctgttcaacccgcccaggatccctcgaactttctcgcgtctcccctattgcctccaatgacctatcagacgacatttgatcaggaaaagaacggaagtctggaggaatcgttgatggactcagaagcatttccactgggtccggaaaaggagcttcagaggcagcaacacctggcgttcagagaacatatctctccaaactctcttacagaccatgatctggcaagaaagtttcacctggaagaaatccgactagcccaacaccactatcgtggctcgtccgggcccctcgcagggaactatacctcctccacaaacgatcccaatctccatagactaccttcctactcgtcaagttcatcgttggccaatcataccccgcgccagatctctcctcggcaatttcagtcctcatcttcaacacacccgtcttcttcgactcctcaaatccggccgccgccttcgcctttttcttcaaactcatcgttcatccgatctggtagtacacccgttggattctcaacgtctgttcctatgtacttccagcaagagtcggaagaaaccatttcttcggatccaaaccatgatcaagctctcagctcctcgccttcgggtttccaggtcaggctgagttttccaatgttgccgtatacaaagatcatgattccctcctgcggagtgatgacgaatgaatatgggaaggacgtcgttcgattcagaattaccatttcggtttctcttccctcaccatcatcatcgtctttgacatcgtccattgctgagaaaacgtcatcatcagggttaagccaaccaaaagtctggaaggtcgacaagttgttctccgactttctggctctcgataatagtttaagaaagaggactggacggaaagagacgaaagctctagggatcccatcgttgcctgaggccaaagcctggagagaattttcgatgagtaaggtcgatcaaagaaaggtaagcaagtcttcgtttgtggcatgtgtacaatgtctatcattttgctgaaaaagattgttcctccaatcatgtttaatttcaaaccataaattgaagggtttgttggaggcctatctgatttccgtcttgcaagcaagaatgtcggacaaagaggacttttgctacttcctcagtactgacgtgatccctctcgagaaggattcgatcccggtcaccaaagaaggatatctcacacgtcgaggtcagagattaggagggatgaagagacggtatttcatattaggcgcgctcggtcgtccagtaatggactactttgagaccgtaagtacatatatccttgttggctcgttatcatggggtagaactgatccaaacgaaatccatggttgttcgatacgcgtgtgtctgtgtgtgtttggctatctttatatgtcgactcggatttgagtagaagggaggcccttacgtcggctcgatacccatagcaggcgctcagatcggtcgcagtaaagaaagcaccgaaggaaacgacccacatcaacgtcacgcgttcttgatcatcgagagctcgatctctggctcaaaaggaacgcgacatgttctctgtgcagagaccgatgaggatcgagacgaagtgagtgatcactgttctcaagctacggagaaagatcaggcgaaaagcagacgtctctgatcatttgtaccttttcttttcatactatgatctgcatcaccatcagtgggtcaaaatgctcgtccggttcactacaggagacttccctcgagcgaccaattcaactcctcaggaccaacaggcagctgagaagtcgcctacaatagggattcctcggtcttcaacgaataacagtctgaagggtgttcaacgcaagccttcggttcgaaagctctcaaaggatgatatcatcgttggtccagccaagcctctctcccaggtcaaccagagcacactgtccagaacaaacttgacgactggtccgcctgcgtcaacagtagcagcagcggctgagataccattggaagctcctcctcgaatgtttgactccggtcgaagaggtagcacgtcgtctgtccgaagcgacgctggtctcttgtcggtcatcacagagaggccgtttgggctctctccaaacggcaatggtccatttgcaagtaattcaggcgcccaacctgattcgaggtctcagcgacaaagcaacttgcctccaccaagagtggtttctagattaccgcctccttctcggtcgcctcctatcactcaaggaagccttcaagaagagaaggactcatttcggtcgaggcacaagatctcaggacctcagggaggagcgcccattccggccggcttcaagtttggagccaaagatgacttgccggatagagagcgaaagtcaaagtccggaagatggggctttggctttggaaagattagtacgttctctctcttccttatctttctctaccatgtatattcagttgattctatttattcggcgctttgaaaaggcgggtcatcttctcatagcaatttggtggctgctcgacctgtttttgcggtcccgttggcagaatcagttctggttgctgaaatagcgggccttcccgcggttgtctttcgatggtccgtcccttagctatctgttacagtataagactctttcgtgagaatggctttgctgagattagtgtgtttgacatcttcttggcctttagtatcaagtacctcgaagcaaagaacgcagagctagaggaagggatctatcgtctcagcggatctaccgctttgatcaaaagtctacgagagcggttcaatactggttcgtctttgaaagcattgatcaaaacgagtctaatagcagttcttgaccagaattatatttttcgcttggcgctgcttcagatggagactttgatctgcttcagcacggtgaaccggtagacccacatgccatcgcaggtcttctcaaggtgtgtttatcttcctttcgagttgctcatcaacatgagaccagactgatcataccctttctcaaatcgcagctcttccttcgcgagcttactactagtctgttgactcgagagcttcacatgcagtttctagctgtaatcggttcgtcacttctagatgctcctcgaagatataatgtctcaagagctgaccgaaaacgaacacacgtatagatttggccgagtcaaaagataggatccgagagcttcggcaccttgtggggcagcttcctgtccataactactgcctcttgagagcattgactgctcatctaatcttgatcgtggagaatgctgctgtgaacaagatgactctgcgaaacgtgagtcattagcttgccccctctattgagttcgctccacttatcttggacaactttgtataggtcgggattgttttctcgccaactctaggtattcctgctggagtgttctctgaactggtttctcagtgggtctaatttgtcaagtctgctggaatctgatttggtatatgtgggctgatatgtcacttgcgtttttttccaatctccagattccaagatatcttcgaagaccccccagaagctgtctctggaaccaccgctagcccggaagctttatccatagacccggtagatcaagaaccaactcaatcatctaggctcggtatggatcctgatcaggacaaaacaaagagaaactcagctagctttttgtcgtcctctggtgcagaacagatgttggggctctacggaaggaaactgaccagtaagttctgtctttttgaggacacatctttggccctgaaactgattgtttttccattcttgtacttgtaatcagacagtgatcagctagaagaagagagtagcaacgatggaacgaccgaggatgaagatgtctcaggtgaattcaacccgtctgtggtagatatggatagcactatccgatcccctgtatatcaacctccccctgctatcccagagcaattcaccaatcctgcttcagcaagcgatcggcgttgttcgttccattcccctctttattcttctctcgctccttgttgttgaacaaattcgctgacgtgaataccgatatatgcgttcaatagaacaatccatctgtctttctctagacggctcaaactgaccgactaattgcattatatagttttaatcggttcgtcctttcgttccatgtttacgtcggtctttgagttggcgctaaaaaaaaacagcttgactgtgctcacctattttgtacactttctcttatttaggtcaacttcatatacgtccttatacatattctcgccatcgccatatattctcttctgctttaaatcgctgtttattccttctcatgcatctctaccggatttttttctcttcctttcggtattctctttgactaaatgactggatatgggctttcttcgtcttttcttcttctcttcctgttttcctattcgttttcttctggcttcttaaaagcttcttgcacgttcctcatcgacggccgatttggcccgccgttgtctttcttattctccctgtaaaaagattctcccccttttacccttcgttcagatactcaaacgaatctttctatctttccttatctctttcaaaagctctcttgagagtttgtatacccaccccttgacctcaattcttagtatttctctggatgagtttttctctattctctcattcttcttacgcccatcgacactttgctcactgggctattaccgattagaaaaatcttcgttctgggaagtatctgcagagaaacacatcttcgaccaaagatcaaagttggaggctcttctcaacttccttctctaaacgctttccagaaatcggattgatgcaacttggctaggttcttagttttacctttaattctctttctctttctatcgttccgacggtacggaatattgaatatgagtgcccttgaaccaatgaggagagttgaatggtcatttttatttatttataatcggcctttctccacgaacaggacgtgtcggttgactatgatgaaagacatggttgaattccaggagtttcacgcgtattgacgagacacgagcatagttagagacaagaagatgtaatgattagtcaaatgtttgatagtcaagatgcagatcagagagaaataggcgaatatgatcttttatcagagaaggatgcttctcctactgtcatgaacagctctcacgcctttctcattatcatgatttggccggctatacccccgcccacagctgttcgttcgacattagagttttgaccaaccagacccagagccaatccaaggccagcccaaagaggagggaaaataaaaggaggagggacaaagatacgaaacaacgaaaaaaactcaccagctttatcatacttcatcatcgccatcttcggtgacaacctgggtctcgcaactccgtaaaacgtacccgtcaacgctgtgctgacaagcttgacaaggatcgttctaatcatttcagagcaccattgaggaagagtttattcgaacgatgtagtgattcagagtaaagttcaaacagaacgatgacaatgagaaaggaaaggaagaggaggaattgaataaaaagtcgatccgatccgaaccaaggacaggtaaggagtgagaggtagaaaggaggttcaaaagatcagaaacaagctgctcgatatctttcaaacctcacaattatgagattgctggtagcagccagagagtgatatacgaacctggcttttttgctgctactccttccggccatgatgtgaatgagtatgttgagtgttggtgggtagacggaagagggagcgtgaaggcgttcagggccgaaatggggcgattggtcacgtgtcaattctggctgttcaatcaactgattgatcgacagatagcccccactcgtcactctgcaaacttcctccatggatgtcacttcaaagaaatgtttctccagggtttctgccaaacgctatatagccataagatattcataagaaatataagaaatacatctaacaaggttcgtgatagttcgaatcagataaacgatgatgtggaaggagtagattgcgaggaaatgtgattgtttgaattcgagagacagaggtaggtctaatgggatcaagcagagatgatcttgcttgctctttctaccagacattacttctcacaacttttggttcgagccttctttatctgcagcgctcatcttttgttcaagtttcgataaagaggtgtcgacaagcattgacggacttgtttcgtcaacccatggtgactccaataaatcttttccggcgaacgtatttatctggtattccatcagtttctgaacgggatcaaaggatgatgctcgggatgattccaattgattagatatatggataaccggcgcagaggatcgagtggagcgagaggaaaccccagtaggcgggggacctgcataggaacctgttttaaacgtacaatggccatgaaccttcattgagtaccgtcacttgttcggatatagagataaccaaagacacaacaagaacattcggggcgcaccggagtgtcttggagaccagcctggcgtattgggagtctcaaaagattcatcctgactaaaagaggactcagcggtacccggtcgagcaggtgagatcgatgagagagacaggggtaagttagttgggatagaatccagggaagaaaagcggaagtcatcgaacatcccaaaagagggttggaacgagtcgtgtaggggagagacctgattgaatgctgagattgggcaaggttcctaaaatttccgagatacagtgagcagatacacgtcaagaaagggtagatagatatgtttggatgtacaagttcatcgacagttgcgtccgtagcagaagccgcagaatctctcctccaggctctgtaccccaactacatatggtaaggtatcaacagcaactcactatcagcttgtagaccgaccgactatcgaccacattgacacaaacctcaaccgttcttgaaagatagaaacaagtacaaaccatagcactttttggtccagatccactctccacggcttctcccaaaccgtcgaagatgtgagatccatctgagtcatcctcttcaggcacgttgtccaaaaccgaaatttgctatcgaagtcaggaaaactgtattttagtatcgcgtacacgaagtctgactgaacgaagacaagaaatgagtagacagacggtataggaaactcttcgaccggtctggttggcaaaggtcaagcttggccgacaggatcctgaatgatcaccgtcttttccggaagtagcaagcgggtttgagtaccttgagggttcctctgtgagagctgactcgagcccaacatcctcggtggttttttcggttcggtctaaagtactggcgaaagcggccatattagtgatagggatgatgttactcgagattatgagttcagtaagatgaataagagtctttctcgaatgttgaagttcgaataagaatggtagacagaaagaacaaacacttcattgaaacattgttgtcgaccaagaagagaagagaggggaaaaaggaactgaccaggcaagagatgtgacgaataaggaccctgagagtgcgacaaccaggtcgagatcaagatggtcaagatcaagacggtcgggatcgaggaagagaggtccagcgcgagagaggataggcgctctagagtaagtcgagcggttcctttgttgttctgttcaggtgggtttgatacgtcaccctgtgaatacagatcagaagggtcacatcaatccaggaacatgctctacgctgatcagtgaaaacatttctaggtgatgcgtaagccttcgtcatcacatgtttatcctgtgcatttagtcaggagtgtcagtcaacagacatgcgcttatggaggttctatccaacgcttggagatagacgcggtcagtggtgaactcgtcggtgagtgcgatgaatgctgtagtccggagtgatgctcggggaaccaaagaaatccctggcagaaaccacaagtgcgagtatcgtttttttacgtattgttatccagaaattggctctagcctgataagataaccacgattatcaatgatcccgaatctgaagtcggtttgacggcccaattagataaaaattgacaaaaagccaagaacagaagtaatactacaaaaacaacaaattcggaaacaaacggatggacgagggaagggctgccgcagcgtcggaatgggaataaagtaaagaagcaacagagttgtgtccaacgcggctccggatccgaggaaaagatgggggagaaaacagaattgaacagattgatcattcatttcttcttcacaactatcccacctaacaatcctccgatcttcttcttcttggccactcctcctacgcctgcgccaaatccaaagccaccccctacgcccgtgcccttccgtgcaaccccagcttcgaccgcactaggacccggccgaccagccaaacccttcttctccagcagactggccaacgatggtgagtcatcctcggtcatagaaggatcgtattttcgctttactgtgatcgtcgattgtattggtttggattcttcgccgtcggctttctccggaacatcttcatcagacgatccatattctccgccaagagctacaggcttagtggagctcgatgggatctgcgcaaacaccgaccggaccagcttttcgtcctcctcttcctctgccagtcggaccaagtcttccgccgttagtgcccccttggatgtcgaaggatgaggctcggatagcgagatgccgactcgttcgtttcgagcgttccgcgatctttgattaacagtcgaaaacataaatatgcgcgcatctgatcagcctatattgtaacaccgtggtactccgagatcatagcccatccgacagaaagacattcgggagacggacagaggcagttgaaaagacaaagaagaacttacctaatatcctgcaatgcatccagaatgtccatctcccgcttcgcgctctcggtcgaactttccaacattttcatcgcgtcttccctctctttatccgccgcagactcttcctcatcgtcctcccctgcgtcaggcatataggtcgccttgttgtgttcatctgcatcatctcgccaggactgggagccacgagagtggacaaacacgtgttgaaatacaaacacagacgtattagctatgacagtcggtagagcatgaaaggcgcacagaacgagcagaagacgaagcaaagcatacctcgaagtttcgagacgctccatgttcggctagataatccgcattctgaggatctctgaagaattataaacatgaagaaagatcagtctctccattttgtgcagatcttgtctcggcagagagaaaagaaggaagtttgacatgatcaatcacgcgaactcacgtcttgaaggctgcatacacatgaacgcgtggattaagtgaattgtcagtatttggctcagtaccgaacaaagacacataagtcaagaaagaatgatacttactaatttctgacgaacaaagcgtgcatttgatgtagaatcgaaagatctataagcaagcaaggaaggaagcgaatgaacgaacgagtagaaagacacggtcagtggacgattcttgtctagctatgataccgtctccacgcaagccataagaagtcaaagtggctcagacagaccttgataccgtggtaatcttcaccaaggacagtttccttcctggcgttgaacttcttgcccttgtagatatattcgccacatgagttgcacctcatcgagaacggggccatcagacgaacaacttgctggtcattcttgtcctttagctttcgccgaggaattctagagattgccaaagagtcacgaaacaaaaagaatgagagactggttccatatcaagacagacaggagagataactgagcaacatactttgccgggtcgaaatctggagggaagtactagataaagagaaagaacgagtggaacaatcaggtccatacactcgaatctcagaaagatgaccgaggcgaagaacaaggaaggaggtacttactttgttgaggacctttcgctcagacatgatgaagcgactgtatggatctgtctaggtgcgggtagagggatgtgaaagagggatgtgcgtagatacgcaaagagaccagcgtccaagtcgaatgaggaagagaggcaaactacgagtgagagaagatattgtcgacctggggtagaaaggataacaccaggcggaacggtctagggttatgaaagcccagacggtcacccagatggacccccaacggccccaaacagcacccccgataggtcacggctactgcgcatcagtttgacccagatgacaccctgacaagccccagatgtcacccagatgaccccaaaagaccaatgatgtcaccgctctacggaatgtctgttctcgctgatgacgccgtttgattttgttccaggtaaaaacgtacaagaacgaatcgtttttccacattcttcctttcttcttttctctccttctctatcttgtatccatctcaatcttacatccgtctctatctctatctgtattgctgtattccatctccatctccatcctaaacacacatatatattaaattcatattcatcaacatgtccttcgctcgagtcgccctccgaactgctgccgttcccacttcggccaggcagttcgctaccatctcttcccgaccggttcgtttcgttttcttgctctttctgttcccattcgtcttctccttttcctcaatgacgaaatcttaaccataccaaactctcttttcgatatcttagtccgctttccgaactattccccgagcggttccctcatcggtgtcgcagcgagtagcctttgctcctaagcgatttgcttcaaccggggctgcctctcctgtccacagtcacactcctgtaagagcctcttcttctctactcgtttcttgtggcttcaagttgattcgctaacatcatatatctatcattcggaatctttagatgtggatcgttttgggtgtccttgttgccggaggatctgccttgtttgtctacgttaagcccatcaggttggccaaagttcccttctttttctcccatctcgcgtctttcagcctagcttattgtcttccaacgtactcttaattatatcagagagcttgctgccaaggcccacactatgattgacaccaccaaacagggtgccgaccaggcctccagcttgtcataccaggccgcttccttagccggactcggacctgcgctcgccatctcccagaccgtctacaagaagatccaggagcacggtggactttctgaattcttgaacggtatctcaaacgatcttaaagagcaggatattggaggtgccctcgctaagctcaaaaaggttggaggaaaggaggtcgagcctttcgttgatgctgctgagaacgctctgaaggaagccaagggtatgttgctctcctatgctttcatatagacaaggctacccactgaagcatgtctgtatcctcctaccgtttataggcaagatcggagacgttgactggaagtctttccttgagaaggctcaggatatggtcggcgacgagtggaagggcatcatcaaggttggttgaacgtttcttgtcatttttctatattattcgagtatgtggcctgacttttttcttttcgacctatgtagtacgtctcccagtctatccctgccactggtcctttggccatcgctttcgctaccggcgatttctcctctatcaccgacaagatcaaggagcagggtggtgaccaattgaaggagcttgaggctacggcccagaagctttacaagaaggcccaggagtacaaggatggaaagggcggtcttgaggagctgttccagaagcttcaggatggttcgttccattcttttcaaccttgttcatctgactatgcatcttattttgaaaatggtattcacgatttgttccgatttaatctctacagctgataaggaggatctcgagaaggtattgacccaggccaaggctgttgccaagaaggctggcatccctgccgataccatcgaatcttggttggccgacaagtctggcaaggtcgataccgagaacctggtaaggcatctaattttcagcgatgtctggtacatgatctcaaacttactgactcttatttgactcttcaaatctctgtctatacagattaagcaggccaagtcctacgctgagtctggagctgagaagatctctgacaaggttgacaccgagaaggtcgtccagaccgtccaggtcgtttctcccgcgttcgcctcgcttattgcccttgccctctccagggctggagtcaagcttggatcctccggacagaaggctgccaaggagggagaggatcagttcagctccagcaagaagcagttggaggccgtcgtcagcggattgaagagtgagcatcttgtctattcacgcacaacaaagaatcaagctgatggtcgctttaatcaaattcaacagccgcctccgggtccctctctggcgatgttcagaagcgagtctctgctctccaggctgatcttcagaagaccctcgataaggctccctctgcctctgccaccgccgacgccgtgaaggagtctgctaagtctggggagaagacctctgatgccgagtccaaacagaaggagtgggagtccgctctcaagaaggctaaggctgatttcaagaagcagttggacggcttggttggcgaccttgagaaggctggaggaaaggacgagaatgtcaaaaaggctttagagctcgccaagagctactttgcctaatgaggaagagctagacataaaaaaggaagacctttaccatcgtcttttcttacgtacgactcaaccttttactttactgtagtgtacgattaagctgtattttgtagtggatatcattttatctttatatctctttctggtgcccgtcgagctgggccaaatccgttagattgtatcctttgttgatacatctcaaaaaaccatcgatacatgtggccttctgatttccgaaatgtgtctcagaccgtctgttgaagagagcaacagagacgattaagaacgttagcgaaaagaaggttgcttcattatgatgatgacgcaagcggtctcataaacgcgtcgtgatattatacacttgcacacacatacatcagacgatcattctttcctgagacacttatcaatccgatccagcctcaaatctagtccctatactgtatcagaccacgacggggtcttctatcaaggtttatgatccaggatgcctcgcaacttgccttttctcacgtccatcattagagagattgctcctccagaaacggacgatctattaattgtcgctaagggactcggactgagaaagattgtttgtaccctgttaaaaatatacgacggagagaagaacttggtccttcttgtttgtctcctctttctctgctttcatgcatcgtgacttacctggaggaaagagagaggataactcatgttcattctcattgggatatatgatggcaccgatcgtgaatattgggttgagtcgggtcagattaatgctagtccagacgaagagaatggcatcggagagcttttagggatcatgggtgttcggaagcctgggctgagaaaaatcactcatgagatgccatcaaaagaacggtctgtcttctccttcatttttgcaattggatctgctggcagctcttaaatgtgtcttggatttggccgataacccaattcagaaacgaattatacctacagggaggaatcttttcaatcacctctagaatcttgatcgtcgacttgttgacaaaaaatgttccgacagagatgatcactggtctgatggttcttcatgctgaaaagtttgtgcttccgtcttcattgagtacttgaagtgtagtatcacaatgcctaacatccgggtctcttctcatcagggtgaatcaaacgagtcaggaggcgtttattgtccgactctatagacaatctaatcatgtatgtctcttgggcagacactcctttcgattgagacatcaaactttcacctagatgctcaccttttacattctatcttttcgatccaacagcaagggttcctcaaggctttctcggatgaaccggaacatttcaacgcgactatgactccgcttcagacgtgtatgaagatgctttcccttcgaagggtcactctttggccaaggtaagctatacaatcaagaagaagagagaaggaacagagcgtatgtgcttgataaacaagaataacatagactgatcaaagccactctccagatttcacgcagaagttcacacgtcactaggccagagaaaagcagacgtcattgaactctaccaacccttaacgaaaggaatgcaagagattcaaggcgccatcgtcgagtgtatggatgctactctggcggaatttcgaaaatctgcatctggggttcgtcttctactttcgatcattgttttgattgcgaaacaattcgatcacggtgtctcatgttcatttctggctacttttcttccaatacaggtggatatggacgaaatgacggtagataatgctttgttcagaaatttcgacaagattgtcagaggtcaactggatcctgtttggcatcgagtgggtccgagaaccaagcgtctcgtttcggatctcactactctccggttattactcaagtgagttttgttcgctggattctttctttaaagattatgaactgttaccaaccaaccaacccttatccatcctcaatgttcttcccatagttatcttcttacatacgattccatctcattcaattcccacctagaaaccatcttgacgtcagcaacgatcgccaatgccgcgccttctgtcgctctaggaatgaaatctaaagcaaacaatcaatctccatggctttacctcgatgcagccaacacgttgtttcacgtcgccaagcgaagagcttacattccggctcctcctaagaagaagagagcgccatcagccatcttggctggaggtcagagagaagcagatgagttccaggatgcagaggaagctctaagagatattgaaagacaggagagagaagacagagaggcagccgaacagacgggtggtgagggaggggtctggccacctggggttcaaccgatattggaggaactgcctaaatggggacttttagctggcgtgttggaagagatcgaggaggagatcgcagccttaaaaaccacaggtcaaggtgaagggcactcctgatagttcgtcctgctactcatctgaatctggctgacgtatcttttcatttactgcatatactgtttcctattacaggccaacctggaacgaacaccatcctcatcatggcttcttcagatagaacatgctctcaactccgagaatatctgacctctagagaaccaaccccacctgcgccgactaattccagtgggcctcaacctacatcgaacgttgccggtagagagatgatggaacgaatgttacgaacttatttctggtggaaaggtggtctaggggatatgagccgcaatctacgagggaccaatctggctacaatcaagtcatccaacaatgaagcggaccggttgagcgcaggcgcttcgagagaggacgtaggaagagggagaggttctattccaggtcagcctgcgttcaagaggagaagagtccgagcgggaagtgtagctgccagtgtgagtgggagaagtaagaacaaaggggatgatggaaaggtcaaagaagaagaggatgagagcacagagctcttagatgtcgaaaacatggagattgccgatttgtgagtcagaaattctacccagtcctgctctatacatatattctcaaacagaccaaccctctcgcttttctcagcctccacatgtcttctcagcagtttcaagacgaaggctttcgtgatggcactccagcacctccatcctcctcttttgctagacaaaggtctatgacccctgctcctgccttccaccgacagccatctatgactccttcgagagaaccatctgtccctcctagtcaagagagatcaatggctccccttgaaacgactcaccgaccgaccaaagtaccattgttccgtgacccttccgagggtccttcagattgggaaggtgaaggaaatatcgaatcgttagacatttattctagaccctttccagaatacccgtacgagtcatcggacgcccctctacgatcaatcactccaggaataaatcgacagtcttccccctcgcaaacccttcttcggccatcggctcaggataccatgactgaagtttttgacccagaggctttcgatgagtatttcggactcctccagcctgaagacttaattgtagttcggccctacaagggggacgatgatgatcaggtgttggaggaacttcgaccgagatttgtggtcatgtatgatcctgatcccggattcattcgaaggattgaggttcgttcaacgtctcatctggtcgaagcaacacatgatacagctatggcggtgtttacagatctgctgatttgtgatttcaatcgatttgaacaggtctatcgaagctcaaatcctggcttggcggtcagagtctacttcatgatgtatgtagactctgtagaggaacagagatatctcagtggtttgcgaaaggaaaaggaggctttccaacggctgatccgagagaaaggggtgagtttcctcctgcctatttatgatctcacatcatcgctcatccctggcattttttgtcgcatcttagtcgatgcttcttccaataacgggagatcctcgaggagcacctacagaatcgacatccaacgtcgaaacgcttgccaaaatgatcagtactcgaatggctggaggagcatctgctgctgaagctgaacctgcgactgtaagactttctttttgcttgtccattcttttcttacttaaagacctttcaccaaccaagcgcgttaataactttcccatgtgcgtgtacacaggtcatagtggatatgcgagagtttagatcaacacttcccaatatgttgcatgaagccggcatgctcattgtgcccgtcacgctctacgtaggagattacatcctgaatccagagatgtgtgtagagagaaagagtcttccagatctgattcagagtcttgcctctggtcgattgtgagtccctgtcctctcttctttttgacgatctctatgatttgcatatctcaaactggcaatctttgggggttgttgatgttgatgaacaggtacacacaatgtgagatgatgagcgtccattacaagatccccatcttgttaatagagttcgaagagaaaaaatcgttctctcttcaggtacgtctcatgccaacatctcaatcgttctcccactaacatcacgctctcttttctattgcattcttctgcttgatcaacaagtcgattgcggattcgaaacgacctacgactttcaagaaggacccgaagactgagtcggtagtgaccaggataaacgaccatgagattcaatcgaaactcgttctgctgaccctaacattccctcgactccgagtgatctggtcgtcatctccgatcacgacggctgatatattcaaggacctcaagatgaactttgcagagccggacgcaaagacggcaattttagttggcgcacctgatggagaggaggatgatggcggtggcaacgtgggggccttggacctcttgagaaacctaccaggtgttgtgagtgatgttacttccctttctttccttctcatcatcctcgtgctattggatccgtttataagagaaatacgagacttaacaaaactcaacttcttcttctccctatgcacctgtgaatccaaacagacgggaaaaaactttagacaactgattaataaggtagcttccattgagcatctgtgcgagatgtcattactcgaactagaatacgtatgttcattctttcatttactcacctcttgtaaatcgacaacgagctcatcattgtagccctccttccatcgttctgggttgttgcacttgattcagataattgggtcgacaaatgctagaacgttacataagttcttacagtacgtaacccgaattcgttctattgactgactaagaatcaatctctagaaaatggcgctcatcctgtcgattctcatgcttggtttcgttgtgcttgattcgaaaagccgagacgttcgaactcgatgaggtgctcaagtgtatattctgtatttatcataatgatcatgcaatcatcctatttgtgtaagagaatatagagaaggagataaagaagaaaatcgggatatttctatcttgatcttgaggagatctacaagatatcaaagcaagagcggtcccctctgtttcttacctgtaaggtaagaaacgaggaaagagattgacactcgttcatttacattttttcgtgctccaagaacctagtgagcatctctaggctttccgccggtttgtcatacggaaccatatggcctgctcctttgatcgagacgtatgttaacccaccgtacgttctccattcacctactgatcgatcctcgtcgatcgagtcggattgattcatataccatggcacgatcggctgctcattgaacccaacggaatgcgtccattctaaccgagacgtccattggatctgatggataaagttgcactggaaatcgtatttcccagcgtagatcaaaaactttataccgtgttctaagagggaagcgacatagaaccaggtctttccggtgtgatcgccagattgggcaaaatccattcctactttcgagtcgcatcctgtaaagtttccgacgtggggatctattccgaggaatgatctgtgggccgggttgtctaggtacgagcttatagcatctttaatagggcctataaatttggggtagtagaaacagtctttttcagctggtggacggagaggaacaagagtttatcgagaattaaatgacgaagaggggaagaaccataacagccgctgccaatgcaaggcttactcatatctgggagttaagagaaaagaaccatatcaaaactgctctaccatcggtggcatgtggtaagagatataacaaaaagacatatacgaaccatacgggttcaatccggtggcggcgaacggattcttgatccacttgtagcaaaaagagatggcattctgacaacccaacgggtctgatacgtcctcacagtattctttcatcatctctttgcatctcggcagcgtggcctgcatctgggcgcactcggagacggacaatactggggatagaccggagagagaggtgcatgtctttggttgtgtatgagagcatatgagagaaatggagccggggaggacgaaaggcaggcaggtagacaaggaaagaaccggaagagtatcaatctcatcgagtcttctgaaagaaagagagggaataaggcgcgaaccatgttgtagtgagtcaacgtcaggtcaaatcgatcctggagaaagaaaaattcgtcaatcaaatgtgtaggcaagaacacacattcagagagtttgatgaagaaacagagagagaatctggatagacgtacagtcactccattaccaatgatgacactctgtaagttgatcgggtgtttgagattcttgtttccgtctactaccgccgctccaaagagagggagatacttgatgtgcgagtacgtcgtacaagagagaagacgccgtcaggttcactgcgctcactgagaaacaaacatgatagccggtttgacctacccgtcctccataagattcccctgagagatggaatcttcgacctctgaattctttgaaggtatcgaaaaagatagcgatgaatgcttggacgtcaattgcagcctgctctgtgttggataccacctgaccgtttgatccatacgataagccgactccgatgggcttagaggggaatttcatcatgagcagaagagaggtgagcaagatgtaaaaaccatgtcgcagatcaacagaagaatgtcttacctgatcaagaaggaagacattaagattcgagttccaagcgtacggattgacttccgtcccgttcaagcttgacgagtcgacgattttgcaaggccctgttatgagaatcatgaaggaattgaccatgttctggtttcagcagcaatccgacagaaagatatatatcaagatcccacctagctcttggaacagtccagtctcactaccacatcctgggcctccctgtattgttgtggcaggagatgacgataaaaggaaaccaaagttgatcaattcagtgatctgatgatactaaacatgctatagagcaggtcagagccatcgccggatatggccgaacatacgttgatccacatcagcacatcgtctttttctggatttgatttcgagaggaagaaatagaagaaaaggtttcgaccgtgcgagtcgacgtccagatagccagtgtacgatctagaagaggaagagaaaaaacggttagatgtaagttgagcgataacgtgtctagccgcacgaaagactcgatgtatctttgttgttttgagcacagaaaagactgagcaatcagatagagaaggagaacagcgaccgacttgacgtatggatcacaccaaccggtggtctctttaattctgattctatgatcggcaaatgattcatgagtgaactgtgagccagaagattcgaccataatttgtgagatatttcagtacatgaattggccaaggccaggtggaaagagctatgaggacgaacgaccatgtgtgtttgaccctgaacgtctgtcaatctgaagtcgtcctgagcatcgtgacttgaggatcccggagaataggctgcgttggtgctggagaacaaagcaactagggcgaatgagctagaaagtagcgcacgtagattgaccatgtcaaaggaatggatccagaatgcgaggagacagagagcacgagatcaaggagaaagagaatagagaaacagttggaagcacaaggtgatggagaagtagtagagaatttgtcggacatggccggaaaggtaccatgcacgtgttgtggcaagctgtcacagcttgaatccgataagatgtggcccgaacggaactttataaacatgaaagtctggaacacaaataaagttctgttaccgggtttagagtgaggatggaggacgaggtttcagggtgatggtggcaagtgtagagtaagcggagagagcactggagggagcatggacgagatcacaggataacgcggaggaagtagatagcatgctgtagagagcgagcgcaaaaggagagcagagtggctcaatggagagacatccggtagaatgaaggaagagagagatcagcacgttttatcatcctagtacactcctaactctgcaggatggcttctccgtaccgaccctcttttgggtgtctcactcgataagtgtaggaagacgtcttctcctccttcttgcgctctatcagagagttatatatctaaaccctttctggtacccgagatcgatatccaccctgtttgcttttgtctgatttctgtggtacacacattcattttgcaatatcacccgagcttgaccgaataggaatagagctcttcataaccttcctcttaaccgcttcctctgttgggctggtcgctcgagtttcagttcttttgccaagtcgaatttttctttcgacttaaaacatcagatcttccttccggtcttatcactcaagagagttcccatcgtccgtcctgttcgtacgttatcgacctttcttactggtatcgcttcccattgtttcttctcttccttctcttcttcttctcatccttggagcctctcccacatcttgtctcttcccgatctctagtatagattgcaaggcaatttttctgcccgagatgcttgtcgaccttctgctcatcgcccttctttcgagcatatgtctggccagcccgccagcgacatcagccacgttctcgtccacctctctcatcatcatcaacaatatcctcgactacccaaccggtctggtcggcgcggccagacatggaaggctcagcgagtacctgcccgacgtttgcagaagcccgtgctcaaattataccgactgggaagctgttcgttcattatcttcttgcaacgctttttcgccgatttgtgcgcgaattccgaatatgccttgtctactggaattgaaggcctgaccaggttctctccttactctacctgcgcttgactactcccagtcctgtttagtagatatgtcacataggtatatatccatcattcttttaagcacatcaatctgactgaccgaagccattgggttctaccattcttattgatctcagtgaatgtggcctcaaattttgcacgaggcctatggcgctaagctattatagctgtgtcaattgcatgctctatgtgcgttatcttcagagcgttttcctacctaattcgcacgtgcgacaagatgcgccaaagtatctgacatcgccctccgcctttctcttctatcattccttcattaactcccaaccgcgctcgacataggttaaagacccaacgctattctctcccagacgttatgtttccctcgagacccagtccaacagtaaggtcctcttcttgctgtcgtgctttctcatgtttatacttctttgactcaattctgacgttcacttcctcctcgttgatagttattcaaatgtcctgtaggggctttggacgatcgaccgggccattgatagaattagcgtcctaccttcaaataggaatgaacaccaataatgtcacagatttcaaaccaccggacgtcagagccatcgctgtgaccgtttcctctgctagatccgagtggggatcgaggtcaaggtcgaggctgggcatggtaggtatcgggatcggggtcttgggatggagcttgctctaatctggatatcattctctctatccttcttgtgctctgtcttttggtttcttccttcctgtcctctcctttgtattgctttagatcttgcagaccttttcatcttgtacggtttgatatgtcgtcttctcgtctactatctcctattcttctcagaagaacacatataatacaaatagaactgtatccatattcatatgcttcctctacttacctccatttatcttgatctgaagtctctcctccgaagaaagagttttttttcttttctttttttccagcgttccttccttctctacttctatgttctgtcttctttgcctcttgcatcttggccctgttctgtgtagagttcgttttacgaatgatatggtgtttccttgattttcaagtggcctccacgctattgaatgcccggacagaaggcaacggaagaggaggaaggaaagagaaaaagtcgcctaaattcatttccatagtttctccccttcccatccgaaggggatctttttacacctaatgatacaaaagtttctctctaaagaaggtagaaggaagaacgaaaaatcgagaaaagggaagaagatgaaaaggacgtagggacgatcgaccatgagtctcagctttgaacgaaatcacataacttgagcgatcgacagcccagaggaacccagagtttgagaccaacgtctggattccacaaagagcctcttccttcctcttctggttgatgtcctgttttcaatccattcgagacttgagatacctcgtcgtcacgtccttctgagtactgtatcccaccccaggtcaatcagataagaatcaatcaaagcaggaaaaagaaaagtcagaccatgatcagtatcatagaacacgaagagacattgacgctcagaaacatacatgatgtgaacgacagctccatttccggagagagcatctcggtcaagagagttcaacaggacctgcgagattgtctcaaacagatcttcaggctcctataaaacaggcattcgcaaacatatgatgaacagtctttgtgagtctgccaggcgacaacagagaaacgatcacaacgaggaaaagatgccacagatgacgacatacaagatcaggctcccacagtccttcggccacaccgaagagcttctcggacgcagtcccagagaccacaaagtccttgggcgtggtgatacaaccgatcctgtagattgaccgaggcttggatcagtccaagattggacagtaaggatttttgctgagagtagtgatgtgcatgtacttacaaatcggtacaggcaatgaacggtttagggttcgggttgagcttcgtaggagccggaagtccggcaacgactggctcgatgaagtaaggaccgaatctgattcaaccaaaatcaatttccgtgttagtggaaataacttaagacaaagatagaaggatcaatcgtgtcacaaagactactcaccgcttctcgtacagagtagacgagaccagatgacagaacgtctcgggctggatctctcgctcctctttcattcggtacatgtttactcggaatcgaagggattcatgtctggcggttgaatagaaatcaagttcttagtctacttgtctcggcgcggtgtatgagagggcaaggattggagcatacagcgtgtgaacatccgaggctagaccgggaagaccgacgtaaagtcgatcatgaatggggaacacctaacaaaaatccaagtcaccgatacatcaagccggtcagtcctaacatctctgtacaatgagggttgaaaagaaaagcagaggacagaccttttcaaagttcatagcgacaagcatggcctggtttcctagccttagatctgaggcgatggccacacagtccttgccgaccatagcgatgaccgaacctgatgcgtcgacccggaagaaaagatcatcaccgatgagtacactgttatgcaattcagacaaacagaagaaccttccactcacctccgttgatttgcattgcagacatgttaggcgaatattctctatgagtgtgatgataggaatgagtgtagacagagtgaaagaaaagatgaggtagatggcagaacaaaactcacggtctgcatgtcgcgctggaataaatcacagttatttgaatacttacgtaaaccaacgtgggatacctgaataccttctccaccttccctccagacacatagataacactgatcgacacctttaaccgagtccgtctcgagaaactcgtgctgatcgataaatgcctaaaacatgaatcatcatcgtcaacatcaacatcaacatcaacaacgtatgatgcgctgatggtcggttgaacgtgtctttgagagaaaacgaccagccggtcttttgcatcgtatcaatcctttcgcctccattctgtttacccttccaccccaaagagatagcggggagtattggaaaaaaaagcagagaggttgactcggctgccttagcctaggaagaaaccgtcatcaggcggacagagccgagttataacgtttttctttataaaccctgttttttttttctccacaggatgtccttcctgtttcttctttctaccttcaacctagtcaaaggaaaagacacaacatctaatacacactccaactacttcactcacacgcacacatacactcacacaacatgaccgccactgacaagcagctttcctccgaacagatcatggctctggagcatgcgtacgttccttctttccatccaagctcgtctatgttcaccgcttacattgccctgactgtttatcttgtttgattccaacagcaagtccgctcacaactaccacccccttcctatgtaagatctcatgtcgtttgtttattccatagcttttcgtgtcgtctgacatgtacctgttcacatctttgaatgtcaacctatccaacagctgcttcgaccgagccgagggttccaagtaagtagctccttcagtctcaccggcaatccaccatgcgtctggaagcttaccattcttctgttccgtctgttgctatcgtatagggtttgggatcctgaaggtcgagagtacattgatatgctctccgcctacaggtttgtggttcctccttgtacacgttgcacatagctttgctgcgaacacaccccgactgatcacatgccttttcttgtcttactcctcacgatcagtgctgtcaaccaggttcgttgtcttggaattttgccctgtgtattcacttataacgaagaaagactaacatacaacaaaccatcacgaacatcatctgtagggacattgccaccccaagatcgtcaaagctttgaccgatcaggctggcaagctttcgttgtcttctcgagcattctacaactctctcttgggacctttctccaagaagatcaccgatttgttcggatacggtatgtatttttctttcgtgcgctcgcgttgatgtatgatgtatcataattgcttatctgtcttcctcgtttgtctagacatggttctcccaatgaacaccggagccgaggctgttgagaccgctctcaaggtttgttcttattgaacgcgcatcttctgcttccctcatcatacttaccatcacgaaaccaatgtcttttatttgttcatcagctttctcgaaagtggggttacaccgttaagaagattcctgaggatcaggccctcatcttttccgtctctggaaacttccacggtcgaacactcggtatcatctcgatgtccactgacccagagtctcgagtcggcttcggtcccttcctcgagggtgttggacccatctgccccgctggaaagggcgaaaacgaaaaggcctttgagattccgtacaacgatgtcgaggccgtccgagttgctttcgagagattcggtgatcgaatcgctgctttcctcattgagcccattcagggagaagctggtatttacgtccctgatgaaggatacctcgccaagatctctgagctttgcaagaagcacaacattcttctgatctgtgatgagatccagaccggtctctgccgaactggaaagatgcttgcttgccagtgggataacatccgacccgatatcgtcactcttggaaaggctctctctggtggtctttaccgtaagtatatcaagtattctctcatcatcaaaccacaagttctgacagaccaattatattacatctttttcaacttgatagctgtgagtgccgtgctggccgacaaggagatcatgctctgcatcaagcccggagagcacggatccacctacggagggtgagtgccttttgattctcatcgcacatctttgcacaagtcatgctcatatattatctgttgaaacacattcagaaaccccttgggatgcgccgtcgccatcgcttctcttgatgtactcattgatgagaagcttgcggatcgagccgagcgactgggtcagatcttccgatccgaaattgcctcgcttaaccaccctcttgtccgacaggttcgaggacgaggtttgctgaacgccgtggtgttcgaggagggcaagagtgtgaagggtcgatctgcctggcagttctgtctgctattgaagagcaagggattgctggccaagcctattcatgtaagtatcatcaccaataacccatgcccacttgattagaccatatgtagctgatcactcaaccgctcttttccttactctaggtcaacatcatccgattcgctcccccgttggtcatcgctgaggaggatctccgaaaggccatccagatcatcaaggagagcttgcaagagattgatgaggttcgttaatcagaccattatctccactttttggctcagcccttcctgaactatctgctgacatgttcgttctttgtcctacagatcgatgaggtccctggagagactgctgacgagcagggctacgaggctttcttggacgaataagttaccacatagaagaccggagtaatgtccagttagatcgacatcccaaaagctcccaagggaacataacgaccgaatactataatcttatatatatatgactgctgaaagaagccgttctccatcatctgaacactgaaacttgacgttgaaagatcagagaaatcgtatcaatatgacatgacgcgtggaagaaaaacgttatcgaatataaaaaacactgtcgatcgcgtctaaacagcgttaacgctcaaatccgaaaaaacagagcccacaaaatcaactcacgttaacccttcgccctttgactctaaccccttactcttttcgtctgtttgaagtcgtttcctttcttgacaaatgccagataaaccactagcttcatcgacaaacacgacgtattcggtcaccttgcctagtcgaggtcctaccgttcatgtgctgcctaagaagtctgatgagttggacctggaacctaacaatgcctgggatgataggcatgggatgggtagggggctcgaagaaacaagacaatacgtgagtttcctatgttccgccggacctgatcttgatcacctgtgggctggtcgggaactttctgtcgcgatcaaattgactgtgagagagagttccgactagatgtcttcccgtcgtcttgaacacgtcatgatggtctgtatctggtgtggttgactatcgagaagctctgggctgacagtcgatcttgatggtagtataacctagactcacaatccaccgaccactctcgacggtctctgtcgtctcatcccctctctacgtcccctcctccggtgacgacgactaccacggctttcacaaatggtattcttcccccaagaggtttcttcgcacctcagaaaccgggtgtgagcacctcttccaacggccttcacattccttcgacctcgtccccttcgactttccatccagacccgtcgacatcaaattatacatactcttcgcctcaatcgtctcttgaatacacatctgactcgatatttcggcctcaacagatacatcgatttcagcataaaacagagttggagaacgaagtcacgaacaggtacggtgaccctgatgggatgcacggctcagaccatctgccatcaggagtctcgagcagtccctctaaaggagagagcttgtacgttgcgtctactccgtcgaaagtatacggtcccgagggacgttggcgggaggtatcagaagacactcagtttggctcgagtagcacaggaaggcgagacgatgtctctggtatggatggccgatttgggagaagcattgagcttggaggaagaggagttggggttggagcctcaccaacggcttccagggagcctctaatctggaaccaaccaccgtcagactttgaaccaagtgtgatggatctttatccgtaccaacttggtgttagtagtagtaatgataaaacgactcgacctgatccagccgctcggacgacgtcctcgagacaaaagttgttcaatatcaagcggcattcagtcatgtctactatttcaagccgaccttcctctcagccgccccagccaatagatgcaaacaatttttcttctagtcatccttcgacaccactcggagccacgacgacagcgttcactgcaccaacagtcctgccgccgggtgtcgcgcgcaagcgaattcgaaagcacaaactgcatcagggtcataattcatttgcacttggcggaaggttgatcactggtggaggttctacgccgtttgcgcttcttatctcggtcatagtcgaagtagggctcggggcgctctgggtgggtacgaccggggtatatgtttggaggaaaggtgtcggaggccgaggaggtggatcgggtatcgctgtcgtaatggtgtttctgtggatgtggggagtcagtttcggagcaatgatggggacagtgagtcgatcgaacaatctggctgagagtataggtttggtacactgacatatgagacctgcttgaacgctttcttgtggcaggcatttcgagatccaggcatcatccctcgaaatttggatccatccccgatggttgcccctacggtgtctaccgggtcgctcgttcctcttcctaaggagctccgggttcgctcgggaaggtgagggttgtcttgcactttggtttcgatacaaatagtacacggggtatgtttgtctgatgtatagaaattttctacttggcagagtgactgtgaagtattgtgaaacatgttgtatctatagaccgcctaggtcaagtcattgtcgcttagtgagttgtcgtgctgttcaactggtggcaaccctaagctcaacttggcctttcatttcttcatttgatttttcagtgcggtaattgtgtagaaagcgtatgttcttgtttcgtataatccaaaacaagctctctccatatcagtacatttgaccggctaacaatccgggtttctctatcctacagatcgatcatcactgtacctacttgcatacttgcgttggtcgtcgaaattacacctcgttcatcggttttgtcgtgttttcatttctgtgcctggtctacgcaatcgtttggtcggcaatccatttatacttgcttaccaaacaggacggtggacggtcgtttcgacgagcgttgagtaaggatccgggaagcgctgttgcgttctcactgtcgatcctgttgatcgggccagttggcacattgatgagttatcatatcagggtgagtaagctctgggttggaagtaaataacgtagaagaaatcatccgggtttgatcaggaagactgatttaaacaaccttttcgacagcttatgttcaaaaactcgaccacgatcgaagaggtctgtggattttattcgtttgacgtctgactctttcttcctgaataaattctcatgtttttttcgaccttctcactcgtcatccttcatgtcagatccgtcgttcggcgatacgttcgaccgaaggatccaaaaagaccaacgtgtttttattttggcgacatcgcggacattcccgtcgaagagaccgctcagacgagaacctttatgcaagccccttcagattcgcccattggtacacgaatgtttcccggatgctctgcagaccaaacacacctagttggatgggttttagtgattgggtcgaggatacgatgtcagatggtcagaaagaatacaaagggtgatggtggaggaagaataagaaattcatattcatgttttttcctgagtcagacttgctgatgacgctgggattcgactatccggtcaagtagaatcctcgcctaatgaaatagccggcggcggaaaaaatattccacggagttttcggccgggatcattaattgccggttacaacacttttttttaatattccttctgtcgtctccgaagcgtcagcaaatagttgagcgaataggcagaagagagaagagaaagaatgacggagagaataaatttaaaagaacttgttgtttctttctctcgcaaactcttttttttcttctttcttgccacttcttcatttaacatttaagacttctgagtaactcgctgattgagatctcttaccataaagcatccccttccttcaggaatgaccaccaccgataccactcccattaccttagctgaggccatcagccgtgcgccttctccatcacccacaccgacagttcacgggcaatcgaaccagcactatgatgagaagaccagttcgtcagaaacacctgcggctttagataatcagaaagttttggttgaatcgccctaccctggaagtggaacggagcaggatccgttcgtagtagggtggttacctggtgaaaaggaggatccctacaactggtcaaacgtaagactcttgcttgttcctctctcatctgtcaatacttcttgctgaatttacttgaggatcaatttcattggaatatacagtcttacaagttcgtatctggctgaacgcaaaaatcgtctttcagttgtcgcgtgttgttcataaggacttttactccccgcttttttttcttcacgcagatggttccagacggcgttgaccgcgatcaacactctttgcatcggtaagtatcttctcccttccgatctgtactcaccctttttaatcgaatgttttcgaatctaacatctagttccaacctttctctcgtttttctgataccctgttttgatcttttcatccagcatttgcctcgtccgcttactcgtcagtcgcgcagcccgtattgtgtcctctctactcatttcgatcttaaccaagcgtggtatttccttgatttcctcatacaggggagcgacccgacagatctatgctcgatttcttgttagcgaagaagtcatcatcctcggtatatctctgtgagtgtgctatcgattcattcgcatcaacgcctcttctcaaactcaacatctattaatttcgactattttcattcagttgcgtcttgggtttcggtgtagggcctttattatgggctcctctgtctgagatgtacggtcgacgacccatctttgtgagcatgctctattttatctcctcatagtatttctcaagatgatagagtatactgatattcgtgtcgaccttcttagcttgtctcatacctgcctttcgccttgtttcacatcggaggagcttgcgcacaaaacatcgaaacaatcctcgtcactcgattctttgccggtacctttggttccgcccccttgacgaacagtggaggaacgatcgctgatagtaagttttcaccacgcggcctagatcatatgtactgtatcgacttatcgctcacggatgttgttttcaaacggtacagtgtggagcattcacgagcgaggtacggccagtgctctctttgcattggctcctttccttggacccgtgcttggccccatcgttggagggttcaccgccgaaagcggctggcgaaacgtgttctgggtggtacgtttattcacgtccctgttcattttctgataacatcacgagcatccgtggtcttaatcgttgctgtcctttcaaccacagatgttcggattcgccatggtcacctacatagtctcggcaatttgtgttcccgagacgtatgctccgacattgctccgagcaaaagcccgaaaacttcagaaagagtcgaacaacacaatcttctacatttctaaattcgacaaaatcaataccaagacaaagaaagaaatcttcaagatcaacgtcagtcttctttttttctcccatctggttgacgtcttgagttcgttcggaagttctgacctcacagcgtctctttatttgtttctgacaaatcgttcacagatgacccgaccgtttgtgctcctgttcaaggagccgatcgtgctctgtctctccatgtacaccgccatagtctacggaaccctctaccttttcttcaccgccttccccattgtcttccaaactactcgaggatggagttctggtgtcgggggtcttgccttcctcggtgttggacttggcatgcttatcggaaccgctctcgcccctgtcaacaataagatttatctccgagctacccggaaaagccccactggacgagctcctccggaagccagattgccgatggccatgctgggtggcgccttgcttccgtctgctattttctggttcgctttcacctcaacgccttccgttcattggatcgttcctatcctggctggtgttcctttcggatgtggaatgctccttgtgttttcatccatcataaattacttgatcgactgctatcgtaggttctcccttcttcaattctattacctttctatatgtacctaaattgacgcaggtcgttgccatctgttgttcacaaccagttatgtacgccgcctccgctctggccgccaataccgtattgcgatctctcttaggagccgttttccctcttttcagtacctacatggtgcgtcactattgggcctgtaacaaaagttcaaggggttaaactgacaggccaatctctgtttttttttgccctttgcagtatcaaaatctcggaaacgcctgggcttcggctcttgtcgctttcttgtctcttgcctgtgcacccatgccgttcctgttctatcgctatggagcgaagtgagtcctttccccctgttctttcttgccctcctttgtaaagaaaaaatattgacttccttgtttaaccgtttttgtgtgtattcttctgggcctacaggattcgagctaggtcgaaattttcacccaacatgcctcctgcccctcctgctcctgtcgccgctacggcttccacatctacagaaaatgcttctaaagttgctcaacccgactcagattccgcgctcgagccagagtatgcggctgatgctggactggaagaggaaaaggctagacaggcagagttagctaagaggaaagctggagaccagatcgtttgatcggcccctctatcctcatctctttgcccttcgtttttcttttcttttcttgttcatattcttcttttggtccctctcttttagacgaagcacccccaagcattttctcctttttacctcattccaatcctaatcgtcttagataaccctcgaagagttttcttcgttccacatggcgatatattagactttcttagaaaaaaaaaacaataatagcgtaaacaaattctttataattatattaatgcagtgcttcttaatatactagcgtcgttaatcatgttcttgagatcttcctgaggccactcaaagaatcgttgacttcccctgttctgttcaaaaacttaagagaagaaataatcgagtgtacgctatccaatcgttcacttctggtaagaaaaaggatcgatgatttgtgagctcttacacacttgattatcgagagacacgatatacaactacattatcgattggaatatggtatgatacaagtagagatataaaaaacaaaacaaagaggcagagagatcgaaacaagaggtatcaacggcactaagatagagcacccaaaaggtgccagaatcttctcaccatttcctcccattttctcgaatccccgccctactagacccaccaagagcagcttctgggaagaatctttgctcctcatatgctctctctctaggtgtaccccaatcagactctgtcccctgaagactaagagccggagtgcttccaccagaaaccgatccccctccattcattctcatcaattctctttcccgttttcgttttgaggcttccaccaaagctagcgctcgagctcgctcagctgtctccctttgaagacgtttctcggtagcgctcgaaacggacgaatgcggtggacgggaggtttggtttgagtgagtggtgctgacggtgttagtaccggacggagtcttgggtttgaccggtgggtgagaagagctggagaggagggtgttcatcaaggtgagcggatctctggatgtctttgagcgttcttctttttttctgggtgaggatatgaaatagatcaaaaaagaagatactgtcaaacgataattctcatagagagtgaatgacacaagacaagaaagcatcatacacttacctgtctctgtctcttctgtacttttccttttcgtcctttgcttcacctcgctgttcaggtcgtttcatctctggatgaacataccagggctcaagttcggaaatcgggcgagaaaggtacatcgtgtaaggatcctcggcttgaacctcgtccgctgtcttcttacgaggtgtttctgcttgtctaggaggctgattagaccatagcaaccgatgggtggaacagaaaacaattagcaatacgagcgaagaatcgatcaccgacagttcaattagatggaagacttaccccagctctctcttctgatgcccaaaagttgagatgacctcgttgatcccggtatgtctcctcccacgtctcgtccttcctccgaccgtgctctctcgtcctaccaccttccttgtcgattcttgtggatacagtacctgataactgtctgtctaaatctcgcatgtcatctcgcgctcttgccttgcctttgcctttagaaacggaggacgaagacggttcgggtgcatagaacggatcagaagcaggaacagaaggataatcgatttctttacgaggccgagaagatgaggaggatgaagattcggccaaaggaggatttgatccatgagcctcctgattccgatctcgaagaagggctagacgggcctcagagtcctgttaatggtgatctcgtcgataagaagagacgatcaggaccagctcagagtgatacaaccaaagtgaagcgtagatagacttacagcgagcaagacacgctcctcttcccttcttatcctttcctcctccttccgctcatcgtctctgacccgttgtttattcttctcaagataaggatggtaagacttgtggacgaggatttgtagtcgaggcattgtcgatggttgtcgcttgcgtggtggaaataaaggtgggacgctgtcttgtccggcggccgttcggtcacgtgttctggctgacattatcaaccggtccgacttgactcatacacagccacaaagcgacgtaatctgctgcggaattatgtcatcggctgtgcgagaccctgactgccgaacacagcaccatcgctcttcgccttcatataaactcaagctaagaagaacatctttagcaacgacaacaactcatacatcacccacctcttgaacattttagaaaaccatggccaactctgaatcatcctcgatttccacaaagatcggttctttgttcaacaaagccaaagattcggcttcacaggcagctggctccattccgttcgtacacttaactctgtctttgtatccttgaccaaaggtaagacaaatctgattggacactactctgtgcttttcttcttctagcagctctagtcaatatccggcgatagattcgattcaacaccagctgcgttcctttcaacagcactacattcctcttccaacaaagtcggccgatccgagctcagccgagaacaccaaagcgcttcagtgggcgatcacctctcagaagggggttgcgcttgacttcttgagcgttaaaagagatggcacgcttgctagcaaagagattcttgaatggggaaagggtctaggtgaagaagatctagtagatggtatgggtctctccactgatacgcgctgatcataaacatttgcttgcagtcctgaccgatacatgtcttctgttccttataaatcagctaccgatagaatggcgtacctctcctttatggcagcccaattatcaggcgaactcgctcgagaattagatatagccagagctcctctcaaagagcttcgaaatctccaacagagcattgaattaaaaggctaccggttggttctttttgtcgtctcctagctaataaatagtttgtgtacgagaaggctgatgtttcttcaccgttgtatcagtctgaaagaagccgctaccaagaagaaagttaacgaagacgaggttgctattttgacccgagatctgaccagactccaggaaactttgccgttaaagagacgacaagcaatcgtcaagtcgaacgagttgagctggaaagcgtataccgaagtaggccccagacttttgagattctatctctttattttgcagcaaactcactcgtatgtcattttgtccctaccagtattcttccaagcttctgctcttgtcgcatgcctcctcttcgcttattcctactcttgcatcaaacgaatgggacaaagattttgcttctcacgtccgaagttcggcccaggcagctctggacaattataaacctggaaaatatatcaacatcataaattggccggaaggtgagcaatctctttgtagaatgttgcaagctaaacctcatcatactgacctggtctccacgaatttgtttcaaaagctggcttgactccctcattcggcgagactcactcagaggagttgtctttaatctccagagatcctcactcaggaattgcgacaaccacccggtcggactccctgccttccgatgtttctcgtcagcaggctcctgctcaaatcccgtcgtccatcaactcggccgcgcagagcgagaatccgtttgaatcccctctcgatgctcctcggttacggactcccagtcctcctcttggcaccggtcaactcaacttgaatctggttcagcttcccgtagattctgcaagatcgtcctcagctagctcgtcttttgacgtgaaggggagtcagcatgaggttggaacccaggaaggactatcgataggaaaaggggttgcgcccacagtggccgagactggggtgccactcatcggaggcggcagtcagtcagggtcagcttcagggagattcgagaagagagcctcctcgggacatgctagagaagagctggaagcagcgagagcagctttaaatattcctacttcatgtgtaggtattactgtctattttcttgcgcttgtgatggtattcatcgatctgacaccatgtattgttccattggtctctttctaggatgaacatcactcttcgttcacctttacagattcatccgcgctgtccacctcaaacataccgacgacggtacccggttcatttcctgctggcgcggtgacagatcagacggattctatcgagactcgcgctcgagaggagagaatcagacgaggaagtgagactgaagacgaagccgcagcgaggaagcgagaaagcgatgcggaaaacaagcttcctgaatactctgtatgagcttgctgttggtagacgatctctgtttctctatgacccattccagtttttcaatcttcattttattgttgatgcaatcacgaacaaaggacttttctttcttgcgataactctactttagtttacctctcttttgttttttcttcttcattgcgatgcattctgtatagctttctgagtatattgataggatgatgaatgcatgagaaaccgaggtagcggtctcccgcgccttcgggccgagagtgatcggtgtgctcgcgatcatggccgccctccacatctccaggtgcagcccaagcgtctttaaatatacactccagctgacatatatcagttattcatcgattgctcagtatattttacctacacccatccatccatccatccatccatccatccattcatccatcatcaaatcaatcgttctttttggtttttgttcttggatagacatcaccggatactctaactcatcatccgttagtcgatttgttcaaacatcatcaaaacaaaagagcaactttcgctgatcgggctccaccgatctaactcttcaaactcaactcggccttaaccaatagttcacctcaactcacattgatgcagtacacaattgtgccagatcctagaactaccgtcccacccaatcccactcatcgggcagtgcttgagaacgcagtgattgggagagccttgggatcgcctcagacaacttcaacttcgtcatcatctccaacatttggaaacagcggtaccggtgtgggatatggcggacccagtgtcacactattttcactcgtttgtcttcattttctttctcaccccggaatctaccatttctctttctaatctttcaacagaaattacagagatctgaacaacttttaatgtttttctatttttgcataacttattttcgattgtgaccttggggttactattggtgtcaaattattgacctgggatcggtggttgcactgattggatatcataatgggtctcataggtattcgtgatcgtaggattattagtggtagcagcttcagggttcgccacctcttcaacaccctgaatgtatctcctagaactcgatcgagagctcacctttttttatgtttctatttatatccaccaatttgatcggcgattcctaccttgattcttttctcctcacagcactttccgattttactatgttcgtcggtcaagatcccgaatggcagcttttcttcgctcagaagacgaaatccgattgcaacgtcggcaagattttctcgctcgaggaggaggtcgtcatttatggggctcgatgaagggagatgattatccaaaagtgaaaccggtgatgtgggaggcagaattaggatcaggggaaaaatcagagtttgaagggttgagtgtggttcgtcccgagtctttggtcgtcaaatgccaactactgctgcagatcggtacatgcgaaagtacgagaacactaaaaaaactgacttatatttgttgattttctttagccgctttcgttatcgacatcagcttcatcgtctacatcggccaacaaagacgtctcctctctatcggtgacagaaagaatatctccacccaatcagctcactttttccgtatttatcttacctccccgacctccgcttgatgaatcgaatccacctcctattactcagactggagaggaggaattgccagagcttgaagtgggcgtcacccggatctatatttcttaagaattatcttttggttccacgcgcatcgttccatcaccgacatccgaccctgcttttgtacccttggcacttttgatacctgcggttatctttttttctctcgaggtctgtctctaagccttactgcttgtttctatgccctatctttcattttgaaacgctagcattcgatccgtctgtatctcatctttcgcgttcacttcacgcgcatgtgggctttgcttctgttcttcttcgtctttgttcgggtcgagaaccctttccatactgtattttgaattctttacggctttcccacgtcctctttctttctttcttcttggtataccaggagatctctatttatacgttatattctccagtcttaatatatttgtaccgataagcccttttcatttttttaatcttaaaaacgttgacaggcgtgaaaaagaagagtcttttgtgcaaaggtataatcttgaaagactattgggtgagattatttgacgacttaaacagtaccgcttgttgatgacattacatttctatctatacaaacaagacctggaagtgacctttttctaatttaagttttggattagcaaagacaaatatttatggagagatgtgcaaatcatagtggagagcatcgaaggaagagagatcaaaacagagaacggaaagtagtttaaacctttgtagcggtagcagtggcggcgctagtaaagctgctgatcttgacagtagaagtagaagcagagacagaagccggaacagaagcagcagatgcaacggcagaagccgaagaagtagccgaaggagggtaccaggtgacaggaacggtgatcgtagcaggcgatcgaacggcggtcgtagggttggcagtgcacttgggcgcggtagcggattgaccaccggtaatcaaagcctgggtcgcgttcttgtgtctatactcggcaaaacagtcaagcaaaaatatgagaatcatgagtgatagcctcgggttgaggaaatagtcaaagtagttgcagtacgaacccgacggctttgataaccacaggaacaacacctccggtctgaacatggaacgcttggtggttgatggcagtgaagaaggcactgaatgaggagcggaaatgagacaataataacaagaaaatgaattttttttagcttttgaaagataaaatcagatttaagggagtgatcgtcagaagcagagagaaacccacgtgatgacaccggagtgggcggtgatggagatgtaagtagaatcatccgtagcaaagatgttgttgagcatctgctgaattcgcaaagcctggatcacccgggtctcttcgtaaactgggttccatagctgatcttgctcggtgaaggacggctcgatgtcccatccagggtgtctagcggcaatcgcagtcttgttgcttcgcttgtcgcaggtgtgaaggccttttgaatgacacaacacaaaggtcagtcaaggaattgtcagcgacgcatgaacagacttcaaaaatatggaccaaccaatagtctctcgctacaatacgaaaaggtacgagtcaatgttagcgcggagatcaagacaagaaacgagaaaagcgcaacatagatgtcgcgtacccagttctccttgacctgcgggacgtaacctttgttcaacaggatatcatgcctgcaataggtagatcggcatatacggttgtcagcgacagaggatcttttgtagtatgagatggagctcatcagatccaattgcgtggaataacgaaccaggtgatgttgagagtgtccatcgatcgggtcataggactcgagtagagaacctggggaagagggatgtcccacttggactcattcttccaagcggcattgaccgcctcagcttgaaggataccggcgggagtgaggtgagcgtcgggacctgaaggtatatacatcgatttaaagaaagagattgattaagaacaacgtgatttatacatgggaattggacgaagtaaacagaatggactgatcagcctcaccccaggtctggtttccatcggtattcaattgactgaagactgaaatgtgaagcatcccgacaggtgatgaatgattagatgcggtgtagaagacttcaattgagagattgaccgccgagacaagaacttacagcaatcccaagcagcatcaccataaaaagcctgggcctggttgtggtacccctctccgtgacgagccatgtagatgactttgtaggaagttaaatcatcagactcctgattgagctgatgaatctttctggtttgttcgaaaaacagataccaggttagcttaagatttcaatagctaagtgcttggatccgatggaaaacacttgcttttggaagtttctccatctgtccttagattggtcgatgagtccgaaggaagcattgagcgcattgtaatcggtcgcattgaaagtaggtgaatcctatcgtgacgatcaccaagacagtatgaaaaattgatctttagtatttgttcttcgatgtgaccagattcatcattgttagtacctggatgaaaatatccgatacaaccgagtagttggtggctgaagggaagacagacaatatgtcatcaattcttctgcccaggtcgaataatcaagaaaaaggaaaaggaaaggtaagacgtacgcgcaaacaagctggtcttgagatcaagtttcctatccacaagagctgcggcatggacagttgaaaacgcagtagaagccacaagagccgcagagatgatggtgttggaggagatcatcggatagagagagattgagacaagtaggtgttcaattgagcgagtgagtaatgcagacggtaactttcagccttctgctttctttttaaacatctgtgtgctcatctttttcctctctccgatttgttcatgacatttgctcattggtctttcccaactcttgaatcacagtctgatcagaacgtgcgaacggagatcggactaaagatgcggaggaaagatgttgaatagccagtcaatagagagaaaacacgtgggttgcaccgctgacaacacgttcatatttgtcttggcaacaccgggccgaagggaacgttatcggaccggaatcgtccgtcttatgatatttttagaacatcacgcgatggtcgtttggtctatcaagaaactagctcaatatatagtacaaacacagaagatatgtccattactccaaccttgtgtggatacggatattgtacagaagtagtttttttttcgagacagtatgaaacaatgtcattcagaaataaggaaataagattgaagagggagaacaacgtatatatctgggcaaacaaagatccttagaagacaaggaaggtcattccgagtgcaaacgctcccgaacctaccacccacaaaagaccaagagcctttttgtccgctccgctctgattgctattattgccacttgatgaagtcgtgctgctattaccacctgagctgccgctcactgtcccgacggaaggtgtcaaagaggaagagttagatgaagcccagatttgagtagcgatgtaggcgtgcgctttgaacggattgttgtacgtctctacagtatgagcgaaggtatagttcgcggggcgagagatatattctattttcgaaacaggaaagagagcaccatcagcctgacaactacacaagcaagagatgaagaatattcgtacgtaagaactgttcaggcacaaatggagagagatgacccctcagtgcaattcctacagtactttgaacgagaagtggaggcggagaatcggtgtcatttgttaaaagagtgttgttcaactccagatagatcgcactacttgttgttgcttgacctgcttcaaaagattgaaactcgatggaagaatctgtggtgatcataagtaggaataatgaggtcagaatcaagaccacatgcagaagcagaagtagggcacgagtgatggaaatggctcactaggtgtaccggtttgcaccactgtggtataattcaagtattgagtgataaactgatactcaacaaaggcatcaaatacttttcgaacagtctaccgccagagagagtttgtaagataggaagacagatacacatacagatgtgaaactcgcgcaagcacttccacacgttccatctccatatatagcgacgtctgcaggagagtagactgggctggacgaccgtgacagataattttggtatagaacatcacgtagtctggacacacgacgagcatatcgcacaacttcagacgaactgcatctgagaggcaactatcaaagcaaacggcatagttactcacggctgagatgtctttagtgtttgaccattttcaacgatgttaccctgaacagaaaagtagttaaaattgctcaacagatcatttccatttgccgccctgaagttcaaagggccatatactttgtacatgtaaggattagctccgagatagaaactcatcatgggtagacatgagttatatagaatgctcacatccggcatcggcttgagggttttgaatatgataattcaaaaacttctctgctaagggagcagctctcaagacgccctcgaagttgagatactcctgatacggtgttccagagaatattgattgccaaactatgttcaatgtgacagatcctcctccctattttgcgccgaatcaggtttgatatcaaaggagacatggccaaggagtggttactatgacggatgatcaagagtttgaaggaaatgaacatagacgtacgttctgcgtagtatcaatgatgacttttgtcacgccagcttcagtgaaattctacgatgggtcgcaggtttacaagatggtcagcgatatcgatatgtcattctatcaaacggaagaaggcgcaatcgagtacctgaaatcccaaactggtatcctcgagaaactgcgaagtacaaccttcgtctggttcgaaggtagccaactgtgcaattgcatcaagttcacagaggaacaaatgtttttctttgtcagatcataaccttatagtcaattgtttctccagcaagcctggcgtcgtgaataacttacgaagatgacccccacaatttcgttctcaacactggatttagacaatacgaagaactggacattccttccccctagatactgtgcggaatctgaagagtcgatcaacaatggcaaataagggctgctgggtgcctcacaggccgatgacgtctgacgtttgatcggtccgttgatggaatgtggaaagatagacgtagggtttcgggcgtgtgcgacgtcttctttcgagtctgatgcagttgaaccagtagaaagacaattttcttggaagaaagttgaggtggatgcgtaagatttatcagaaatggctcgagcgaaatacggaacctatcttggtgacatgacgaagatgcgcaaaaggcagagaatgtcatcaaagatgtcagatatcaagttggcgaattcaaatctagatcaagactgacgaccacctgcttggagccagactctgttgagatctgaaacgtgatattatctcgctctggaaacgtttgctgtgccactgaccccaaggtccgagttctgagaagctcagccagttgagactcatatcagcgctgtggatgatgtatgtccaacatacgtttcacataacgtaacagcaaaaggtttgagagtcaaggcttacattgttgagccgacaagagtatacgaagccatggcagcattccgccgtacctggatatctggataagttccagtttcgttgttggcaatgtagtcgatactatccaaagcagaatcataccgtgatttcaatccaaaacatgttttgtcagtcctcgaaggataaaaaacatcattttagaaagattatgagaacctccttgcagaagaacgtacaatgccataggctccatcccgtcgatcatctgtacttctgcgcccgacagctcggtgatgtttatcccctgagtttcgtagagatccaagatattttcgaagtaaatgttatactgagccgcaatattattggatccaggagctatgtagatttttgtatcgttcgctcccaagctcgaggcgagcgcaaccagcgggaatggtgtgaacgagatgaaagcgttagaataacatgaacctacaaggagtgggaaaccaatcgacaggtgaactttgtcagcgagagatttttgaagcggaaataatgagaaaaatagaagatagtgatgagaggttcactgtagtagtgatggccgtcgttcaacgagttgaacacagagtaaagatccctattgaaatcataatcgcatgagtacgttgcgtttccgatccggcttagctcggctctaaatattgagtcgaagtaagatagcgaacatataaagagtcagtagcggccatgtgtatatgagtatgatatacgtgaactagaagaaacggagaagtaggacgaaccgaatattggtggattgattgagtggcaacgattgattgagctgctcatactcaaagatctaacaaacatgtgcacggcatatttcgaagtgtatgaaaatcaggatggtcgatcttctgcaggatgtccacatggtaaaggcttacatccagattatatatctaagattttggtatttcaagtgagagaaaaacgagcaagtgctcttgatcagcagatgagttctgttgcagtgaccatgatcatcattcaagattctgatggcttgaaagttgcatttttcaccttctgaaccacatcaagaacattctgacggacgacatcgtcgaaggggacagacctaggatgagatggcaagttgaggcaatcaatgtttgcgcagagggttcgagagcccaaagaaattctcacttcagacaagctctagcctgggccacggtgaacagagtgttgttggtgcttgccaatgttgcgcatggatcggatgagacctgccgtttctgaacgtctggcagggactccagcacctgcagtgatggacctcctagtccggaatcgggatagagaactcccgggccgtgacgaaagggatgtcgagcctcggacgttgaagcgagtacttcaagccacaagagggtcagatacatcaacatgttggttgctgacaatgccgagtatcttcacaattcgagagatgatagtttgttcgtttgaggagatcaaggaagagaatcgataccaaccgatcgtatgaactgtgtcaggtcatacatatatagtcggaatagatcatgcctgaaaccttttacttaacctgtgacttggaaggccgagggcttatgccaattataagtccttctgctttctttggttccatcccggaccatctttcttcctccttgttcagttcaaatcagatcaaatcatattatactaagaggaggactgatctatctacggccgacagagaagtgtatcacctcctcagtgtctttcttggacatggccacagacgttctcaaactctggcccgcttcggtcctcatattggctgtgtttaatcctgcaacctctggggtgaccacatgtatgtgtacaggctgttcaggttggtacttatgcgcacatcatagactgcctgacactctctgaagcgcctcacgtatggttctattaccgacatctataatctctctgttgtacaatatcgatagacgtcctccatccacattggtcttttttggcttcccctttctaccaaagtctttttgtggcaggtgcgcgatcagcgactcttactttccaacatgtctttatattcgtcttttgcatcttcttgtctatttctctcatcttctatctagacactttcgcactttttcgaatagtcattacagcgccgtctccaagatcgacatcacttgtggttcttcgaaggtatgcatatatggaccagactcaatgtgcacctgccagtcctcgatatcgtggttgcgatgacgtgtgagaagtgtaaacaaatggttacatcgcttacggcttcctcataaagtcatcattcagttctttgggtccctcttactaacatctcatcaactgtcagaaaatcaagatcaatacaaccatgccatatattgagatcaaggagcttcaacgtatggacatttggtttgaactggccattttaaaacaacggacgctcgttgcaactgataccttgttctccgtctgaccaaaatagaattcaatcgagtcttgagcgaaacctcggccgagaaacttgtagtgattgactttcatgcaacatggcgagtctcaattgctacatagagtgatccgaccccgagactgatgaacctcttttggtttgatacaggtgtggaccatgtcgtgcaatcgcccctgtatacgaacgattgtccaattcggttttgcatgcaacgttcctcaaggtacaccgacacctgcctatgcctgagcagacatgaacgtctgatggacacagatgggctgactttttgagcctttcctggacggtcccttttgattgattgttcaaacaggtagacaccgacaaagtacctgccatcgctcaaaagtacaacattagagcgatgcctacatttgtttttctcaagggcggaaacaagattgatgaggttggtccgtttctgtttcgcaaacttggagttatagatctgaaagtctgatgaaagactactatctgtatctttctttctcaacttatctccctggttctttaacacacaattcaataccctatgatcgaattggaatcatccagctcaaaggcgctgaccctactggattgacagaaaaagtcaaccggctggctggtcctccgccttcctctttcgcttctggatccaaatcatccagtaaatctctcaccgaaggactcgtacgttctttgagattatacatatgtgtcaatctcaagtcgcacggcactaacccacatatcctctgatttctaacagacctctttgaagccggtgatcgacagcagagaacttcagtgtctgaacgaagtcgatgatcacacactgaaaggaatattaggttcggatgccaaagaagggaactttctcgaatcggatgctgacgaggtgggtcattccgtttctttccgcaattatgagcgtcgtccgacttaccacaatgctattctttcatctttctgcagcaacttttgattaccattcctttccttcaacccactcgacttcgcgctcttgtcattcgaaccgatccatccaagcttgaacttgccccaaaacgcctcaaacttttcatcaatcacccttctctcgggttccctgaagctgaaacgtttgctccaacccaggagtttgagctcacatcgaagcaggtcgaggaggccgaagggactgttcgactcgatctcagactcgttagattccaaggtgtaggaagtttgtcgatctttgtggttagcaacatgggaggggatgaggtgacgaggatcgatgggatcgacttgtttggagaggtcatggagggtggcagcaaggggccattgcagaaagtagaggactagatcagagagatctcgagcaaagtatcagttaatcaatgtctatgtttttctgacactgctatgaatcaagatcctttgtactcggcgatttacggccactatgtgatggaactcagtttgtcgaacattgacatcatcagcgcaagtgatcggaagaacaggaagaagactatgaatttgttgtattagaaacactacaaatttaaatttgatcattaggattttcacctgacaatattcccgatctgtccgggcctttttttccgtccagtcatttctcacttttttacttttctttccactctttcttcttcttctcatcatcaaacaccaacaccaacacccacacgccatgtcacctcaacactttcttcccctgctcactccgtcgagtgatgactcctctattcttgagccgctttctcttttaggtccgatcttgactccaatagcagaactcggtcaacttccagcaaacgcatccgcatacgtgcttgctactgccaaggataccgttgaccagctgattgaagttctcaacaacggtgcccacaaagtcgtcgtctctgccgagcaggccatcgagctcgccaagtccgtgtcaaaggagagactggtttctgttgtggctttcacggatgttgaggccttgaccgaagatgtcaagaagagtgtcggaggtttcctcgtcaccggggttgctcatgtatgtgctcttacatcttctacatttctttggcgtgcttcatggatctttatatgagcttcaagcttacaagtcatctgctccttactcctcacttctgatctctgttctttcgttcatcacgccgacttggtcatcgctacaaaataggccaatgacatcctcgacacccttgctccattcaaaaacactcacactctcttccttcacctcacgtcggctcctgttccttccgagatccgattgcttgtgcagaagtcgattacccctgtccttcctacaaccgtgctatcagtctcgacaaactctgtccaatccaaaatctctattgcctccgccttccttgcgcctctcacgagcgaccgaccggatggtttgttccccacgttcgtcacctcctacgctcactcgaggaaaccgctcgggcttgtctactcatcgatcgagagtatcaccgagtctattctgaccggtcgcggcgtgtaccagtctcgaaagcacggactttggcgaaaaggagagtcttccggggcaacccagcaggtggtctccattagagccgactgtgactctgacgcggttgagtttgaggttgtccagaccggaaccggtttctgccacttgggaacttccacatgtttcggcgagggctctttcggtggaattgctgcgttggaggatacattgatcggccgaaaacaagacgcacctgccggctcatacaccgccagactgttctccgactcaaagcttctccgagcaaagatcatggaggaggccgaggagttgtgcgaagcaaccgagaagtctgacgtcgctttcgaggcagccgacttggtgtacttcgccatgaccaagtgcgtccagtccggagtcagctggcgagatgtcgaggccgcgttggagaagaaggctctcaaagtgaagaggcgacagggggatgccaagcccaaatggacgggagagaagaccgatgagactcctagggagcctcaggagaagccggtgctacctgctgctgcgccccctcctcgaacaaccgttgatgatccggacgcacccatcaagatgcgaacggttcctgctctctcgtcgctttcagccgaggagtccgccgctttgcttgtccgaccggtgctggattctcaggccatgatggccaaggttcagccgatcatcgattctgtccgaaacggaggcgatgccgctttgctcgaccttactcgaaagttcgaccgactttccgccgatgcacctgcctcgaacgtcatcctccctcctttcgctgaggagctcatgcaaatcccggaggacctcaagcaggcgatcgatgttgcttatgagaacgttcgcaagttccaccaagctcaggccgaggacgaacctctggtggtcgagacgatgcccggtgtggtttgcactagattcgccagggccatcactagagtcggtgtctacgttcctggaggaacggccgtgctgccttcgtccgctatcatgttgggtgttcccgcccaggtcgctggatgctcgaccatcgttctggccactcccccgcgaccggacggaacaatttccccggaggtcatgtacgcggccaagttggtgggcgcgacctgcgtcgtcaaggctggaggtgctcaagccgtcgcggctatggcttacggaaccgagagtgtgcccaaggtggacaagattgctggaccgggtaaccagtgggtgacggctgccaagatggttgtccagaatgacgtcaaagctttggtcagcattgatatgcccgctggaccaagtgaggttttggtgagtgtttctctcattggtcttgtgttttagtattcgtgttcattaaagtccatttctaactatccgctcttcatctttattcgttttctcttcacctcaaaggttgtggcggactcgcaagcgaaccctatctttgtcgcgtccgacctgctgtcccaggctgagcacggtgttgactcgcaggtcgtcctcgtcggtatctccctctcaaagacggagcttgctgctatcgagcatgaagtcgacatccaagcccgagctcttcctcgatgtgagatcgctcgaaaagcgattgctcaatcgattatcgtgaacgtcgacaccagagaagaggctatggcgttcagtaacgagtatgctcctgagcacttgatcctccaagtcgccaacccggcggacttggtggcagacgtcgtcaacgcaggaagtgtgtttgtcggtgcctggtctcccgaatcgtgtggtgatttgggcgcaggaccgaaccacaccttgcctacctatggtttcgccagacagtactctggtgtgaacacattgactttccagaagcacatcacttctcagcagttgtctgaagatggaattagactcctgggaccgtcagtcgttcgaatggccgaggctgagggtctggaaggacatgcgtcagttgtttcaacctttattcaattgttgaactctgttggttcaattgctgaactaaacacatatcttgctccttcctccttgtgaccaaaacagtaatgccgtccgagtccgacttgcgcacctcaagaaccagagttaattgaccaatctctcctcctcttcggttgctgttttatctcaccccgttcttacccctacatctaatcttggtcatcactttcgtctttcctgcttatcataactttatagaaatgcttttcaaaccctatatcctttgtcctatccacgtatctttctacgttctcttctctttccattttacccccacatggtccttaaagttagggaaggtggatcacacgattgatacgccacaggcaacggaggaatgggcaacaaaagacacataacgaaacgaaagtgggagcaagaaaacaagagtttttcgagacaaatgacaacttcagaacggaattcattgaggcaaaccaccaaggtttggaagtaaaatgtccgggtgatatgtatatagtgatgtacgaggatgatacagcaggagaagactatcaagaatatctaaggcaaggaaaaattggggctaggctgtctacgagcatctcaaaacggaacgcttcccatctctcctgtagcaaacaggtcctcatcgaaatccacctgatcctcgacatggtcgtctctttcctcatcctcatcatcgtcctcttcattctcttcctcttcattctcttcctcttcatcctgctcccctccttcgcccgcttctccctccccgtctaactcaccttcatcctcctttccctccctaccttctcttttgaccttggccggcctatcacctgtgcctctgaatcgctgagaactgtaaaagtaactttcttcctcatatgagtttggtagactgcccggcatgctgtctctcctcgtcctgtacgttcctgctctctggccttcatcctcgctgtattcatcatccgatgaccatcccggacccgttaaaggtgagacaggcctagaaatgttcgttccgtggtctccatccggtttcttatgaccagtgttggtaggggacgtgggcgggttgacaggcgtagctgaacgcgaacctcggagagagcctgtcaagtttcggaggacactaagtcgaccggatgtatccgaacgagcggatagagctggagaaggtggggaaaggtcaggaagatcaatgtcgcaggggggtgctcgccaaaagttgaagtcggtgaattctggagtccacttggcgtgcacggacgggaacatttgatcgaccaggtcgttcatgaagatgtatctatagaaccaagatagaaggatgagcttctttgaatcaacagcttgtattgcacttgaagaaactcatgaagatttgtgtccagccaattccaacaattctgtctttacctccccattcgaatcgatcgtgaatattctcgaactagggatgttgatacttctatacgaaagcgcatcattgatccggtttccaaaaccggcatagaacgcgttcttgtgactatttccgaagagacgttgaagatctcgaagacaggccattttgaatacttccggcttacgaaggatgacctctctgtgataagttggataaggacaaagtcagtttgtcaggttgtgaaagaagcagaaatatatcaagcagatcatggctgaccgatgaagggaagtcattagtcgatcagggctcatgatgaccggtccttcaggaagctgataagacccttgactgatgttcttcaagtaatctctggtggagtcggcttgtccgatagcccgagatgtaaggtacataattttgtatccattgttgctgaattttaaattattgataatcgagagcgaccagaagatttagccaattcagcttggtcatgttcaatcacaatcaacgagggttattcaggccaataggaggtcacttacactatgtctgtgtagagcttggcgactccagtatgagtccaatccctgcctacagcagcaaatagatgacctagcgcgtctgacctgtgaggaaacaaacatggttagacgacaacccgtattcagatcgagagctctcccctgaagattatgaagagacatactttgtgattgtaccatcgatgtccgagataacgatatgatcactcacgtcccagaggaagatccgagctgcgcaggtggcgactccggagtaagacgatgtaaccgaaaatgtgatggtgtttgctcccttcttcagattgagtaatttctaccaaaagaccacaagtagagcaccaacagcaaaagtagcgtatcagtaaacaattgatgcgtatagcgtgatgcagcaattcttctcaaaagtcgtcagaacgaacaagttggtctgatgataacctgagggtcttgacgaaatgctttgtgctctcctgctccgccgacacgggtggcactgttgatgcagttaatgacgcagccgaggagggggtcacatccggcggtggttcctaattatcaggtaacccacagtaatttgattaaaattgagatggtcaaaacacgggagtgcaaaaacaaattggacgcacggtcgaagctctgctacttctcgaaggcgttaaaggtgccaagttcgattgtgttgctgtatcttggctcaagcctgatggctcgtcctcatctccgttctccgtatggcctttgtaaccctccatatcgattacgacatctgcagttacaaaagagttaggtttgacgtatccatcggtcttgagaactcttctgcgaacgcgaagagtaaggagagaaggacttaccatctccatataccacatcaggcggttttccctggccactcttaatctcaggtaaaagatcgtctccaccttcattttggccatctccttctcctcctatagaactttttgcttctctgttcatctctcgattcaccccaaaaggatgacggatactatcgtatgcctcttcgagttgctgctcagccttgatttctgaaacatatgacgtaaggtcctgactgtgcgtgttgactgcctgagcaatcgaatgagccgtggtggatgctttggaaagcagagatgacggcgaaacggacaagccggtaagctttgtaggggatgtcgaagacggtgaggaagccgagaggaaatcagaagaggaagggttggttggcttggactcttggtaggaaaaagaagatgtagatgggttggaataactactctgaggaacagatggttgggatgtacttcgggtaggtgagaggggtttttggggggataattcggcgaaaggcgcgcgaggagttctctgggtcggactgagaggtggcgagggaggtggagacgggtagagggctggagacgttggatctgaaaccgttcctaaggagaagcataaacccgccaagatcaaggatataccgacgcataaagattaatactgatttcagtggttgtggaccgcggcgagataatcttaccatttattgtccaagcgttcagatctaaaaagtccggctcttccacgacatcttcgttgtgagcgtttgccacatcctccattgtagtctggtcgtctaatactccaaagcgttcgctattcgatgtatcctcagtactatttgttatgtccaatgacacaatagagtctgttttagagtgcttggggacgccctcgacgatagtttcaaggtctgtggtgttggttggttttttgttgaccttgaaaagaaaaggccgttcaagtcattagtcagatagaatatagtatagagttacaagcgatataaatccagccatacctctgttgctccaagcagcgggctggtgagtaagtcgtctgggacggcttcatccgtttcgaccacgaaaaacgcctctccagcttcaccaactttcatgaagaagggtacagggtgagagttgactgtaagagtcaccttcttctcacctgcgcggaggacctgaagtttgccgaaccgaacatgaaacggagaacatgctagaacggtgctggatgacgacggagtcgactaaaggagaacgagagaacgaataatctcatcagtttcttttcaagctcttgatgcaaaagatttgatgacgacgcgtttgatgtttcgagtgctaaactttcggctatcaagtcttcatcttctccactatcagcagcggtctactacacctcaacacgtttattggacgatcatcccacgttgtctacgttgatctatcgataaatcgcgttcccgttagagaaatcaggccggattgatggattaagtttattgaaagaccgaacagacacatctaaacaaacatcgcaagctgttgtcgcctgtgaatgggttggaaagagtgtgtcgaattggttgaagaacaatcacacttatttgtgaggatttggtccgaaacatattcaccccaaaactcatgacgaagccttaagatctgagggaaaaaacggaaaaggagcggatgtattccctgaaggaggagaaaggaacctatcgtctcacctcatcttccctctcgacaacgattacatcaatagctccgctcaacgtagccgggttgatcccagagtagtattggtacgccctggagaggtactataataagcgagtgcaaggattgagaaacatagcatacgtaatgagtatagatcagccaacggatcggacaatggtatgtgccaagcaacaacagagctctctacctgcatagctgccttagggagctcttcagtaaggtgactgtctgatcagagtatgcgagtttgatagttgatgtgggtgatggaagatgagcgggagaggcaagaaggaataacacgtcggatcgattagttggggtcagagaaccgtcggtctacaccggttactcgagcagaggttacgcttacgacacaggtccgaatgtgaagggatcgttatcttatcagtgatgtcacgtgcagtcacgttccttagctttattgtaacccaaacgtaatctatgggttgtcgttcttttcaccttctccttctcacctcaaatccagtcctttccagaccttacctatttgcaaacagacaagcacgatgagtgaacctaccgcatcaaagattgaggacatagcctctgatgcagagtcagatagggtggatgatgctgccgccgacaccccgtcttctgcggctgatggcgagaaaaagaagagaaagaagaagagcaaaggaaagaaggtcgccgacaagatcaagtatgtgataatatgtcgcgctatgttttgttcttgaaagtctatgccaaagctagtattcactgttttccttcaacttttgttcatgatccttctacagatccgccctccctggaggagaaaaagagattcctggagctatcctgaacagggtgatggaggacgtgaacaaacttcctgaggctgaacgagagcattgtgagtttctctttgactctgcttgtttctctcgtctggttatgtccatcgatcagtgagaacatcattttctgatcaggtgttcttttcttcttacagtgaacgaggacgaagtccgaaaggcacttcaggccatgaagctgatggacatgcttaaaaacgagtctcagggactctccgtgaccggaaagaacaagaaagacctgggcgagcataaggtaccttcaccagaacatttcacaaccctcacattgtccggattcttcttcaaaactgacaatattttttaatagttctggaaaacccaacctgtgcctcagtaccttgagaatgggcaagaacctttgaaggacggccctattgatcgtaggtgttcattctgccttaagcttctatgatcggttcatacttatccttgtgtcgatcacgtcttctctttctagctcctaagcaagtttctgaactcagacaaaccccataccctctacccaaagactttgagtggtccaccgtggacgtggatgatcaaaatcaggtgtgcaaagatgctagttatttgttgagatgtttgttgaaactcaccctacggcttcctgcgactcgacaaaactcagctcaaggaggtatacgatctgttgtctgccaactatgttgaggatgaggacgcgacaatgaggttcaactacagcgccgaattcttagactggttcgtctacacttctgttatactcggcaggttcagctttctcaaataattgcatatttaacgtctcataatcgatgattcaatgtataacctacagggcactcaagcctccaggttgggttgcttcatggcacgttggagttcgagtcagctccaccaagaagttggtcgccttcatctctggaattcctatcaagcttgatgtccggggaaagtcagtagcacgatgagtttctttcttctatcattcttcttgacgccaaagcattccaagagtgttgataccagctcacatttcttcactaatctagccagttcaactcttctgagatcaatttcctttgtgtacacaaaaagctccgatccaaacggctcgcgcccgtgcttatcaaagaggttactaggcgatgcaaccttgaacaggtctggcaggctatctacaccgccggtgttgttttgcctactcccataggaactagtcggttcgtgtctgaccccatataaatgcccgtctcgcaatgattttcttgctgacgtatggttgtacctatgggggaatactcagatacttccatcgaaacctgaatcctcaaaagttgattgccatcaacttcgcaatccttcctcgaaacatgacgatggccagatgtatcaagcactattctgttcctactcagccccagattcccggttggagagagatggaagagaaagatttaagtcaggttggagctttgcttaggagatatttggcgagattccaggtcgcacctgtttatgacgacgatgagttgagacattggttgttaagtggaaagggagtgggcgagaaagtgggagggaagagagacaagcaggtcacctgggcttatgttgttgaggtcagttgccttatccaatttattaccttgcagaagatgttaacctaatccaaacaatcatctgtgaattcttctcaaccaaacaaacctaaacagaaccccgagacgcaccagatcacggatgtgatgtccttctattctctcccctcaaccgtcatcaaatcaactcaatatcccatcctcaatgcggcctacactttctattatgccaccgatgtcgctttcgcttctgcctcttcaccggccgaaggaagctcctctagtgccatcgttagtaggtctgatagaagggacgtactggcggacagactgaaggctctcatgggtgatttgttgacggaggccaagaacgtgggttctccaactgtttacctcttcagtagttacgatcataaaactgacattagttgatgcgcttgattttacccttcctgttcttctcatcaaggccgatttcgatgtggtgaactcgttaaccggtctagataacaactccttcctcgcccaccacaaggtaatccttttctaaccctcttcaagattctctacctctgtttccgtaccatcaagatctgcatatgctgacaatcggagaactggttttttttttctggcttgggcgtggatgataagttcgggccgggtgacggatacctcaactactatctcgtgagtgttctctattcgtttgtactttggttgatgaataaaagggaacgaacaaatctaatctcttcattgacacatatatccttcgccaaatagtacaactggcgaactcccacggtgaccggtggataccctgatgatcgatccggaacgagcgagatcggtgtcgtcatgctttaaacggaactggggcttattttacatcgagatgtgttagaatagaactagcgctagctattttgatcatgttggctatcttacagtcgtaaatcttggatatcttgatgaattgtttatacccttctaaaccaccaaattttcataaccgaaaataatcagagattgattcactcgcgaatacaaagacttattctttgtctttcatgcccccatcttcgcctagatatacaccgcgaccgttgatgccaatccgtctcatatcatacctgatccttgatttacttagacgactgacaacgtgtatctaaataggacgatgctctttgggttaatagtcattgatcattaaccctaactttatctgaagatcccaagcgcgattatgattaccgatgcttggaagtttcgtctacccatccagtatgataactcatctcaacctcccctacaatcaatcgtctccctcctcatcaaaccctcctcatccgcgacatattgtcgacgtctaccttcctgatgatcatgatgttaagccacctcaaggactgatagttttcatccatggtggagcttggcgaacgtcttcttctcaggacccaacgctggatgatcttcctcgagggattctgcctcaacagttcgctttggcgctacctaactatagactaagtgaccaaccggaagataaaatcgaaggaaagaggaaagtacttcatccggatcatgtgttggattgcaggatggcggtagagtggttggtgagaacaggcgcaggggggttgataaatgagaagactaaagaaaacgtctggttgatgggccattctgctggtgctgtgagtgttcattcttgcttggttcctcctgtgcgtcatcctcttgatatcgaatcatattgagagagctgatccttcatcttgaaatttacatagcacatcattgctcatttcttgttagagacaccatcgatagcacccatccccgctgacatccgatctacaatcaagggttttttcttctctgagaccatcacagatgtttgtctctttctccttcctcttttttcgcactcgttcttctcatcactgaagcagtcgtggtttgatcgtccaatggacttttgaaaatgtagatagacgcacttgttgaagaatacccagattatcaagaatggttcataacctccgcctttggaccacctccctacttgacatcatccccttcccacccctcatctccatatgcgctccccccttcctcctcgctccaagaatacagaataatgatatctcattcgaaagccgacacacttgtctcgacttcacagccaatagccctggcgagcaggttggcagcattgggattgaaagtagaagtattcactgttgaggatataggagaacatgatgaagttttgaaggacgctaggtttgggcaaagggttagacaatgggtcggagtggatgtctgaagagtttccttccttccaattcattggatacagcataccgctacggccatctttatcttgtcatgctagaattcttatcctcttcgaacgggaatgtttttgtagaagcgagattacgaggtactttcttggatttttatttaataccgtggggtttcagtcgcgaagatttcctttcatcctgtccgatttctctgaatactctcttatcctagaagaagctgtacttgaatgaaatggtatcactatcttttcagtcctccaaaaacagcaccaccaccaccacccatcgttggctgattcgggtatccatattgtccttgctggggttgttgttggtacgattgatatccttgtttttgttgattatattggttgtgcccgccaccgcctccgctgtatcctgggtttgaggacgacaaagatggcggctggggtttggtgatgtgacctgcttctctagctttccaagcttttttgatgtggggcgcgaatttgaagagctaatatgtttccaacacaagaacacaaatgaccggagacgtcaagtatggagataagacttgttgtgagagatcgggacaacagagaggtttcttcttttgatgatagaagaagacagggaacgaacctcttcagcctcaaccccgtccatgatagaaactagaaccttctgaacgatagacgcatggtttccatgaatcttatcatcccgaactctcatgatcgaccaagtttgacgatcttctagccaagtgacttcgacgacggcatcgtcgtattgaatcttgctttctttcatcctgttgtcatatcaaaaaggaggatcagaaacgtatcgtgcgcgacggttgattcgatcaaggcaagaagagaaagactcacctctcccactcgtcaggctcaacaaccataccgtcgaagaattcataccggtcatctcccaaccattgatacagcttaaatataggcatggcctcaaagtctggttgacttggattcgcatctagtgctggaaatcgaagctctagtttgaagtctatcgaattttcagacgctggtttccacttcaagctaatgtgaagaaacgagaagatgggagaagggaggacggatatcagagtgtgcaaaaacgtgcgaagtgcgaggacaaagaacgaaagagaacaaacatattcggatcagtccccacagtgtatccactatcacaagctgtgaagatcaagccgtcatgaccgtgttggagtttgggtatatccaccttgaagacatcttccacaccatatgctctgttcattttcttacacacaatctcaaatggtttgttcgatgaaggcggaagtttgtccaatggacctattacccatttttggagacgctttgatttatagcacagatgaagacgaacatatgaacagaaagagttcgggtcaggatttgagttgataaacaatgacggatagcgaaaacgcacaccgtaacgggacataagactcttctttagaagacttattccagagaaaaccaagcagtcgaatgcatatagtcgaagagtttcctagagaaggttccgagtcggtagacaaccggagaagacaaggcaaaaagcgaagacacggaacaattgactgtcagatacgttctcggaaattaaaagaaaacaagaggataaggcagtaaatcatgcacaaacctttccagtttgagcatcaacatccaacacaagctctccgtccagcaaggtcttctccagagggcgtcgagcaggatcctccccgttgggaaagacaagaccttccacttgacgaaattcctcttttcggtcaatctgttatagcacaggagaaataaaaacgcaaggcgtacgatgcaaggtgatttcggggttaatctgacagtaagtgacttgtcaaggtgagccggaagaactatactcacaagaaacacatcctgagctccttttattttgttccacgcaattaacactagcacccgaactccatccgatttttcgcagacccagaagctgcagatgtcaaataaattctcaggataagacaacaaatggggaatgcagtaggtgagaggactaaacgtactcttcttgttcaagcaggcttaacgatgcttgagtaaaactgacgggttgactaccaggaaatctggtcgtttgagaaaacaacatatcaaggtagtaagctcttctctactttcaatagattatcctgctatcacgatcgaaagaaggaaagaaccataatcaaagatagtgcaaccactcactttggaattttgaggccacaaaggtccatgacatgttcgttgagaaacgcggtttgttccggtgtgaccagtttaccaggaatttctggaatcctggttgtacttgctggcatggaaaactagtgatgactttatatatctgtataaatatttcttctctattctgtctgagaatgtattgcgaaccaagagcgataggaaggaaacaaaggtgaaagtctaaaggagaacgacttgaataaagtattagcggttccagtcacagccggccatgtccgctgtgtgaagaatcattacgaaaggttgtaattcaaaactcaagatataatagagataattgtagttcaagtatgaattccggttagtcaccaatcaacaatcaccttaccttctgttctcgttttacattccaacatcaagcaaactacaggccatcagatagatgtctggggatacactcgaacaggccgtcctttcgtaagaagtccatggtttactagaagcttatcaattgctttcttacaatctcgcattcttcatctctatcattctagaggagctctctttcgagatccttcggcagctctagacgagtacagagtagaagatcgagaaacgccctctcccgaacccaataccgatgacgagcttggttccgacctggacgatgatgtcggtggtgtcccgtctttagatactccctcctactccgtaggtggtggctcatccaaaaagaccggtccaaagggcgtcatcagagatcagcgcgaagctatgcaacggaataggttcattcagcttcggaaccgtctagaagtaaatgagcgaatggaacgaaaggcgctcttgggtccaacatgggaagaagaagtcagatcgagggaggaggatcaggctgctatggaggatggggatcaagacggagatgtcgttgcgagatggagggatcgcaggctggcagagttgagaaacaagccgaacgaacggcagagaggatttcttagagaggtcggaatggatggatatctgagtgctgtagaaagtggatctagttgggttatcgtccttgtatacgagaaggtgagttccctatcagttgtgatgtctcttccatatcctcgctttctgcatatgtgcttaattcttgtgacgcctctcgaatctaccctatgtatcgtaattagaatcaaacaaacacgcctccatacctcattccaaccttgcagaagcttgcttcagccaactctccaccgacacatcacttccttctagcctcagcccgaaacctatccttctcgcttctctcgaacggcgaacccgaccgagatgtattaccaaccatgctcgtatataggccttccttagacggcaatcaggatgcggagctagctcatagttggatacgggtcgatctcatgttgaacaaggacaatggtggagagggagttgaaagacttttgctaaagtaagtttataaactgctccactgccttgtgatcaggtcgagtatggagacattgacatctcatgaatcacgcgacgctcttctttgatgcctttgtagcaatggaatcattcctcgtcagacatcagaagataatgaggacgaagacgacgacgagctttcagacgacagcaaatagtgatagaaactaagaagaacaacataccatgttcctgcctcatacattcgaagcctactttggtacctctctaaggattacaaacgttgttgacctctcgctgctgctttccacttctcgtgcagaccacagatctctgaattcatactaatccagcctctcgaaggggtttgaaaatcagcctcacagacaacagctactgtttcaacagagcttttagtactcttattgctggtcccggttgtttgttgttcctgaaaagaattctctccgtgctttgagttcctggtagccgattgactcacttgtgttcaagtttgttttctctgatgctcgtcttgttgctgctcaatactcatacatatacacttattcacaatcattatcgccactgtccttgtccttaactcatcgttgttccgatacagaatcaactcacatgaaccaagatgaggctcgcaaaggtgctcgacaacgcctcgctcgtcgtctgctcgttaagggcgtctcctccccttcggattcaccttcggattctcaaaacaaccgaggggcccgtcgagcttcagtagtaatcgtcgatgagaataggagtcgaaaatcaaccgacttagaagggatcgataggaccttcaaagatctttgtacaccagagagaaagagtgcagaaggccgattggagagagaaagggtgcaagtgggagaattggttgttgtgttgacgccgcctgaaggtcggttcctgtccctatcacaagttttgacttgaatagacgcaaagctatcctttcctcctcagatcagaggtataactgatcaacgtgcaatccgaaatcaacagaaactcgacagccgtcatcaacgctttttccatctgtttccggtccttcacccacattctcatttcgaccaaggaaacgttcgaccctacggtcatcctttactcgatctgactcatccttctccgtctctagtcgaactcgaacgtccggttcagactcatcccggtcgattcagcgctcggcttcatatcatcagcaacatcaaacaggtcaccaggctgacgacgaagacgcagactacaacttcccagccgatgatgctcgagacgatctgtggaacgcttcgccgacaccgttttcgacacccagtcaagaactgccgtctaacccattcggcttcgattcgacttgggtacacacgtcagatgaggcaccgcgcctggaaaacctcgaacctgctctgaatgtatccggtgttgaagtagctttgcattctcaaactgagattcactcagacgaagggcacgaacagcagcaggtaagatcacagtttgtgaccactccgccacccgatgcccctcttccaactcttccgacctctgctatttcaacggatgttggatgctcacctgaagcttccttgagcgggaaaaaaagcgagaagtttgagtttgcgtcagcagataaacttactatgccagcctccataccggaagaggatggtcctaaccacgaaacatctgttgaatctcccgaaaagccatcttcatccgttcaaatcttggacgattcgtcatccctggtggacacgaacttgatggagaacgatgtatgtataatctcgattgagaattccgatctctctccaccaaagatgaaagacgataagaaggagaagggaagcatgggaaaaacgttgaagacctttcggtcattcaccaagcttttgaagcttgtcgggtctgatggaaagaagaatacagttgccaggcaggatgcaccggctcatcctattcaggcatcatctacttcaagtgatcatacaattcctttagaaggagaccttccagtaaccgatccaggtgctcatgctttgtcttgcgcatcagatcacgagctgcttcctcccgtcatgtcacgactatcccgatccgactcaattgattttgtggaggacgacaatgatccaaatcagaccccaatcaagaaatcagtagtccgaaagctcagtctcgcatcactatctaacgtattgcgatcgtcaaatcgaaaaaagagcctagaatctatgcgcggcacgcggtcttcgttttcttccgatgtgccaaagtcttctttgatcgaaaaagttcctgctgttcctccgattccaacttgggttcgaccctcagaaggagtcgatagcccaggaaaatcttcctcctctcaagtacaaacacaaccatcctcccaacatccgacatcgacatcaacaacaacgccgatacagaacatgacgaccactgaaacatccgcgccaacatcggtctcttacgagcaccaagcgttggaacggccttctttcgctgtggaagctgcttgctgggctcttgcaatggtgtacaccgagactccttcagcatgtcctacgaaggccacatttcctgatatcaacattcaggacaaggtggagatagagttggagcagaacgaaaagaacgaagtcgggaaagatgtcgacaatacagatcagcagctgtttgagtcgaacagagctcgggctgaactagacgaagagagtgaactttcattgaagcaagagggggcgcaagatacggaaagggaaagggaaatctcaatcgataccgcaaacagtacgccagatatagataccgatactgatactgatacgggggatgaaggatttttcgacgctgaagagggagaacttgaccaggatgtgaatgagattggtaatggacaagaagaggaacgcagcgaagacgatccatcccatgtgatcattgaagtaagtgtttttcgtttctaacatcaagaacaattgcctgacttgaatttatgttcgcctcgttctacaactgttaggtattgcgagctcattctggctcatccgtatcggcgtccgtctctaccgtctcgtcggtttcatctgctctgtctaccacgtctagatcgacctcattatcgacaccctccccaacgccatacataacagacaccatcatctttagctcgctgtcagaatcaattcgaaactcatcggaagctcatgtcactgccagtggactcaagaatcttgagacaggagaaaaagcgggcgacaaatcaatcgcagagaatggagctttgtcacatgctgagaagtggggcgtaaggtttgaatctctgaattttgaagatttagagctggacttgagcttctagagcgagtacaggagcagcttccagactcacatcgcggacatttcaccacactcctcttctcatttcttcttcagtgtgattctatctgttatatattccaggagaggagatgtttgcgctgcctcatagtcttgatttcattctgcttgtccttctgtctacttcctattcccacaagttagcgactgtcctctttggttggtacaatttctcttggagtctcgaatccgtcttcctcttcttcgtgtcttcatcaaataccgttttggctagcttatccgagatcaatcttgtgacacgtctcctttccttgttcttatgcggtaccaatacattcacatactccttaattctctgacttttacccaatctatccaccgttcgccgtgtctgtttctttgtttttattgatacttgtagtaaaccatacagcgtttgataccctcgtatatattctctcacagtccgattttggaaagaaaatgcaatataatattctcaaagaaaaccccatcgacaagacctgatcagtcattcccgaatcttaacccatcctaacactctctaggtctcccaatctcctgtctacttctctctttaattcttcagccaacgatttgacctgttcagatttgcttgtggatgattcacgaagcacgacgttaaggatgttgtaagggacataagtagcgtttgcttgtttaggaaggacgtcgattgatggagcctgaatatacgaacgtggtgtgcttgggtcagcaacaggatcaaagaaaagaacatgatgaagagaaagtataaatatatcctatctaaaaagacgactgactcttctgatgagagcgatggaatgctcgagggcttccttgagcaagtcatatgtcagatacgactggatcaagcgctcagggtcgttcacctagttaagaaaagccagaatttggaggaaagatgaagatgggtcagacgatcgatcatacggaggacaagcgaaaaagagcgcagactcaccgaaaagaattcaaccaagaaactcggaatagggaagaatctatcacaatccaatagcttttcgagcacagcctgtctatacttgaagaatgtggcaggaccatcgtgtcgttcaagcatgattcgaaggtactgggatgctcgaccagagatcggtccatctagcgaggttaccgttggtgagtcgataagccaatccagatggtcaagagattcactgaggatgacagacaattatatcgttagaaatagtccgaaatgagataatgaccaaaagagagtgaagaatggactgacggaatgcccaaaactcgcgcgtgagcagccgaatgagcggcctcgaccgtcttgatagccagccgttcgaaaactgtgtaacgaaaaagtaaagaatagctcagcatacacgtcagatacctagaaaaagtctactgcgaaagttcacttactaccagtcaggtctacttgcaactggcgcgcgtgcaagaaagctgtatcaaacattccagcctgaacgaacaatgcgatcgcatcttccgcagccaaggtatctacaccagcttttcgcgtgagttcatgtctcaaggagtggatcaaagcaaataggatagaaacgacacctactcgattggaatgaatcagggaaacgctcggccaaaagcaaagttgacagcaccaagttgtactctcgtcgaatatcctccagttccacaatctcaacgtctttcgttcgagcagacggagagaatgtttcttccggaatataagaagtgagcttccttcttttacgtctctgtgtttttttttgtgaagaaaaacaacccacacaacacataagtctggcaaaacgagtggcgtatcaaagacaatgaggaataggcatactttgttaccagaatcagccgacagaggaacagctagccaagcctgcttctggtcaactaacgatagcgcattgatagcgagaagataagatttggcccgtcttggtccgatgtcaacgaatcgaccgttgatctctccaaatcgacgtccctgttggtacatagcagaagcagctgtttgggataagcagggagaagggaaatcaattttggtctgcgcaacaacgagtgggatcgaaaaagaagcaacttacctgctcgataatcgcctctgcggatatgccaagagtataacactaacagataatttgggaacaccaacgggtctgaatgtctagctttgaaagccaatgttctctctacgatatcctctagtccgacaaaggtaaagtgagtgagacgatcgacctcattggcgtgacacatgaccgtcaccaagtggctgacagcatcactgatcctgttacgagcagggaaaggaggaagtctgagtatgattcgctacaaacacacgcaaaagatcagaatgctcggatatgttacttacgattctcgataaggcgtggtcgtcaagatcatatgagcatcctcaaacctacccaaagcgactgtgctcttgaaaagctttgaccagaagtccagagtgtttttcggacgtgacgaggagggtttcactgagtcagaatgagtagcttcgatggcgagattggcgaatttaacgatagaagcatcgagagaggtagcttcgtaaaacaagataacgagcctatagaattcgacgaggtcgacaggctggctgattttggagggaagcaaagcggaaagggtcggggagacagagattgccggacggccatctgtcgagacagaacgtacacacacatatagaagtgaacggtgcacataaacaaatcaatatcacgatcgtcgaagagtgcgccatctagatagattttggtccacgaaagaactcaccaaaagcgcccgaaagttgttcaaacaaggcttcagattcttcaacctgacccagtactaatctcgccttcgcctccacgaaagccaaaccttcgtccttcatgaacctctctccaaattcgaccgcatgttcaggatgaccagcctccaacaacgccaatgccaactttccgtcttgcggctgaaccgcccacatgttctctcgttcggcgggacagaaaggcaaagaagtggtctggaggaaggaagccgtacatgatgagatggatgtcaaggtcgatgttgaaggcagagcgatcgacgtcgggacggatcgcagtaatgccaacaagagtgaagggagaggcagagtgtttgatgaagagtgagaagctaggcttgacgaaggatggttgacgtgtaatgaatcgaatctttcgagtagaccaagatctccgccgaaactgtcgtttgcccccgagttatcaagggagatcgttcgtgataaccatcggagagccgacagcttttggtaaactcctaatgtcgaaaggatcgccaaaggaagcgagtctctcagctgatcttcaccttccttctcgacctctcgatcagatgtgacctggtcgagaaccaaaatgagccctatcaacaagttgaataccaaactgaacctccattccaaggacactcgaagactttcgtctaagaaagcaatacccagtggagatagtgctagtccggactcgaccccgttttccagctctcttacttgattaagagcgagagtcaccagtgttgtgatatctctgttttctcctaaacctgaatctaaaaagagtgaggaaatctctctagatgtgctagacgacatatcgtctgaaatataagaagcgagcttggcctcgaatatgtctaaacaagtatcctcgatgggacagtttacaccagtcgcgaccagttgatcaaactcgccttccaacccgatcttagctgaaggaggcaatcgttcgaccacagaccatccgatctttgagaacgcgacgacatcatcctcgtctgtggccccatttaggtgacctcctccattaacgatcctcaacgccaagctctctccctttccaccttctacaggcaagaccaacccatcccgctcgatgacgacgacgccttcttcttctgccgtgtttccggattcgtctcctcctgaagctcccatcttgacgatcccgaccccccatctggcatctctctctccttctacgactcgggccaagaagccaagccattcgatctttagttttcgaatgtaatccgcgtgcatgatctcccccgtttgaggagacacaagaggagcaagatgagaaccgacgatggaatctactctggaagagagggagggataactctgagaaagcgcggcgttgtgagtggttgatggaagagactggatcgtctggatgtacgactcgagcgcgctttgtagagacgttggggcgaatcgggaaggagcaaatagatggttgataaagatctccgcgacggactctctagtaagcgctctgtcggaggaaccataagcaccgacagaagagaggagatcttcaaagtagtccaccgtgaagccagtgttgggttcgaccacgtccctgagagtttcccatcctccattcgaaccctcaatatcctcccagtctgactcggacgaacctgtggatgaagagaataaaccatcgagggacgaggattggatgacggttctgcctttgagatcccaaacggcccagatagtgtcctttcgagatcgcgcgccggacttgccaccaagcaagacttcaaagtccctcaactcaacaccaccaccggcgacggcgcttcctaatgagcctccctcaaaagaagacggcggggaggctattcgaacacctgagaatgaaggttccgagatggttcccttatgcgtgtcgacaacgacccgataagtgacaaaccggccgggcgatatgaacgcgttaccagcggccgagctgggtgaggaggatgaagaaatggtggtgcttgagggaggaaggtagaccactagatagaaggttgacttccaagtgtttgaggagacgatttccatctcgttgttgtgttggaaggatgaagatacaggcgaagaagaggaagacgtaggttttcgagagacgactttgatgaacgatctaggaccttcggtaccgtttccgccttctgtgatcaatcccccgctttcggctccaacaccattggcgaccgagaggtctactgttcgtgcgcaaaccccggtaagaacattccagattctgagctttcggtcacgagatagcgagaaggtaaggttgagagtgtcctcctgagaataagacgagagcgcgatgatctcgtttggctggaggtgggaggcgccggacggccgagaagagaaggaaggaagaagcgatgtgatgctggacaggtacgacgttggtttcaactcagtcgatgtccattcgtctgttcaagtaaaggttactccatgttggacatcagcacgagccaggtctgaaaaggccgacaggttgatcagaccaatgccatcaagcaagaaagaagaacaaaccatcgtctctctcaattttgagtattgccccctcgctcagaccaaccatgcctacattctcatcgactgcccagaatacgcctggctgccttcccctaagccagtcggttagatcgatctcttcaaccgcgccatcccttctcaaagcctcatcccatttgagtccggacgaggggagggccaacctgatgagaacgcctcttttcgttagcgccagcacccagagaaccgaacccgctggatgagagaacaagacaggagagctgtgaagaggttccgggaaatgcaatcggatcggctgcttcagacggacatgggacggagacgagattgaaagagagagggacgaaagggagagtgtgagtccgttgttgattgttcggagaaggatattggaagagggagaggaggtggtatagatcgcatgagacggatgatgagggcttgggaatgtttcttgtgggtatgtcaaccttgtaggaacaggataagaaagaggtggtgatgtcggaggggtgggaatatgaatcggaaagtgcgacatcttgccgggctggaaagtagagagaaagagggcgagagattgagttgagtttgagaacagcgggcaaacaaaacacaggtcagcagatgctttctcagagccagttaccactacatctagccaagttctggcttctccctctcactctcactctcgctttctcacctgaatcgttccggaatggaagccgtttgggaaaagagagcattccattttgtaggtgtgttgaacgaagggcgaggaaacgaaaaccgctgatggttacaagattacgtaagtgaaatcgttacatgtcaggtgtcaggaatacgggttgggtatcacgtgatctgatacgtgggttacccctacaggctattcgttccctccatcccttatgcctcttcgcccattttccatcatgctctagtttgcatggttcatgcttcatctttttagttctcgtgatctcgagcctctctaggctcgtcatatgtatatctttagtggcagaccaaatgcgcgaggggtcctgatataaaacggggacgccctcgcgccttctcggataagagttttcctcaagctgagattcttgttgaaacctcttatccaaagtatattgttaacagtttggtctgcttcagatatattaatcgccagagcctaagtgtcaccccgcgaaccaagtgattacacttggttaccttcttaacaaccgagccttacatcagggatgtgacctgagtgctacacctcggtaaccttcttttggttctgccgcttctcctacttcggtattccttatgctctctcattacatcaacatgcaggtatatgaccttccagcgcaggtgcttctagcaccttctatgatctgttctcttatgcataatcgttggagtctaaggatgatatataagacgggtcccctttgccacccatagcatagtctaccaagtctgaatcctttgtcattccttggttccctagtactcttgttccattgttgtatcaaccttattcatacgatttccctgccttgcgctctcgtcacagtcaccaagctagagagcctgaacttccttcttgccagccctattccctgcctggttacattcttgtaaccttcccgttaccctctgaacccggaccctgacattacatggctcgagcgagacctgtgcaagcctcttcatcacgtgcatgatctttgtgcctcatctggatagggaactcggcccgttgaggtagctgagtttcccaaaggccagacgatgatagaaagcgcgctggtaaacttttacctggtgatagccatagagattctggatggtgtgtgaacagcagttatattttggtagaagaaagaacatttggaacgaaacgttctgactgggagaaattttcgtcgctcagacgatgatcgaacgagatactcatggtatatgtgaagcctctcgcgaaaagcctcggtagtctcgaccgtcaacatagcgacagcagcttcatagacaagaagctcagttgcctggaagatcttgatctcaaccacattactgac

SEQ ID NO: 1461 - DNA, 2240 bp, Xanthophyllomyces dendrorhous
acattactgacgacctggctcaaaggaaatatcgcggtcgccgacttgggatcagacatcggccagccgttgtcgaatggtctgccggatcggtttgttctcacgacttgaccgatgacgtaagagtttcgagttgggctaatcgtttatcatcctgttcactcttcaacacaaccaaccgcctcgatcgatatcaaacaatgtctaatctacctcctccttatactgccgagcctactgccgttcaacctgatgctagttccgatgaagaagaggagaggcagcatcgatccaacatgcttcgatcgtcctccctcgatcaggagggcagaagaagtttagaagatgagaccagacctctacctgaaggatggatccggcagttcgatgagaggtcagatcagctttttttactcagaacggccagtgcacataggcatgccagtatatggagatgctcataatttcgatcgtcttacatccatagctcttctcaccatttctatgtcgacacaaaggccgaaccagctcggtctatctgggttcacccttttgatgatcctgaattcattgcttccattcccgactctgagcgatctcgatttgagcaacatatctctcctgctgttggctcatctcaaggagcacaggcttctcagtcccatcagaccggtcagatcccaggtggaggcacaggaggtccgacctggagcgatgatgtccaactatcatctcaagatcaagccatccttggtcgaaagggcaatcacacaagctcgaagcctgcgaccacgggaacaaccactttcacagattcgccccggttagacttttcaggtccctctgtatcagcacacaaagaagctcaaggagctaaaatccaccaacaagcacaaaatgcgatggggggatcaaacgtggagaaagataccgtcaagaaggaaagaggatttggcgaaaagctgaaagataagctgacaggaaccaccagggaagagaggaacgaaaagaagaggaaggagcgagaggcagaggccgtcagtctccccttttctcaatatctatcttgttcttcatgctgtctgtataccaacattctcatcatcaatctcacaggcatatcaaaagaaggtcgaagaagagtttttggctcgacggaaagcgctccgggaagccaacttgaacaatccacaacttcgtccgtctatctctctttctgtttcaatcttgaagtcttgatcagctatctgagatatagaactgacacgcatcttgaatcaatttctcatcacaggaggatactacgctcctaggaacgacatatatgctcctccagttggtgtctactctcgaccgctgtatggctccggcctgggctacggatacggcggctacggagggtacggaggatatggtggatatggtgggtatggaaggagaacggggatgggaatgggagtgccgcttgctggaggaatgatgggaggattggcattgggtagtatgctaggtttgtctctcactcttctaaatctttcactggtgtatgattctgatctcgttgtctctgttgttcattgatcaatatataggtggagggttcggaggtggagggttcggaggtggaggattcggaggtgattttggaggaggtggcttcgggggaggatgttaaagctacatctgcttttccagatgtcttatgttcttttccgccttcgtttttagccctctttgattgcacttcatatctcgttttgttgaacgtatccactgtacagagttactcttgtcttcggcttcttcttttcggcacaaaccacgggttgactttgtcactgcctcttatgacaatctatgttctttttctgtaattctgaaatatcttctaaacaggcggatgtcatgatcgccaaagtcgggatgacgtcgacccggatattttactgaaccgcaaatgttatatatatgtacgaaaaagcttgattcctctgttattcatccaactctggcacgcacacatacacactttctttcactctttaacacattccttcacttggaagattttaagctttcagattgacaatgactatttctaacgaatcgacagttgcgcctctcaagatcgccatcatcggtggcggtaagctcgtcgctttcttgttgttgcttcaacttgaagccgaccatccgcgtttgatcaggtcacttgcgcatactctcctttctgccttgtc

SEQ ID NO: 1462 - DNA, 60114 bp, Xanthophyllomyces dendrorhous
gctaaagaccggtcagttgatttcaaacaggtatcctttggacctaacgcccaaagagcgcttcacatgatcggtcttggaaacgaactagattcgatctctggaggagatcctggcgggagcgaatctgacgatgtatggttcgacgtctatgtcggagaaaagcagacggtcaagtccgaacgcgagatgatctgcaaggttgaagggaaagattctgctaaaggatcggttcatcggtttgtcttcaatcttgttggtttctctttcactcggcttgtatgcgctgggtatgaaagaaagctggatgggcactgaacgagaatgtgctggttctgacttaatctagggctgacttcctcaataagatggccaacttggttccagaaccggtcaaacatctcaatcaccgttgttcgtcttacgaaactatcctttccgaagaaggagaaaatgccggtgggaaggtcctacttcgattcgcagagacgaccgaccagaacggcaataaattcactccagaggacgtcaaggtggatgttgtgttggcttctgatggaatcaagagtttgatgagaaagtgtctttacaaacgtatgtgctctcaataatccgccgtcttctatctctgtatttggcaacagaaactgattcgtttgtcgtcgactctgttggattctcaggaagaggtttggatggagcgctggaaaaatactctggatggatcgcctggaggggacttatcgaccaggccgagtatcatgatatcatgggtaaagatgctagtaccaagctcttgcttctcggtcaggacaaacacatactagttcgttctctatcctcaatatcaaatttctctcgcttatcagactgacgatctcgaatcggttatatataaatgttttcataaagattttccccataaaacatggaaaggtcgtcaacctagtcgtaagtcttctctcgacctgtacgtcttgtgactttcaggtgtcgaaaatgaccttccgttatgtatctatagggatttgttcaagatcatgataatcaaaggctcggagatcacactggaccgtagtccgaggatagacccaaatccgtgaggctccatgttcagagacacacaaatcatcatattgtgaaatactgactagtgtgatttgattgatatataggaacttttggaggactaagcctcattcgatgagaaatacttggctatttttaaggtatgtttctctcgacaacctgtcaaatgaacagaaattcaacctctgtattgcactttttcttaaggcgatcgaagatccatccatctggggaattgtaagatctttttatcctcctttcgattccgattctcaaatctgacatatgtccttgtacacagttcgaccttcccgttttggagcacaccatcgatcaccatctcgctcttataggagactcggctcatgcaacaactcctcaccagggtgcaggagccggtcaagctgttgtctgttcttttctccagctagcctacattgatctgcggtgctttgctgacccactgctgtcttttctcttaattggatcaactaggaagactctctctttatcacagctatcttgtgctccccagtagtgtgctcagctccactcactgagagatcagcaaaggttcaaaaagcccttgaattgtatgccaaagtgaggcatacaagaggaggaaaagttcaaacgacctcggctgaagctgggaaactctgttcgtcaactgtgctcgtatcttgatttgtgtaacgtttcaggaactaacgttctatcctactttcgtgcgctggttgtggtctttagatgaattcaacgaggttaatggtgaaggcaaagatcttgagaagatcaaacaaaacctgatacaccggatgggttggatttgggattgggatgtcgaagcagagttaaaaacagccctcaaagagctagaggagctctgttagagcaagggtagacttgttagaaatcgttcgttgactttagctccctcaatatattctatcattcccaaacatcacgctcaaatgtaatttacaagaaagggaaagacctaaggagaaatacagaagttcgaactgtcaagagacggcataaagagattcatcgagaacagtgtatggaattgaagtatcgctagaaaactatcgatgagaggatcagaggatataggtagagatgtgtgtaagtagatgaacctgaaagtcaaatagatcaacgttgatatgcctcctatctttattgactctcggtgatgaagggaagttgaacaagataacatgcttggtcagtatccaacacaaagagtagggagtgaattatcctagacaaaagagatgagcaaaaactgcatgtactattcggcagctgctgttgcacatattagcgaaaggtcagcgctatggtcgttgctaacatgaccgatattgatgactgatagactgatgatgttttatcagacagctagattccgccgggtctggatcaattcttgttgatcttcggtttggttttgttctcgcttccgcccctctcatcctaccgaatgtcctacgtttttgtgaataccccggttcttcacgacctttgggcttatctcagactggtgaatatatatctgggacatgcgcggtgtgacagagatatctttccgggctggctcgaacacttggtggaggcgatctttctatatcgccaaggtcgagacccaaaagcgctgtttcaaactctcgctcagtacagatgccattggagtatctgccggagtttccaggcccatgtaacctccgactgacattgaccactacaggtggagacggcagggcgagggtgaagttcgacgctgagcggaatgcgtaatcgtcgtggtttatggtctgaggatacccaagtctaaaagggccacgtatcgatcgtcatcggttgtggttactctcaccaagcctgaggcttacagcttatggcttttcaccaggaagaagcatttcatcaaggtacagttatagattgatcgatcgaaatgaatgatgaaacatgagaggtgatatgaaggtaggtgagcagagcacatacggagtatcataggatgcgagataatagtcatggtgagaatatataaggtaaatgcgtatggatgaagatgagttttgaagggtgaaatggaagaagagaaatgtatagatggtataagttcgtttgtgcatacgaagaaaatgacccttgagaacatgaaaaataaaggtttccaagaagagtagagaaagaagatagagagtctatcatggagtgggaacatgttggcaggagcagaggctcaaactatcgatcagcaactgatcccttcttcgagagctaaccagaaatcccagaagagtcgggatcacatcgatcgattctcagttatgaatttggacagtataatgagacaaagcatcacggaactcaccccgtgtagattcaaaccgcgcgagctgacgctagtcgtcatagaactagattgtccggtaaggacccggcgatgggaagtggctgacgacatagaagtcgacccgggtgttccaagatgggaaggcgcgtaagctgtcgtagaatgaggaacgcgaactcgagcggttagagctgtgggggcactgatgttgagggtctgtaaccggaaaaagaacgtcaaaagtatatataaggtcacgtcaatgatattaaaatcgaagcatcatttttcggcctggatactgactttcttgggtgcttcagagaccttgggcttcacactcgaactagtcagtgtaggattcgacaccttactagtagtcggctgcaacgtaggcaacggtcgtggaccagtcatccgtttagacatccaaggatgcctcaacgccggctgaggcttcaatcgacgatccgggtcccaagtaagacatttagagatgaaatcgacaaaaagatcgtcgtctgactttaatacttgagctagcgtcttcgttcctggccgtcgacgtttccccttagaattgactacaggccgggctgttccttgggtatctatgttcactcagaaggggatgccatcagttacgaacagaaagaaaatcgaacaaaattatgtataaatacataccgaaaaagagattctttctggagctcttgtcaataatgtatttgtctggcatgccaagcacttccatgatgcaagatagctgctcctgctcattttctccagggaagatagggaatcctgtatataactcggcgagaatgcaacccaaactccacatgtcgatggcctgacgcagtgattgtataaggtgagcacggatgcgtagtctcatcgttagaacatcagacgagggctagagcttaccatgtgatagttcataccaaggatgacttctggagatcgatagaaacgactttggatgtatgtatagactatatagccaaatgttccggcttgatcagcctagagatcagaacaaaactcagattggcgctgaagagacaaacctttttcatgctcgaagcaactacttccaaagtcgataaccttgatgacactttttgccggatgaccaaggagaacgttctaccaaatcggccaacacgagacaataagctttatatccagacgatgatacatacagagaaagtgacaaacctcaggtttgagatcacaatgcacaatccgatgctgcctcatcaagatgagcgagctcagaagctgggttgtgaatctacgaatcaacgatgtcgtgaagccagcaaaactgttggccttgatgagttcgtaaaggttgatactcagaagctcagtggcgatacaaagatgattccggaagtagaagtgctcggtcatcttgattacatagtgcttctcatcaggatcctacagaaatagaaaaaggggaaaattgatgaagatattcatgattccaaatttagtttctcgggaagaagctataagagaaactagcaaactcgaagaggaagaccatacccattttcgtaaattttctaagatctttacttcaactagtgcttgatgatgaaacctctttttgtttcggataactttgacagccacacattgcccagtttgatgatctcggcactgccagacctgtccaaacgatcccttgccaaggagacacatgatttcgtaccgataggccagatggtcgccaggcaccatgagaaagtcccctcgctcgtcatcatagccgtgattttgattgttgtctgacaaagtggcctgccgtttcttgctgtgtagaccgatatagtaaattgagctgtactcggtgatctctcgacgttcgaaatccgaaaggtcgttgaaatacgacttgatggttgctattcatcaattcataagaagaaagaagacagtcaatataagtctgtataaaaggttcgataccatctcggagaaaaccttgtgagggaatggaaccaaagagacaaaccaagcggtgttgaggccgggctagcttcagtcggttccgggaaattcatcagcgcttcgatctctgaactcgtggcccccgttgattgtttctttgccttttgcctcttcaggaactgcctcatctcttcatcgccgacagcttcatcatcctctatgagagacggagaaattgaggatgatcgagacgaaggaccaggagctgaaagtgaggtggatgatgacgaactcgggagtctcaaggagagtgaggggagtttcgagttgaccactcgggtggaagcagaggatgtgtttccgtagcctgtcaagtcagtcgtactagccgaaggcgtgtgctgagatttcttgataaccaaggaagacatgtcttttgaggtctttcgaagattcgccgccgacgaagcatttgctttcaaggaagcgtttcctgcggtaggtggaacagggagttgcctagggactcgagttgggaacgagctcatggatgcagaggcggaaactccattcaagcgtccagccgatgactccatctcgccatcgccagatttagtatcaagagctgtagctttcgggcctgaactgatggtttttaactcttcatttggagatgctccaactccaaaatcagacaagttcgagtcacttcgagtataactcgaatctgaagacgttgtggccatttcgccagcctttttagagccactgaatgcactaggggcagaggaggttgtcgtcaccggtgtggtcgtctgtcggctctgtcggctcgcaattcgagggatcttagtgggcgtagcatcaatcatccgagtgaacgatgcgctcgacggaattgttcctgaggccgcgacagatgagatcccgttcattggtacgaccgatggtgatccggcaataattggaagatttgctcggctaactcggttgaccgtgttcgcgtgggatgagacagatggttgtcgacgagtggaggctagacctccattggcggatatggaagacgtagaaagacttggagataccttgtgtctagcacccgagctggactttcggtcgatcattgggtgagacatgctgtccattagcggagggggaatagagatggattcactcttctctctgtcatggctcgagatggtctgtttaccaaaaagaatcatacgagtcagtgtagactcggggtctattgccctaagggaaatcactcacttttccgcgcttccttcccagcaggccaatactgctcaatcgaccaggagaaggacgttccttctctgctgaatctgattgctcttttcctcctcttcctgcataaggtcccaactcactccggcctaatgaacctcccgtcgtgatcggtccatcaggtgtctccttcagtgcagcagtagcaagatttctcctagacgaactacttttgagcatgtttgagagtcccattccacccaacattgattttctgacactggacgtggttgaagacggcgacgacaaagttgctgactcgttgattgaggtcgaggattgtattcgacgagaacttgagatcgacgcccgaggagtcgaagacgggtgtacagattctgcgggtacattgagcgcgcctcctttagcagcaagtgctttcactgaagaagacgaggatctcctgaagaaagggatggatgaaggggtcaatcgcttgttacttccactgctgctggatgagtaacctttggagtcgcccgccagagccggagctgatagtttggacgatgatgacattgtcgaggcatgtctcgagacggctgccagatttgagcccttatccagaggagttcgatcagataacgcaaacgagtcgatcgagttggaatgcttcaaatttgaccaaggcatacccgcatttttgggataatcagcagatgactgggaaaatgagcctggtggaagcgacggcgacatggaaagctgttgatcttcaggagcagacagtgaagtcgaattcttatgcgaactcgaccggccaagatgcaacgcattagtaaagctccatttcttacttggcacccttgaactagcagcagaggaaccactagcttgagaagttgtcgaaagttccgatcgggtttggcggtcgatcggtgggcgaggtagggatcgattgggtgtcaaatcgtttcttttcgaacctgtcaaaggagaagctgacagggtggcttgggttgaagatgtacgaaacgtcgagttaggggcagaaactgaggtgggaagtgcttcagaacacatgcggtcgccttggtcatatttctgtgtttgatccgactccaacgagggtgtcgcttgatttgactgagctggagatgggacgctatattgcttgggcaaaggtggcacaggcggaatctccttacctccaatagtacctgataaagatcccctccttgttccctctccgtcgctatgggatgaagcggcgtcacttcctatactggtcctggttgcacttctcgcagaaccggttgcattggatgaaggggccgtagaatatacagcgctcgtggagatggaagatccatgtttagaggaagtacttgaagaagctccgatacttgctcgagctgggccaaaagatatcgacctcggggataggacctctgagtcctcctgttttggtgatgaggtctgacttacaagcattgcaggcatggaggctcggattcgaccagaacgaccttggttgctctttttgtcgtcagaagagggtggaggaggagttcttgaccgattagctgaatcgcccttggacataataccatcagatgacttgggtttgaccagacgggtggactgcctctttccagcagagggagaccgcccgattccgtccaactttcgaagggcttctagggtctccggatcaactaccttggatgggttttgctgagaaagccctgatgaactatgagcggagtccattcggaaatgatcctgtttttttggagaagggagagaatttgggagagggggtagtgggggttgatccgacgagtcgttgtgtatgttggagtttgaaccttgccgaagaagctttttgatggaagatgtggacggagatggagggagatgagaaaaatcgtttggatgggagaattgtcgaacgatctcgtgagctggcgaagatgggttactgattggtcgtccagagttagaggagccggtaccagaccgctctcgttctcggaatctcctgctgtctgtactgccgaaggggtgaggtgaaggatgaagttgaaacccttctgacgttcttcttgattctctcttgagtatggagttcccgcccggagaaggttgcgcggaggacagcggcgatggcgaaagcgattcgatgctatgcttagtagaaaggccaatcgacagtgcagaatcggagacgccctgattttccttctctgccaactcttccaaatgagactctccttccgatccccatctgtcttctgcaaattgatcggatagctcgcgtttgtgcccacccgtcgtaaatctcttcggactgaaggagccttggccgatatttggagaggtaccttgtttgttgtgaaggagacgatgatgagaaggagacgaaacagacaaggttacctgaggcgaggaagaaggcggggttctgggtggttgctcagacgtatagtgagaagatccaggtgtcgtttggctagactcagtctcaaagatatcacatatgggcaacacatgctggccctgatcgtcctcgaaccgtctagtcttcctctcagcccgcgcttctcgggattctaccccggatggctctcctttcgatgatctgctttcgcggtcagtcgatatctgctccatctcttgatcgggattatgttcccagccatgggtttcttccagtttcgatgacgctgcccgcagtctagggttcggcgaccagtcgatagttgacccgaccttgttggcccatcggggggttgtcagctctcctacaccgacgaggcctcgacgatctatcgtggatgggctaggtggatccggggtcatcgggaaagcactcggaggggtcaacctgtgtgacatcagagataaatgcatatgtcaggtgggtattctgcgaacgcgtttcctgaattcattaaggaaaccgtgggctcacatccgcgacttttctcctcgcatggcggaagaacgttctgggagaactcctagagcactagatagaggagtttgaagcgaagagctaaattgatgacttgaagaacgagggagaccctcggacttcttcgccgccgaaacaggggctgtcgaagcaaccgctttagacgttgagacgagcgaaggtaacgaaggagatggcttaaacaccggatttgctcctcgtatggactcgctggtctataaagatgaacaagataaagagctgttagtataagttcctcattagccaagtgattaactcggtagacgtacttgatcctcggcccttattgaaaccatgtcccgggtccgcctatcaggacttgtgagctccagagcagtaggagctggtttcctcctgttaacgctactgctcaaccctccactacgatcgactctcgagctctgggcatattcggtcaatcctgacaagggagcttggtcgagtaacggggaaaatatcggaccagtattcactttgtctttgtcggaagcgaaagatgtgttgttgggcccaaaggagatccgatggcttgcattctgctctctggatgagcgagatgaaggagagggaatcatgattgatgaccccctgtgttcttaggggggcttaatctgcatcgtatggccaattagctgtcgtcagaaagatgcatctgactgatgaacgaacagtggccctgacttaccacagatcaaccagagggcgagacaagtgatggatcagaacaaatcagacagaagaaattggctagaggggtatcaaaaggctacctgaacagaaatgttgttaggagaaagatgaaaagatgggaaagagatgggaagccaaaagaaggcaggaagaatggaaggatggttaacgaaaggaataggaaagttgaaagagatgaaagaatccaaacaaaccacatctttttccgttgattgtgactgttgcgagtttctaatatttccttgtattcccccggatcgtttgtattggttcgtgtcccattaggatattcgtgctactcttctacaagttaaccttcctttctccgttatctactctctcttcgatgatcactttgtgctgtacagctcatcgagtgtcttctaagtcttttcatatgacgatgagaacggaattatctcaggatcccggctggtaataatatgtggcttttctctccttctctatatctttcgcgtttcgctgttctctcctgaattgggccatccgtttccggctctgcttgagtgcctcatccctgcgcttctcctcggccgtccgaggagggttactatggaagaaggaccgaagagtctggaagataggcataggccagtctgtgttcatacaaagtcccatatgtttgtgatctaactcccatcagaggcacgagcttctgaacagcgtctcaggccatcaaggattatatcaaagcttactgtggttaagacggaacggggtgcacgctgagatggtcactagtagacagatgattaagaacacatttcttgagtttctctctcagtcaactcatgttcttccccaacatagtcctgcttgcgtttgccaagcggatgcaaacttagtgccttggtcttggcgttcataaagattagtgtgattgtccactagacttaatccctgaacacagcgacgggctgacagccagcgcagataccgtctagccgagaagataagtcttgtcaggccggacttttgaccatatcaaagaagtctctctgaaactagtagaacacgtcttcctcgactccggagggtttcttccgttgtgtatgatactgacgcgagaagcaccggtagtaaggttctttgagctcagaaccgacagataagcaagttagtttcttcaatttattcaggtttcagttcatggtggcttcttgagcaaagacggattgtgcacgtttcaaaattggccgtcttcctctcgtttcaccaacgttctctattcgtattgacttttgacaagaactgaacgttgacgcgttctctgatatcggccgacatggaaatgtgttgtagagatgacagatgtagtgaaggagaatgtgcggagaaggggatggcagcaaaggccgctgctgaggagaacagatgtacaaaccctatagcaattctatcaaatgcctgactctctcttctcctcaagctgctctcaatgttttcttttgtctagactgttgttatatttgattgtgcttcgtccgtgaaaggctgaacgacaggtggaaggcgcagatttagacatctccatcgagcttagagtcgttgttttcttcctctgtttgcatatctgccgaaactccagctgcacctgcgtatcggtcctcaccgacagcctctctcatcattctctccagccgatcctataagacaaaagataacatgttacctatgtgagtaaatatcctgaaaagaggggtaacaaatcaaagagggaaaaacatacaggtgaaatactcctgcttcgacttcgccaactttcacctccgtcactacccacactaccacttctactcctgcttctacttctactcctactcctactcctactcctatctgatccggcactcctactaggactcctactgacaaacctctccctgtcttcgtcctccctatcacttccatcacttctgctcgccctgcctctttcctcgtcatcttcttcatcgtcaccgaacatcttatctcctaaagctgattttcgaggaagtagtccctcagtctcctcgagaacagatcgtttggtcagacgagggaggatgatgtcgcaaactctatcctctgttagaagttgatcgacaaactcatcaaacggtacgatcgaatagccacctgggatgcaaatgagacaacaggaagaaaagacatcagttcagtcagaggtttacagaacgtaatataacgagcgctgaagtccgaaggagcagaaagacgaactttcatctctgtatcgaagttttcgatagtctttcaggagtggttctaggatctcgtagacttcaacagactggaatgtcaatctcacgtaaaatactgccaccgcacgaagatacctatacacgagtatatatgtacgtgttcatgacgcgcaattggtcaatgatgtgttctttcgagagaagatgatagattgaatactgacttgaattcttcggccaataggtattcaatcagaatttccttatctggttgaagttgaagtagcttgaggacgagacaaagaaactctgttggcttctggttgccgtatgttccgccaatattctgtatagcaatcgctttatctatcagggtctccgctgatgattatttggatgaggagaaaacgaatagttcgtgacatcagcttcgattgagggttgttccgaatcaagcgaaaggatggataacacgacgaaccagtcaaggcaaaacagtgctccttccagtaaatggaatcataaattcttgctctgataactttctcaacaagactctacccaaagacgttaagacaaaaggcgtgacttcaatcagtgtcatcgaacacgtcaagtctattgcgagggtaagcatgaggctgtaaaaagcttacttgagggttgactccgtggatgtttttatatcctttttgagtgacgttagccattttggttacttgtgtgtgtgtgtgtgtgtgtgtcttaagagctcgaatcgaacgtatgagtgatagctaaacccagaagatagactacacgttggctgggatggatgggtgatgagagaatgatgtatcgttctctgctcgctcttgttttcaaggtaaccgtgcgaagcagtctaagacacgctcgaattcttagcacgtaaaacgcgtctacatttttcagaagcgagaccttgaggaagataatctgactctgttgtgcccttccttttaggaaagatgctgtacttgttctctgtttctctctttcgttgttcctctgctcctgtctgaatcgaaaccgatgacatatatttatgttacatgaagagctagcagtctacttgatggtcattcagcgttgaggaacaaattgtcagttgcgaagcgctaacagctaaagctaatttatctagaggcgaagcagattatgatgatgatctcacatttgccctctctacagactttctctctattgcttctcatcctgcaagctctctaccaatctgcccaataatgaactctccatctctccttttccaccgttctctcttgatcgagcttggaatccggcgaggaatgcggccagatgagcgtgggtatcctcagcaggaatagggatcgttgagagcgtattgagaataagcggaggagtaagctgagtgtccattgttcaagtgtctgttcggatgatacgtatgagggtatgtgagtgtgtatgggtttgtagacgtgtgaccgagtgtgaagaatgtgtttgctttgaaaagctgaatgagaggtattagggttaaattcgatacaagtcttacatcagcctcagcaccttatcggttgatctctgacgtcttccctttccttcagcattctcctttacacagacatccgaactatcaatcatatcagtcaacatgacaagagcagcagcagcatccatcttggatacagatctatataaggtatatatacgtcgctcagtgtacgagctctgatctctggaagcaagcgtaccaccaactgacagccgttctccgcacgcgaccacacatcgttattttccacaagctgacgatgcagcaagcagtcgttcaatgtttccccaacgagacggtcgagtacaaattctataaccgacggccagacacaaagttttcgcgattatcctttgactggttttcgactaaagttcaaggtacgcatagatggtatttgaatgtagcctcttccgcccgtcgcgctaatttcactcgatccctcgtccttcgaattttagaactctccaaggtcaagctttctaaggacgagcggacatggcttgagacgaaatgcccatactttcaagcgacctacctcgactttctacagaatctgaggctctctcctgaagatcaggtgactgctcattttgttccggtctctgcggatgaagtagatgttggagacgtcgagatcacggtcaaaggcctttggaaagaagtcatcctgtacgaggtccgtgtcttattcgcaatgtccatcacatttgaaagtctagtcagacatccctttctgatattcaaatctcgttaactgttcaacaggttcctctgatggcgctcctttcggaagctttcttcctacacaccgatacggactggacaatcgattctgcaaaaggtgagactttcatcctctgtgtaatcacttcgtttatgttctgaaatggcttacgttcttcttctgaatcaaactttacgactgaccgtgacatctcacagataatgctaagagcaaagcggctagccttctagcacacggtatcgcgttttcagagttcggaacccgccgacgtcgatcttatgaggttcacgacctcgtacttcgcggtctcttggagggacaatcagatgctaaatcaaatggatattccggagctggaaggctcgccggaacatctaatgtcagaattctcagcgtttctctttctcgaaggcgaattatattcactgaaaaccacctcatcttgaacatacatgaacaggttcactttgcacataaatatgatctaaacccagtagggacgatagcacacgaatggacgatgggcattgcggcactaaaaggatacacagatgccaatcccatcgcgttagatctatgggagtctggtgagaaatctttgtcgagaaatgtatatgcgcgacgttcagtatatggcttcttaacaagtggtctgatatctttttctcatataaagtttacccaccctctcccacatcacctttacataccgctctcaccgatacgttctcaactcccatcttcttttcgacatttactgccgaccgagctcgagcgtggcgtggactccggcaagactcaggagacccgattgagtatgcaaatctggcaaaagagacgtatgatagattgggagtcgatatgaaggacaaattcatagtcttctcggatggtttggatgtcaagacgtgtgttgatatccagaaggtccgtcactgtctcttcctcttatttggttccacccactcttcttcgagtgtagcttcccgtctatttctctgaatcaagcgggcaagaggtttaacgggcataacactcggttcaaaggcttgcaaagagattcagataggagcgacattcggaataggaacgttccttacgaatgatttccatcgtgcaagtgattcaaaggcagactcgaaagcactcaacattgtgcgtcccccctttctttcgctttccactttctctccctctcttcaacttcctggtcgaagagtacgttctgaaaatttcattgtttctggggatcatactactcaatgggaggtacttaggtgatcaaattatcgatcatcgatggaacagactgtgttaagatctctgatgacttgaacaaagtctgtccttctctctcccttaacaatttatttttttagaattaatactcactcctggtcttttgtgtatgtttttgatgttcgctatctcgtagaacacgggcaaagcagaagttgtagccgctgctaaaaagacgcttcaaatttagtttagactcccgttgactccgaatcaacaagaaaatggaaatacgaacgaggaggcgctaagaacgagaaacgagggttgtggctttctgaggattttgatttgctatcatatagattggactgatttcttagactggagaaaccagtcaccgataagagacaaatatataaaaaatacttctcgtggaacacgttgtaaaggaaagaaataatatcgttccatctcatccaattatacaatccaatgtctaggtctccattggtgctccccctgtaatcgatgacgagccagcagcagcttctcttgtagcttgttccgctcgttcccttgcgagcgcccacttaacttccttgacatcctggtactcgtaccaaagcgccgagagatcgtagttgtcgataaactcccaaccagtctccttgacgtgatacagattgattgtgtttccagagtaggcatcccgctagatgtgagaggagaggtcaagatatcaaacgttaaaggccaagaacgagggatgtaaatgaagatgttaaatatcaaacttacgtgaccagcagcgcagatcgaccttcgtcctaactccttagcatcatcatctgataaatcccagttgtatccctaccgacccggcccggttcaagagaagcgagaaatgaatggtcatacaattgcacgcgtcagtattgaaatagaaccgatcctctccatgattcatcatttcttttctcttgcgtacttttcacacaaggataaccaaagcaagtccaaagctgcacaagagtacgcacctgatctaatactccataagcaaaggtcgatccagaaccgactgaaaagacgtcaccttttaatctcgaaccgtccgaatccacgtaatacaatgctggtccctatgtttcgatcgattcataagacaaaacgaatgccagaagcaatgatgagtctgtgtagtccaaaaaggcgtgttgacgtacagacgtaccgtcttatcccatccacagatcattgttcccatactaagtcccatacccttgtacgaatacaccaagttagaaagatacttgctggcagctgcgaccgagatcctctccttctctcgaagctcatgcagcctgcattgcattccaaggtaggtttcccagtattgacaatcggctaagggggaacatggcagcaaaatggagggaaaagaagacacagagtttatcagaaatcatacaggagggacgagaacatacagagtagaaaagaatgtaccagctcctccggccatggttcccaaaagatacttgttgatctcgattaccttcttgaccgttcccgaggctgaatgaagcgtatcaggataatcatagatcagtcagcgctaaggattctaccacaacaaaatgagggaggagtcgataggagtctttcataccaatatagctccctgcggtcgctcgactatcgactgcaacgatgatacctcctttgtaccggaacgcgagcgtggtggttccatggttgagcttgatcttgcatgatggatctgagtgatcatctgtatgaagtctaaggaaagctgagggctgtatcggagtgagtaggccaaagtgtcaggatctttcatgaacaagagaaagggaaggagaatagagagaacagctgcaagccaaatcgttcatccaagtccctctcaagtctggtttgttcatctctattcaaaccgaggtgatttggcgacgatctcttcctgctcttcagccagaccggttttgctcaaaaccatagcaagagagaactttgtcttgaattggttccggaatgaatgctctagaaaggcgatgcgaacataaaaagatggatagaaagtcattcaaacagtatgacttacatcaggaacagcagggactccgaatcgaacacccttgtcggtctcgatgtttccaaacaagttttctgtttggtcttgttctggacgaggtgagaactgggagaggagtttgttcatgtcgtatgtatgtaagtaaggacgagagtgatgggtgatgaggtgatgaggaagagatggatgtgagcagaaaggtaggagaggaaagtgatgtggatgagattgacagacaaggcggcgtggaggtctggtctgtcgatggttacggtgaatggttacaacgcctatcgtgccagtcagagcgcaaggcaagtctctacagggttgcgagtgcatctgatggtctcgagaagagaaagactgtgtccgtacaagattcgtcagcccgattagctatatgctcaaggtacaacgagtcgaaagtaggatcagatggtgggaaagagcgcgatgggtcatggtacaaaaacgatattcgactacagagttccattagagaatctcactatatcccttgatagacaatccggctgtagtccttaattacagaaccgactaatcattaatagaaaaaacgaacgagcgaattagacggaaagaaaagaagcggaaggaagaaaaaagtctcttctcttctctcatcattacatccaccttcgttctgtccaccaagcatcctctgttcatcagaccatcgcacacatctgacccatctgagcgtacatacatatatacatattcatccctataggacaggcgtcacgtaatgttccggccttcaatcctttctgcggtgtctagaccgttggctaggcacttttcgataaccccggccacccagatcggtcgtcggtcatccttgacgagcccagttcactcgtatcctaccctgccagacatacttcctattcctcttcgatccatcacctgtccatctgttccctcgccttcggcctcctgtgctcctcctcactatcttcgaaacccactggatcctatccttcacccggattgtatcccattcagcacccttctcgagaccgcccgaactcaatcgttcgttaggttcccactcgcctcgtccgccttgcccactcaggcagacagcccgctggagggtcatctcaagatgtatggcaagcggctcccagcagagtatgagactgctgccagagaaggcgacgactcgttggacgcttccgaacgacgggcaaagctattcgagtgggagaggtgtacttcctttagggcgacgtgcatgaaacgattggcggagaagaagcttgtccgaagggccatcagagtcggcaatggcagggaaaacactctcgatacaactaccgctgtgggtgggatcctgatggacagtgtgaaacgaaagagaaagaaaatgatgagcaagcacaagtcagtctaccccctcatcgctttcttcctccgaactaggctcctaggctctggtatactcactgtattcactttttctgcatccaatcattccttctcgtcttaccagatacaacaagcgacgcaaggtatgaatgctgatctttcctctgtgccatctcatatatcccagtcatttttcctatcagtaaaattcactaaatattctttctctttactcctttgttctgctttcaggctacccgaacggctcgacaaaagctcggaaagtaaagccctaatagactggatcagtaaaacgagatgtactctagccgttgtttgggagcactcttttctctgccctggatgtgttttgtgtcagtctgagaaagacttgacgatgtttgaatcaaaaacaatgcatgaaatataccttctaatattcttctctttctcgctatgacttgctgcaaacgacctgtggattgtttacattgtatttcattaactggaatgaaagaaactttcagatcgccccttctgtcctttcttgaccttttcacatcctcccacctccgatcagcccagtctgttttccttttccaccgccggaagcctcaagtttctttcgggtgtcatcaaaccgacggacgatgagctgacactttgtttccttgcagagcggtagagcgagacgttgaatgtcggatgagaacaagctcaaaccagaggctcgctcgatttgctccactatgaacagtgcacaaggaggatatgtatttagtcgatcggagataaaaggaaaaaaagaatacaggacgtaagagaacaaagggatcataccgggcacttggaaagactcaagaggaacctcatccctttgttttcgtttccgagatagaggttatcagaataattaaagttaagacagtcagcgacgaagggaactagatccaacagactgctctcaagaaagaacttgatagtatgaaaaaggacatacgggatgatagcattaggcagcacgaacccagccatgctcacttccctgttgatggacttctttggatcctcacctcgaggcacacgagacgtcaagatgactttggagaaatgagtgggcacagagatcgaaggtgggtttccgatcacttcgtgtgtcacacgccatttcccatctgccaatgattttgtcggcaagtacagaggaatagtaaagacgtaaacgtctgagaactcgttcgtcaactttcgacaccactcctctaggtaagcccagtctatagtttgataaacaaaggtcagtactgatcagtctgcttgattaggaaaagagaatgaataaggaaacgagcaaacgaacagtgtctattgaagccatctcccacctgaggagcgatattagacaacaagaacgtctcgttcatcgcttcctgaaatcccataccattaggggtcagcgtttccttcgccgcgcgaatacgatttaaaccaaggacaagggattgctcaaacctgactgatcttggcatctgccgcaggaaccatatgtcctctgtcatatccactcctgaagtagtccttaagcttcgccctaaagagacccgggatatcttcatcttcttcgaacttagacttgtctctcgaaatcgcggtggtctcaccgggctgaacaggggctttggctaggttggcgatcgtgagatgttcagccgtctaagaggcgcaatacgtacgatgaaaacgtataatatcagccaaaagaacacagagcaaggagagaagaaagaaggtcttacccaagcggctaaggaaatgaacggagttgagatatgaatttgatgagctcttataggttccttgtcggttagcaggaaagaaaccccagacaaagaataaccgactgacgatgttgcaaccgtcgatcgtaagcggtgatatacctacacagacataaagaccgcggagtaattagttcttatctaacgaacagaaggaaaaaaaaactctgttaaaagcacacatacgctctccttctcagaacgtccgaggtagaagcttgttgagaaatcccaaaagagagaagaacaattagggctcatcatcttccttctattgatcttgaacttgaaacgaactgactgggcactccaaatttccaaatctctccatcgactggcgttctgaatcctgtattcgatccgatgtccaagatcgctctggtctcgctccttgcctgtcctggagtagaggcagaagaataaggagcagaaccaggagcaggcaacacggtgacctgtccaggactcggaacggcgatggcaaccgatccaggcttgggtttggagggaccagtcagataagcggtcgttcctacaccgaggaggagacctgtggagaatatagccgattggacgaggaccgaaggggccatggtgttacaggttttgagttgtgggagacggacagggtttaaagtagcccaaatgagagttgctttgattaaaccttccgaacggttgtagagctctcaaattatgttttaattatcgggcgccatgcctttacaacaagcctgatagttatttggttttcatatgttcgcttcatctctggtccaaaatagtgataataaacatgaatccaaacagtggcagaatcataggaagaaaagaatatgtatagaaagaaggcaagatagaaaggaatccctcagtgacattaagggtaggccggacccgacactcattgtggatgcacgatggcagagcacatgtgagcttgactctaattgtgttggcaagtctcatcatcaggattcccttcttactttgtatataaatgtgaattgacaagaaaagatgtagatacggaaacattgagcaggacatagatgatcagggttcagttttgaaattgtcagtaatagctggctaaagaatgagaaaaattaagataagtcttcataaacacggactaaaataagacccaagaagaaaggaacaactcactcagtctttactttctcactccatgtccttcagcatagtaaaggacaaggagcaagagaaaggaaattagaaagaaaaagacacgaggacaatggtggtgaacagaaggaaaaagttagggaacgcagagtttttgtactcgaattttcgaaggacgccacaacataatccacgtgccccatcatgcactgctcttctctcatggtgactacctagtcagcgaattttgtctttctgattaacacctggataactcgaacacgtcctagctcacactcacacaacttcttttactccaacttaaacaatatggccaatcctcgtcgtaagtaacatttcaattgggaagcaggtagagctcttgttgttttctcttaactagtctgattgcaaacgttgctctattgtcggtctatccgtcatccagagcgaaataagtcccgatctggcgcgaaggctatccggacgacgaagaacaaatcttcggctaaaaaggttgttattcgaggaccggctcctcttgtcgctgcttgggacaagaagaagactgtgcttcaaaagtaagctcctgtattttctacttgatgttctaaatgttcttcttcctctcaaaaaatccggctcggtaccacacgcaacggcatggtaacttactcttatgtgtgtacatcctgttatctatcctattcgccacgtttctcgtcgctcttagctacacagatcttggtcttctctccactcttgcccctcgtcgagcgggtggaattgaaaaggagattttccccatctcgtcgtccaaccctactaccaagctcgctcctcccaagatcgaggttacatcttctcttccgtctggaaagatcccaaaaggatatggaaggattgtgagggacgaagctggaaatgtggttgacattatcttggctgaggaggatgcggaggagatggaggttgagcaggagcctgaggaggacattgggaaggggaaaggaaaggcaaaacaattggtcaaaggtttgtgcatatttcctttccgtttttctgttctcctttctctctcctccccttcttctggaaacagcaacctaaacatccaattcgctgtatcaaatcagaacttgaggaatacgccgcttcccgtccatcgagcaaacctcttcgccacaccactcctgccgaacaagagttccttcgagctctctacgccaagtacggccaggacaccgctgcgatgagcagagacatcaagctcaacaagttgcaaaagacgaaaggagagattgagaagagtgtcaggagggctggtggttgggagaacgttatcagagattgaaagggaaggaagaattagtgtgatcttctcatctcctcttctttcatttgggcctgatggcgctcagttgtacattactctatccataccgcatctcttttgtttcctttgcgacgagccgttgtcctcactttattcaagtttacaatggcaatcacaataaatcaagcaagaacagacaaataagccataagccctttctagaacttgaaatttccctcatcccctcttccacttgtttttcctctatccttccttggaccggcctgtcttgatttcttcctacccatctcttccgccaccatgtccgacaaatcttcagtgtctcgactagaagaaacggccgaggcttgccgatgggcttcatatcgggctgccagttcttctttgctcatcgatgcgagctccgatggatccaacgtgagttcgatcgtacccgccttgcgctagagacaaggagaaaagattgggatcagacctccaaatattagagagagagaaaagacattgccggggagaattatttaaaaaaaaagacaaaccttgacgccacggtcctcttcacccaataccctggtgggtgctgatccattgagatcatagcccctctcacttcccatgaaacctctgacgccaatgtacttctcctcgatgactttgtacaactgttgaggctccacactctccgttcctgccctggaaaacgagtcctctctgtcttttcggatatcaaggaattctggagtctccataccggaaggaacggtagagattgtgctctgaagaccagaaggagtctctgttccggctgcatcagccgaatcagggaagatctcgggagtggaagatgtggttgattcatcatcggaatcagactcttcttcttcgtcttcaggttctaattcaccccaaagttcagtctcgatcggcaacgcgtattgatcctctgcagggttcccttgaacaccaagcacgtctccgtatatcggccggttgtactcgtccactgggggtcggccccatcctccggggtggaaaccccattgggcaccgttaggaataggcgcgttgagacctttgattcgaagtgacgggtacgaaggtggtggtccgtatcgctgcattgagatcaaccacggaggaggagcaagaggtgggatggacaacgcctctgtgagttcttccgacagctctcctggtcgtttctctttcaagtcggcctcaagctctttcccttcgtagtagctgatgagagaagagaaggtgcaaagtgaagccataccggtatcagcaaacgaagtcctttgattgctgaaaagcattcaaagaaaactacatacatctctccaaagtccgtcatcttgggtttggtcgcgaatcggaaaaacgcgtcgtgaagcttttggtaatcgatatcaatcttgcccattttgggctgaactcgttctctcgtcttttgtttcaagctctgctccttctccttctccttgatagcatcccgctgggtagcgattccggtatcggcgatgtgcgctgagagatgttaaataagaacatcagtacatacctagacgtcaggcagtatgttcaaggaaatatggacaaacagggaagttggaaggctgctttctcgactcctcgcttgccttggagataatctcgcttggctgaccagtggccgggcacagggacagtacttttgatgcaaagacgcgtgaatttagctgtagtaacttaagggaaccagacatgattgagccgctcttaaaaaggagggaactcactttcggtacgacttgagttctacaagtaaccttggatcacgagccgttggatccgtccattcgatcacttccggatgggacaccaatgatttcagatctgctactgttaatctctgcaaaggtttggccgggccgttcagttcttaatctttccaagccaagtctggattcctccacgagtgaagcagactcagtcaaacgcgtgcgagatcagggggagaggacgaaccgccagctttctctgcttctttttgctcaacttctctttctcggctcgctcatcctgatcttcctcgtcctcatcttcttcgtccgaataaataacctctcctttactggcaataccgtctccgcccactccgtcgacctgttagaattcgaccccaacatgtaaagagataggattcggaaggcatcagatatcgacgaaagcggaatcacaacgtcggtagtatcaacacgtaccggtgtagactggtcgtcggcctggaagcgttgaaggacggaagcaaacgaagcgaacgcaggatctgaaagatcaatggatgctgtcagatcttcgaccgaggtagcaggtgtctatttgaacccaagttacgatgagcccccatatcatagaaggaaaggcgagaatgcacacaagtcagtcgataggcgaggcggaaagcattaaaagagttctgtcttgtactcttgagagaaatcgatgaggacttacacttagctcgctctcaacttcactctcggcatctactgtactctctgcatccgtggtctctgcgtctgtgtggtctgtatgtccattgggtgtttctaccgacgcattggccttcttagctttcttcttgtccctcttgagctgatttcgagagagcttctgaggtctagcctccgaattggttgacgatgatggtggcggcatgatcagtcagaaattgaaggatatgaaagctgaccaaaggatgaagaaagggtcttgggtcctaaaggatgtggatcgcaaataagaaagacagagacagagagaggatatgagcgatgtatagtgatggttacagatcaggtgttacgcgtctcgctcagtgatatcctgttcgatttacgcaatctcttactcgttatgctaattcctgatactcattgcttagtctctaacacacttctctattgatgttggatactcaaatatcggttctttgccctgattgtcaagtacaaattcatctcttccccgtgtctatctatcgagaggtgctccatgcatcctcagagatgttcaaagaaaggaaaaactctgtgatgcagtaatgtacttttctggcaaagtgatcaaagttcctaatggtagacatcagctccgcgtcccgccctgatatccttgaaatatacttcatgatcacttcctattttctgcccgcgttccttccgatcttatatgtagtttagtccaagcaagtgacgcacttctatagctcaaggtggccattattttcctgcacatgcggatcttccacgcttcagtttgtcagaaccgctcttgcgcgcggacaatgaaaagtaaacaaagtgttaactacctcatcgttgaaatgctcgtatgtcagttctcctatcttgtgattctgaaaaaggcctgggaagatctagatatttgcaggctctgtagttaactatcttgaaatttttgtggaaattacgcgtaaagaaagagacaaatgacaacgagaagggcaagttcaggagggagaggaatcaaagaagaagagaaggatcatcatccacacaaacgaatcgttgctcggagatgtcgttcacattgaaacgagccgactctcggcttagttgtcttttgtatcactcttgttgttctttaaacacttcttcactcgctctacggctaccagtattctggtttgccatctccattccgcctcatccatcaccattcctcgcgcatgcgctcttacctccttcgattattctaatttgcagtccataatttacattgcactatttgatgcccttctctttcttatctatcagaccttatttactctctctctctctcttttgtttttgatcggacctgtactcggaaggggcagaacatacacaatcaccgtttgctggatagccggtcgtgttaaaacaccaaatggatcggacgtaacccgaatctggaggttactaaccctaacggacggttgaaagagatgccgtcctgctgcgcttttttctcccccccccttagccgtcttttttcttgcctttcgttttctacccctcttcttttccttcctccacgcttcgtctctcctttttttttttcttttcttttcctctcggtagtcgttcgacctcatcctctctcaaactctacatcaacatcataatgtccacctacagaccctccgctttgttctcctccgctttccccatcctctccatcgccgagaagggtgagaaggccggagctttcctcgaccagaaggccgctgaggccaaggccggtcttgagaaggccgcttctattggtgatcttaaggcccagcaggcccagcaggccgtcctcgaggcctctggcaagaagcccaccggtgtcgacctttacgctcgattcgctgttgccggagtaagcttcttttctccttatcataacagcgtcgtccattatagtatcatcagatggtcgagcgatggcttgctcctaattttttccctctgccccctcaagggagaggaaaagattaggagtataatatatccctttacacagatggttcttgtatgcctgtcttctctcaaagttctcatcactgacccactttgcctacacacatcatctgcttcaacaggctcttggatgtgccatcactcacggtcagtccatcttgcttcgattgcgtaattcagagttaaagttgggagtactgagcgatggaccgcccaattttcctctttacgtcttcctttccatctcttcatattctaggtgccgccactcctatggatgtcgtcaagaccaagattcagcttgagcctaaggtctacaacaaggttcgttaattgatatctctagtcgtctttcgatcacctacctctatttttctcgcttggcaaagttttgttgctcatagtctctcccttctgtgtcatctctctttgtcttcttccagggtgttatcgctgccgcccgatccatcgtcgccgctgatggtgctggagctctcttgaccggtcttggacccaccattgtatgttccgctaccaatttgcatatcccattatagtcgagagctcatcatgcataacctctctgtcatctctacataggtcggatactccatccagggagccttcaagttcggaggatacgagttctggaagaagaaggccatgtgagtttatgtgcttctgcctgcttcgactggataggctattttgatactgacattgatcctgctgttgtctatcaatctagtgactactacggtatcgaggctgcccgagagaaccgacaggctatttacctcggagcttccgccatcgccgagttcttcgccgatgtcgctctttgccctcttgaggccgtccgaatccgattggtctcccagccttctttcgctaacggtcttggtggtggattcgcccgaatcgcgcgagaggagggtcttggaggattctacgccggttttggtcccatcctcttcaagcaggttccttagtgagtatcggtcgttttcatacctctttaacacaaaatgtgatctggatacttagactgcaagttcacctcttacacagcaccatggccaagttcgccgtgtacgaggttgctttcgagaagatctgcactgctgccggcaagaagccctctgagcttaccgagggtaccaagactaccttcaacttgggagctggtttgatcgccggtttggccgctgctttcatctcccagcccgctgatacccttctctctcgaatgaacaagaccaagggtgcccccggagagggtatggtctcccgacttgcgggtctttccaaggagctcggtatcaagggactttacggaggaatgaccgctcgattcgtcatgatcggtaccctcaccgccggtcagttcggtctctacggttccatcaagagcgccctcggagctactggtggtgtcgagatcgctaaggcctaaataaggttgtaagcagtaagagagaaagcctgtgggtgggtgtttaagtgagagagggaggagaagcgtcctcccttttgttccttgttaaatctgcgaattctttcattctccctccttgttctccttctctcttttgtgtttcttttgcacgttcccttgtatatgaaatcacgctcggttccgccttgttcttctcttttgttacgtgtcttgtttccccatcccctcgcgccttttgcttcttttctccatcatcttctttatccttttttttttctagaatgtatcctttggattgcacattgtctctgaagcgttggcacaagtgaagtactacacacattggtatgaagaaacaaaatatgatcctggcatgtttgctgctctaacagtatatctttttctgaacgtgttttcctttcttcgtttcaaataagacgcatgacatcgagaacagtaacatgaaagaggaagctagttgaatacccactacagaacaacaaagaaaaaaaaacagagaagagacgaaatcagtcacagtcttttttcaaagtttttgatgcaagtcgagagcaaaggatgaaggagaagaaggtggtgaagtggaatcagcgatcttggtgattaatgttagttctcataggctagatgggcctctgaagtagcaaatatatggttgatcatcattttgaagtggtagccaggcgagctgcagggaaaggaaggaagtgtatgcacaacagaagaggaaaagacctaccgataccagacaaaagagaggagacctcaactgatcatatgggagacagagggagaacgaagggagaggaggggtagtgggagaaaaagaaatttggcctgaaaaattcagttgtccgtttacagagcgagggttagaagagccgatatccatagcgaccgtcgtcaagggagccgacgcttagctagcgggctgcggacaaggcggattgaccggaggaacccgtgttgtgcctggaccgctcatttcaccgaactcggccttcgggtgtcgacggaatgatgatgggcacgaacctcggccgaagctacgagggcggcacagatgatctctagatatggatgctccgagattagcagtgagctatctgacatatgcatatgtgcatccacataggtgaagatgaatgtatgtttctagttaaagaggtagagagaaaaggagagagaaagaaagaacgatgggaagagagaaagcaacacgaagacgaaaagtaatataacgctggatacaagactgaacgaattggaagtgatggctgggcaaaaagcgaaggacagagagagtgacgagtgattaggcagcctattgaatatttccaatgacctcctcttcttatcgactcatttgtcttgaaatccttttctcctcctctcctctcggtcgctctttcgtccgtcttccagccaacgtctcttccttctttctttcttcttcgttcaaataggtttcacaagcacacacattcatacatacatccacatccacactcttgacgtttctctcggttttttttccttcgttggaaggtacgtccctgccagggttggccatctcttcttactcttctcggatgaatatagttggaagggccttatcttttccatctccatcgcatcatcagccatgaaatctcatctagctctctttttttctttttctttctttttctttttcttccttctttttcgtctctccttcatccttgtgctcttcttggtctctattccaactcgattccttcctccttcttgattctttcttcatatagaaaggctctcctatatctactctgaaggattctttggatacatccgcattccatctcaattcaatacacctaacgcacacagatgcagacgatcgcccctatcgaagcttggacggctcatctgtcgtctgggttggatgctagcatgccttgtcagtcgttcatgctctctttccattcttctgcctcttgttctcattcgatttctccttttgacgtgtcctgactgtctatataaccacatagccacccctggaacgcctagccacacgtaagctcattctgcgtcgaccgccaacgcccagctcttctcgttctcatgctctgttgctccttcctttctctctttctaggatccaaaacatccgaaagaaggcagcaggccatggtggaccgctcaagaagcttatggttgccaaccgaggagtacgtgttgcctttttctcatatccttgttctatacttcccggaccgaataaggaacgcgccccacaggcctcaatactcagaacacgcgagctaggcactgagataaatcatttcttttggggatgctctaggaaatcgctattcgaatcttcagaaccgctcacgagttggcaatgactacggtggccatctactcttatgaagatcggctcggcgcgcacagacaaaaggtcagaagcgccccttctttctttctctctctctctctctctctttcttcgttctctgtctccctgtgttaccttcccccttccttttcttccctttatcttttctttttcttgactgcctttatgttgctcatctatgggagaaaatcagcttacaagttatatcttcacgtttgtgaaccctcctctacatggactcaactctccaggctgatgaagcctaccaggttggaaaaggcatggcccccgttgccgcctacctcgcccaggacgacatcatccgaatcgctctcgagcacggagtcgatatgatccaccccggatacggtttcttgtccgagaacgcggagttcgctcaaaagtgtcacgacgccggaatcatttttatcggaccgaggtccgatgtcattgccggcttgggagacaagacaacggctcgagcattgggtgcgtcccggtcccattatatcctgcgcccttttacgtgctcatcttccgaacttaacactaaatttaaccaacagccatcaagcacaacgtgcctgtcgtgcccgggacggagggagctgtctctgcctgggaggacgccgaggggttcaccaaggagtacggtttccccgtgatcatcaaggccgccttcggaggaggaggtcgaggtatgcgagtcgtccgagagcagtccgagatgaaggacgcctttgagcgagcaactagtgaagccaagagtgccttcggtgacggaacagttttcatcgagcgtacatctcatctttgccatcaacttgcccctaacttgctattgacggcccagctgactcgacatcatttcggaatgaacagggttccttgatcaccccaagcatattgaggttcagatcattggagatgatgacggcaacatcgtccacctctttgagagagattgttccgttcaacgacgacaccagaaggtccgtacactctcacccatctctgaatcgcaataaattgcatttctctgacgaagtttctatctacatcccgatacttcacaggtcgtcgagatcgctccggcacccgactgcagccaggaaaccctagacggtcttttcagggatgctaccacgatcggaaaggctattggttactccaacgcaggaacggtcgagttcttggttgaccagcagggtcgacactacttcatcgagttcgtcttcgatcttcctctcgtttctcttcctccttgacttgattgatatgtcgcgacttttgtcaggaaacttacatctcctgttctttttcttcttgccgctgtgtctaatagggtgaaccctcgaatccaggttgagcatactatcactggtgagtaaaactcaaacgaaacgcgtgatcgctctcctctttgcgctgcgtagaagctcaccgagtgtcctatattccgtgtccccgaacgatctacagagtgtatcaccggtatcgacatcgtcgccgcccagatccagatcgctgctggagcctctttggagaacctcggtctcatccaggccaacatctccaagcgaggatacgccattcagtgccgagttaccactgaagatgccgccaatggtttccagcctgatactggaaagatcgaggtctaccgaagctcgggcggaaacggtgtgcgactcgatactagcagtggtttcgccggtgctcaaatcacaccccactacgatagtttgctcgtcaaagtctcgtgcagcggagcgacctacgagatcgccaggagaaagatgctccgagcgttggtcgagttcagaatccgaggagtcaagacgaacattcctttccttttccggttgctcactcatgatgtcttcgtgtcaggtaacacctggacgacgttcatcgacgacactcccgatcttttcaaattggtgacttcccagaaccgagcacagaagttgttggcttaccttggagatgttgccgttaacggtagctccatcctcggtcagagcggacctcctggtttgaccgatgaggccgtcgtgcccaagttcatgtcaaaggaggacccgaccaagccgatcgataccaaccagccatgtctgaccggatggaggaacatcattgtaaacgagggtcccgaggctttcgctaaggctatccgagcctaccctggttgcttgatcatggataccacctggcgagatgcccaccagtccctcttggctactcgactccgaacgatcgacatggctaacatcgctcgggagaccagccacgctttgcagaatgcttacgccttggagtgctggggaggagccacatttgatgtttccatgcgattcctatacgaggacccttgggagagactacgaactcttcgaaagctcgttcccaacattcctttccaggctttggttcgaggagccaacgccgtcggctacacttcgtacccagacaacgccatctacgagttcagcaagcgagctgtggagaacgggttggatatcttccgagtgtttgattctttgaactacatcgaaaacatgaagctcggtatcgatgccgccaagaaggctggtggtgtggttgaggccgccgtttgttactctggtgacctttctgatcccaagaagaccaagtacactttggactattacctcggcttggttgaccagctagtcaaagagggtatccacgtccttgccatcaaggatatggctggtcttcttaagcccgctgccgctaccacccttatttccgccatccgaaaggctcacccggaccttccgatccacgtccactcccacgataccgccggtattgcggtgagctcaatgttggcctgtgctgctgccggagcagacgtagtcgatgtcgccatcgacgtcctctccggtcttacctcccagcccgccatgggagccgtggtctcagctctcgagcagtctgacctcggacctggtatcagccacgagcacatccagagcttgaacgattactggacccagatcagacagctgtactgctgcttcgaggccaacgtccgtgcttcggactctggtgtgtttgaccacgagatgcccggaggacagtacaccaacctccagttccaggctacccagctcggattgggcacccagtggacggagatcaagaagaagtacatcgaggccaatgagctcgccggaaacattatcaaggtcactccttcctccaaggtcattggagactttgctcagttcatggtctccaacaagctttccaagcaggacgtcctcgaacgagccgacactctagacttcccaacttccgtcgttgagttcttccagggacaccttggacagccctacgaaggattccctgagccccttgtgagcataccgctctgctttggtttgcgactggcgcttgtttgtgatttactgaacgagccgtcttcttttctattctttttcttttctttccttccattttagcgatccaaaatcatccgagacttgccaaggatcgataagcgaccgggactcaccatgcagcctctcaactttaagaagattaaggccgagcttcgggagaagtacggtaagacgatcacggactgtgatgtcaactcttacgcgatgtaccctaaggttttcgaagagttccgagggttcgtcgacaagtacggtgatctcagcgtggtccccaccaggttcttcctcgccaagccccagattggagaagagatgcacatctctatcgagcaaggaaagatgttgatcatcaagcttctcgctgtcggtccgattgatatgacgaagggcactcgtgagtgcttctttgagctcaacggagagacccgagcggtcttgattgaggacagagacgccgcgatcgagcaggtttctcgagagaaggccagcagcgatccaggttcggttggtggaccgatgtccggtgtcgtcattgaggtcagagtgaaggaaggccagaacatcaaggctggcgatccattggtcgtcctttcggcaatgaagatggagtccgtggtgtctgctcctgtctctggtcgagtcgccagagtggtcgttcagccttcggattcgattgctcagggagatcgtgagtcctatttttttttctctcgcaactgccgctcgatttagagaatcatgtcaatctgacaacccttcttttctttgttcttgggaaatttgaaacagtccttgtcgagatcaagcactagaggctttagatagtcaccttacatgctctactcaaacatgttactcgtttataaatctctttttggctcctcttcatctcgcctttctgtcggttatttatctcgttatatttcttgagtttaccgagtcgagtgtacgtttaccacgtctggttctaaatcttcttactgtccatcgagtctatcgtctggcgtagctcctgagagaggagcaggtagaggagtttcctgagccttctttaattgtatatgagcctttctttctatatcctcacaagtctttcgacctttttccttgtatctttcgatctctcgcctgttcgctttcagattcgtaaaagagaaaaccaccgaggacagatcggaacggaaacgttaaagttctcacaacttgaatagactgagaacaagaaaaaaagggaagaaacgaacgcaggaagaagaaggaatgatgggggaggaagaagagggcgaagaagaacggggtttacaaaggacgaagagggaacaagatgagaagagaaaagtgggaagaattacattatagagtaaatttgaagacggattccatatcaagtgtaagaaaaaggaaccaagataaacacggcgtgtccggcagatagggaagccaagaaggaaagagaggtagaatgagagggtaagatgaacgatgagaaaaaaaagagaaaacaggaggaaggcgaaaagagtagcgaagaggacgtgggggttcaagcgaagaaaaagagaaagagaagtcgaagagagacaaaggacaaatagaagaacgtctacgtttcgatcctaagcattcaaccaagatctttcctctcgcccgactcctcagtaacaacaccgacaactgcatccacaccacttaaaccaaggtcttcgtccgccttctcatctgattgaatatctcctacaccagtgcccgtgcctgagatagctccgttctcggctccatctgatgctgataacactccctgctgctgttgctgttgctgctgttgttgctgctgctgctgctgttggtgatgagccaactgagatagttggtcgaggtgatcttgaccgtgagaatgaggatgatcaagctcctgaggatgagatagagatctgttcggatctatatttgttcgcacgtccgatcgttcggttctcatcagtgttaatgccgttcgaagggccgcgttctcattacgaagctgttcaatcttgacttgggcttcttgccatctggagagatcaagggcataagaaaagagaataaatcggaatggtgagaaggctgctgcacatggatctgaggaaagccgatacatccttgctttatgtatgagaaaggtaaaaaaaagaggtctcaccttctgttggcatcagcttcgttttgttgagcgatcagaagttgctctgctttatccgataaatctttgatgtttctacgagcaaggaatatacatgttgttcaaaatattagcagctgaacgtgcacacagctccgaaccaagcaagcggcaaggaggtaaacagagagatcatgaagaccggacgaactgatctcttcgttgtctgaacgcccgttgagctttcctattctgctccgccctcttcgttttgctcaactctcttcctttaccttttctcccgtttccaccgccggagcttccttcaccctcggcctcaagatctccatgggcctgccctcccacatcggcacttccgaaatggtcgagctctcttccgtacggatcttccccaatcgatgactggatcccactatcttcgcccacaccagatgctcggtcggccaagagaggcaactgaccctgtccgccagtcgaatcgtccgtcggtccataaggcccaagatcatcggtatggtggagatgagggttcaagtgctgatgctggtgcgggtgttgatgaccgccctgctgaccgacgccaagaggggctgattgatgagcatgagtctgggactgtgagtgagcatagtgatggtcctgattggacgcgtacggatgggaaaccgacgggagggatggaagtgtgtggtacgtctggcctgcgagcggggcagaatgatcttctgaaggcgagtagatcgatggaggggaaagacgcggagagttgctttgtttacgctttttcgagactacaaggcaggtgggtttcattcattcgttaaatgcaggcagtatatcgaattagtattaagtagaaagaagtagtcaatgcctatttctgcgcgacgacgcgaaaacgaggacaaacctctaggtttcgaaggaccggcctttctgggatctaactcgtgatcatcggcgtcatggtcctggtcttccctatgagtggatgttgagtggaacgagtccgagaccggtagaggcaaatcttggattgttggttccgaagctgaacagacggcaagatcagtaaaggattctaagaatagacagcatgttctcacaggacgagcggttggtcagcaaaagtgtaagttgaaacgaagacgcgactatttctttttagaaaaaggttgggcagacgctcttcatcaatttccgaccgacagcgtccacactcagatgttccgcgtgattcactcggtataacttcgagatgtactctgctgagagcaatctgttcaattcggacgcgccttgctcctcatctatccatcgacttgtctgttcaagtggccgtcagaacgttacctcgcgtcgaaccatagattcgccggagttgtcatactcaagcaatcgtcgctcaaatctttaaacaggaaacaagagaaggaaagaggaaggcaaaggagaagaagaagacaacggagtgtcccttgaagaagaatgggttcttacctgaaggaggcgcgtctccgtgttcgtgttcttgaccttgctctgggtcggtagcacgttgatcatgatcgtccgttctgggaatccggtccaagtatgccctgagaacttcactcggtacttcgacgtgaccttgagagttttggatctgcatcggatggtgtcttgcctgcaatgtagaagatgatagagagagagtacacgatgagaagagcaaggacgacgatgaacgatgaagggaagatgatggttggtagagcgacgctttcggcaagttccacttacctaatcaaggccgagtctgactcagatcttaagtagtttattatgtcagtttcatatattcattcaactattcaaaatcatcatcaccttccaccgactctcgccgaagcctcgcatagagaacacgtcggccacgcagacacagcatacttgcacattcatccgcataggactgatattggcatccaggcgttcatactcacatactcaccgctgatatctcacgtactgaccattgaaagtttgtagattaattagaagagagagagagagagagactgtacggagggctgaatgtgtgtggagaaaaacccaagccccacgtaaggctgaccttcggatgagacaccaagctaataggaactcaaagaggaaaagaagggggacgatcaaattcctagcgcttctgcatgctcatagagtgctagtatcgacatcactttccgacaccttgtcttctcccatcgtgtagcctgaaaagttcatgttgcattccgaacgtgcgtaccaatgccgagagattctccacttggcagagtttatccacttggtttggttgcagtccaagatttattctacgttaatttaccggatggtcgcacgattgccaagcaggctcgattttttctgtcctatctcctcgttttcttctcttgtctcactctatctcctcacacacacgcagacggaacagctggcactgacctcgacactggccgttttctggccgaccgatcaattcctagtcatgcttccaaattcttgtgctcggtatttgcaaactggcgaagtcctcaccaccgtgcgatcacagcatgggcagatcaaaagaaggatagcgacgatgaacaaaaagtttgcgttaggtctctgctctataaagcccaacggtttgtagatcattcatctcttttctccttgtccatacagctcatcacacttctttctcctcttaaaaggcatttgattctcgccatatcatgccgacccttcacggtaagattttgtttcgtactcatggcattctcttcttcctacggctttacactcaccttatctacttgcgctctttgtcttgacagagtacgatttcttgtttgtctttgggttgatctttgctttcttggatgcctacggtatcggagcaaacgatgtaagtctttgacctttgaccaacggttgtactcaatcacatggcttacccttctctcccacaggttgccaactcgttcgccaccgcgatcgcctcaaagtctttgactttcaagcaggccatcgtcctaggaggtctgtgtgaattccttggagccttgctactcggagccaaagtcacggataccattcgaacaaagatcatcgatttgacactatttgaggataacgcaccgatgcttatgctcgccatggtgtgcgccctcgtcggatcttccgtctggctgacgatcgccacccgactcgccatgccggtctccacaacccattccatcactggtgccatcgtcggagttggtattgcggctggtggcggtggtgcggtcaactggacctggaacggtcttggaaaggtctttgcctcctgggtcgtcgctcctcttatcgccggagggtttgcctgtgtgagtctgaacaatctctttctctccttaattccctcttagggatcacttctcttatctatcatgattttcctactgtctgtcagattatcttcttgatcacaaagtatggagtccttcgaagggtcgaccagcgaaaggcggtcttggtcgctatcccatgttggttctttgtcactgcctctgtactcaccatgagtatcatctggaagggagcgcccgctcttggattggacaagcttcccaactcgaccatcgtccctgctatccttctcaccggtttcgttatcgccatcttgtctatagtctacgttttgccgtacgctcaccaacaagttcacaagaaggattacaacctccgaccttaccactttatcctcgggccatttgtcatgaaccgaccgtcacccgatcaggagctcaaccccaacaacttgtctgcgaaagaaaagattgatgccaacaaggctattgttgatgaagagaaatcttgtgaaggattggacgccgcttcttctggatcggatgtcatcaacccctcgcctttgaacacagagatcgagaagaaggacaaggtcgacccatctgttttcgtcggtcactgggctcttcctgccaacctatggcgcttcgttcgatacagaatccccaaagttcttctcacaggatggaacactgatcttcacgactactcgaccgaggataaggatcaaatcgagcgattgcatgccgctgcagagatctacggaaacgacaccgagcactactttacctacctccaagtcctgaccgcctgtaccgcctctttcgcccatggttcgaacgatgttgcaaacgccatcgggccgctctctacgatctacttgatctggtcttcaggctcgatcaccggttcaaaagctccggtccctacttggatcttggcctacggaggtatcggtatcgtgatcggtctggccacctacggttatcacatcatgagagtcctcggaaaccgaatcacccttgtttccccttccagaggattctccatggagctaggagcagccatcaccgtcgtactggcctcccagtttgctctgcccgtgtcgaccacccaatgcatcgtcggtgccacttgcttcgtcgggttgatgaactttgaaaaggacgcggtttcgtggccgacgatcaggtggatcttcatgtcttggctgttgactttaccctgcgctggtttgatgtctggtatcctctttggtatcatcatcaactgcccccgattctaaacgtaggggttgtgttcactttgcccatttttttctttttcttttttccttctgattctttcccatctttctttttggttcattctatatctcttgaaaatatataaatatatagacaactattgtacagcgttctcgataactggggtctatctctccatcttgagcgcgacggcccatcatctattcgtctccttgtacataccttatctcattagactttcttctccttgctctatgatgcagcacgccaagaatctgtcccagttgtcaatcgtcatgttgtttattcaccttcattcgaccagcatcgcattattcggagcaaacaaaaaaaaccatttagatatatattgatcataggataagaatcgaagaaaagaagaagaagagggaatacaaaaacgagaagaacaaaaaggaaagtacagtcgactgggaagcaaagaacgcaaggacgagcgaaccttcacgcatactcctctgatgcctcaaagtcgaactagaagagacaactctgatccttgtcctaacattctgtttgactctccccatcttctactcgagacaagcgcctattagacaaacatatatggaagagagaaagcgatgcagagctcatatcccgacatactaaggatagagatcacaaagaaagcaaggaagagagatacaaagagaaggaaagagagacgagcgaaagacgaaggtttatgaatccgcagctgaaagaagcaaaggcgtagaggaaacgtgccaatcaagaaaaacgtccaaaaactacacgcgagacgaaccatctgattagtctatcgggaaaagaaagaaaaggcacatgtagtagtaagaataacagagtggaaagctgcatgaacgggtgggtaatgatcgaatcagaaagaactggtgaggagggtcacagggaatcttggtttccgctgcagcaaacccttccaagacaggagaatgcacatctctatggtgatcgaaagattctcatctaagtctgggcaaccttgcgcgcaacagttcgctcgctttctaatcgggctctattggcctcgaacgcggcatctcgactgtgatagatcggtttgttaagaatgattagtaaagagtcgtgtgacagatctgaagatgaggcgagagaaacggttgtaactgatgacgacataccattgctgcaaatgtgaacacttgtgctcttcaggcaaccgatgggtggaacagctatattcgaggtagagagacgcgcagtgagtcccagtcagcatctatttgcgaaacatctgtcagaccaataagatcactcagatctggcagaggacctacaaattgtaagagcaatgaggacatgttccgatcaatcggacagcagggttcggacatctgaatagccagagtaggaaagaatgaaacgaatgagcacgagagaaaagagaatcgcgccatgccgtgcaagaacgggaagagtctacgtactggacgcttgacgcggatgcgggttcctccttcttatcagtcgccggtggtggcgaagcgccattggtagcagcggcaggggaggatggagatgaggcaggtagaagaacaagagtcttgaactggcaacgacgtttggcaggcctgtcaacggagcaatgaagagtgggcaaagaaagaaaacccgaggaagggaagaaattgacggtcgtcggagcgggacagatcagtgattgcggtggagccagaaggtagataacggcaagacttcggacaaaacggaagacaacgcgacaacctacattctaataaacaggaattgggtttgagaacgctattaagggtacgggcgagggtgtggatgtaagagttcgagtgtgtgtggcgaggaagacgatgtttctttggttggttgttggctggttgttggttgttgatcgtgggtggaagctcaagagatctcgcacgcataaacctccacggtggatcccgctaaagcccggaggttttatgtggcggctgtggctgtgtcatttgtcacgtgggacgagtcagtgctacgccttaccctccagttatgtaccaatcattctatctagcttctgcttggtttatgggtgcatatcaagtacacagcacatacaatgacgcctggctttgtatcaaagtcaaatgagctttggaagtatgagacagaggggagtgtgatctcgaacgatggaggctgtagagattactgtgtacgctcaggatcttgttcttttcagttccttccttttttttccttggtcttgcttgttggtggtggtggtggtggaggaggatgctcatcgctgatttcttctttgcgaaaaaacacaccaaaatgatacctgaaaggcacacgagcgaacagcactatcgtatcttcgtctagctctcttgctcgctttgctgtcgttcgcgttgatcgagaaagtaagatttccgaatccaaatcaaaatcgtcataaccaggttaattcttctctctatctgtatatgttcttcgtcatcatcgctcacacccacttggctttgctcgggctgtgcgcttttatgagaagcctcagaccaatcctttggagaagcatatagctcttcctctaggtgtcatctttgcggctgcagctctcgtatgtctgggttctgggatgcacgtttactggaaaggcattcggggtttaagggatggcaaaggctttgtcggagcaggacggttcgttctctcgttccggccttcatcctctttcttttctttttgactcaaccttcatgtggcgccgtcgactgacaaacttgtccgatcacgtctacaaatcagagtcaacacggccatccttcttttgttagcacttgctatcactgtgggaacaatcgtgtttaccgttgcgtcttgagctatacgttctgcattctttctctcgttcagtattctctcctctatattctcgtgtacgtcggagaaactcaatatattgcgtagaccgatatactcgaatctgtatcttttaaatctagactgtattatgatatcctcccatcgttattcaatgcatcgatgcctctgccggttgattagttcgatcgcatactttattcaaagcggccgactgtggatgaggacgaacgataaaaaagaccggcgactgaaagagcgagatccggcatttttgccaatttcgcttatccgaggtttttcaactcgtcctttcttcagccttgtgatagccaactcgtttactctctctctcacaccccaaaagtcaccttcatcgattaaatagaccataaaaaatgacttacggtatgggtttcacgttgtcgtcaggtctcgtagacagaccaagttgaatactgaaatgctctcgaccaactctaaccgatcgtacggaaacagattattttgcttgcctgcctcttgcagaccgagatcagtgagtcctcttaggttgtcctctccaacagaaccttattgatcatccccatctcaatcttcatgcgtgaaattacctatttcttccatctggttcgctctttagaattgccggattgaacgaaggattcgcgaccgactcggcacctcacaaggtcaacctcggaatgggaacatacaaggatgagaatggtaaaccgtgggtgttgcccgtcgttcgaaaggttcgttctgatgtccgacagacggattgtgtttcaaattgagaatctgtccgagacaatcattcaacttcgaaaagctaaccaagcttttggggtcataaacaccaggcatcagccatcctagcagccaatgcagacctcgaccacgaatataacccaatctcagggatccccgagttttacaacgctgctgccaagttgatctttggacctaactccaaggctatcaaggaaggtcgagtgtcaaggtttgtccttttttgcttcttacccggtcggataggcatttttccaaattatgtttccacgtttttttgttttctcttttttccatttttcatgcattcattttcgtttttgttttattgctttatgccttcttttcgcgaccaacacagcactcacaccgtcagcggcacgggatccaaccagttgggcgcgctcttccttcaacacttttacgacttcccttcgtccggtaaaaagatccatgtcccaaatccgacttggggtaggttttgatcgttctcttgtccaaatatccatgtcttttgacgcaagcacattcaggctgatctgtttcctttctttttattattatcttctatcttttttcttctttttccaaatagtcaaccatgatcctctattcagactagctggcctcgaacccgtcgagtatgcatactacgatcccaagaccatcggcctcgacttccctggcttcaagggctcgctcgagcaggccgaggagggcagcgtgttcctggtgcatgcgtgtgcgcacaaccctaccggtgtggacccgacggctgagcagtgggaggagctggtggaggtgatccttgccaagaagcacttcatcttcattgatgccgcttaccaggtatttctcatttcagtttttttttctttcctttctttctttctttgttgtcttgtgcgaatggtcctgacaagtcttgatttgtttctccttgataatccacagggcttcgcatcaggggacttggataaggatgcaagcaccattcgactgttgacggatcgaaacgtgccgcttctcgtctgccaggtttgtttcttcctagaacctagacggaatgatcgcccggttctgatgttctttgtttctcgttgggactatcgtatttggtgtttcacagagtttctccaaggtatgttcagacgcaaataacaatagatacatcattcctcgtcaaacctaacgttacaccatatcttggcttttaatagaacgccggtctttacggtcaacgagtcggcgcccttcacgttgtgaccgctagtaaggcaatcgcccacaacgttcattctcaggttgagaacctccaacgagctcagatctcatgtcctcctgcctggggagcaagagtcgtcacattgatcttgaacactccggaattgttcgagttgtggaagatcgacgtcaaaatgatggcagacaggatcaaggcgattagaaagactttgagagccgagttagagaagttgggtacaccgggtacatgggatcacattaccaaccagatcggtatgtctcttcactctcagcccatttcattgacatcacgttgaaaactgattgacgtatgactgtttgcttcacaggtatgttctcgtacaccggcctgacgcccgctcaatctcgagcgctcatcgataaatcttactaccttctcagtatgtcttctgttatttgccttgctcaattcatcactcttcccatccgtcttgtaaacatagggtttaacggtttttggtatctccttttacgatcgaccagcttcgggaaggatctcgatgtctagtttgaatgagcacaacgtcgctgcctttgctaaagccatcgatgaggttgtccgagcttaagaatatatctttatctagaaaacaaaaccgcctagcggatgtctctttgttcaaaaatcctgttctctctctattttcaatatcttatttatcgagcaataccataaaaagccgagaaaagtcttattgtacgattgattttcccatgttgtagagcttctgaggctaaggaattagatcgatgtatgtaacaatttgagcccagcatccccacaatgtgtgcgtccagtgaccatatttccataagatccttacctgatgactgatgttgtcaagaccggtttcctattgagtatgaaggacgactactcgcctcgggtattttcgagcgggtagtgtgtgaaatccaaagaggggtggaaatgagtggtgacgacgacgcgacgttcgatgatgatgatcatcatcaacccttcacctccattcacacgctgacgactcttgtagagagacacacacacacacacacacacacacacacaccccggcatatacacaatctacatctttcagattatcaatacagatcttcaggatgagcacaccctccagctcgtctcgttatagaaacacacccggcacagcccgttctacctcttctttatcactcacccgtccgtcacagacaaagactagctcttcgtctactgctcttgtgcccgtgagggagaagactgggcagttcacgaagtccttggataggcaatatgttcttgaggtatgtaccttcgttttggtcggacatcttcggtaaagggctgcaaagagtttcgttcgactgcctgcacacatcctgatgattctccactttgtgatcgtctcatgacatactcgttcataggaagacgcctacacagaagccctatcagatatcatcgctcgagatttcttcccatctttagccagattggaggcgacgaatgcctatctggaagcggtggagagtatggacgaagagaagctggaggttagcgtaagaagattgttcgaggttgatggtggtcagacacctgttcatggttcgtccttccgtgtctctctctttggttcatcaactgctctctaacgagagagaagatcgagtttgaaagagctgctcttagatgctgtcttcttttcgtctcaccaatgcttctttatatccccaatgtgacaggcgacgccaggtctacacctatgccatcctatcaaacatcatccactccattgtggacatctcaaacgccttctcagacaccataccgaacacctgttcatcacccatctagcctctcgtcttctcaacgatttctagctggtacaacacctgctgcacccagctcgcttcccacgcttgataacttccaagcaaacttcacgtcagaagacaacgcttcattcaccagtatccttcaggaggaaaacggaaaacggaaagaaaagtacgcttgggcctatgagccagagcaaaaagtgaggcttcggttggaagaagcgcgagacaagtgggtcaagcggttaggaattgaggcctccggtcacgccgacgctgtgaaaagtcaggagacgaagttgttggagtcaggctcggcagatgggggcaagaggatgtcgatagaaccgaaattgctggataaaggaaaaggaaaggagctcgtgctctcttcgtcttccgaatctgacccgtcggcgatgcaggttaccacctttgctagacctgttgggacagaagaagaaacacctcttccatcggcggacatcgtcttacctgacgactcttatctggccaaggcattagtcgaggctggattaccaccgaccgctgtggatcagcatgcggtcgtactccgggaggaccgagcgaaaaacctgaaagagaaggctgagaaggacaagagggatatcgggcatgaaggttggccattcaaggtgcgttttttcctcgacctacccaacggaggatctatcgtcctgatgtgttgcttacctccttttgtgttgatggcgcttcagactcgtaattcattgatgtttgccccggacgtaaatgtctccccgcacgagattcaaaaggcagctgtgttaccttcgaatcaggctccgaaagcaattgttcattcgaacacacggttctccaatggactggaggacgattttgtaggagagttttcaggggtgaaccccaatgagccgcccagtccaacaagaagtcggattgcagctgctatcgatggaacaccttgtaagcttctttttaccgcattctcgattgtttctatcaaagccttttgcaaaatgtatcacttcttatctgacaccgtggctgatgatacaacggaacatcagacccagaatccgaatcctctgactctatgcccacagtaaacggttacccgcttgtccctacccaagcgtctccgacgccatcaagtctcggtccagaccgaatcaaacagcttctcacctggggtacacttctgtctactcctcgcgctcttggcgctctcggtgaggcaggtggagccacccctttcaggatcaaagaccctagtagaagggacgatatcggtcgacgactagcttcttctgctggcagagcgatttctgatcgcgcaaaaggtcttgtgcctgcgagttccaaagggagaaaacgaggtgtgggcgagatgaatccgccctcatggacatcgtccacaccgggcgataagctgaagaaaagggcagggagtacagtagagttgtcccccgcggggagagggttgttggcaaggacgcgactgggaagtctgacgcctcggtcaggaggaggcagtggcctgggagtctccggtaggacctcagaatcgggtggtagcagatctagaggggaacgtggatggagcggaggaaaaggtgatgggacgagagcagaggacatcagtaagcttgcttgggatgcgtctcctatgacatcctctcgtggcaaaggagcggaaagatgagcgccccaagaagtctcgaagggtgtacacaatcaatgctgtaccaccacattgactccatcatgaataccgaaagataaataaactgcaagagtcatcaagagcatgttgctgctactacttctgctgccaccacagatagcgccaaaacttacgtaatccattcgacccggcaactcgtccggaacttcccttgacttgctcctactttcttctctttctcccacaaccatctgttctttctcccggccaagtgtctattgtctcgttgatccatcatatatacatacaaaaatgactgccagtacgtctcagtttccttagatatgctcatcgtcgctggttgtgtgctggaagaaagccaaaagaaagatcactgctgccagctattgatctgttattgttgctgcttccatcatgatccgtaactgaccttgacctctctctttctcttctccttcgtccatctcattcgcacgctactagacgttttctccgagatctcttacgccgctcccgacccgtaagttggcatcctttgcttgcttggctgcacaagtccatctcgaacgcgccttactattctcaaatgatgtagagtatctcgtgattttttttgactcattctccctcttcatttcaacttcgggacgacccggccgcggcaaacatgatacaccttctctctcttttcgtatgccactggttctctccgatgactcacattgcccttggatattatcgggaaccatgatgtaaatcattcgtctgtgaatctttcaatatggacacgttcctctcggttgtacacacagcatctttgcccttacggccggttacaaggccgacccttcgcccaacaagatcaacttgggagtcggagcctaccgggacgacaccggaaaaccctgggttctgcccgtcgtcaagaaggtctgttccatctcttcttctctcgcctgcgatgaagtggtttcaggctttgtttgatcgtgttcagccgtcctgataccttattgaaaatttgatcttgcaaataggccgcggctttgatcgaggctgatggggagattgatcacgaatatcttccgatcgccggtcttcctgacttcgttgctggcgctgccaaattgatccttggagagaattcgccagctatcgctgagggacgagtcgccaggtttgcagtccttcttcttttcttcaatatacatcctgattcttcttgacttgattgactcatatctttgcttgtttggcgccctcccttcaaaaagtacacagaccatcagtggaactggtgccaaccacttgggagccttgttcttgcacaaattctaccctttccccagctctggaaagaaaatctacgtgtccaaccctacatggggtaagtctcaatcaatcttgttaccaaaatgagatccgacctgtctaacgtgtgtttctcaattcgatggacaccttatcgtagccaaccacaactctatcttcagcctcattggattcgagcccgtgccatacccctactacgatcccaagaccatcggcctcgacttccctggcttcaagggctcgctcgagcaggccgaggagggcagcgtgttcctggtgcatgcgtgtgcgcacaaccctaccggtgtggacccgacggctgagcagtgggaggagctggtggaggtgatccttgccaagaagcacttcatcttcctcgactctgcctaccagggctttgcttctggtgatctcgagaaggatgctacggccgtccgaatgatggtcgaccggggtgtccctttgctgatctgccagagtttcgccaagaacgccggtttgtacggtgagcgagtcggagcacttcacatcgtgcccggctccaaggaatccgcgacgaagattcagtctcaggttgctcttcttcagcgagccgagatctctttgcctcccgcatggggagctcgagtgatggcgttgatcttgggcagcccacagttgtttgcggagtggaaggtccagatcaagcagatggccgatcgaatcatcgagatgcgacaacagttgagggccgagctcgagaggttgggtaccccaggaaagtggaaccacatcaccgaccagatcggtatgttctccttcaccggtttgaagcccgagcagaccaagatccttctcgaaaagtactctgtctacctcacctgtcagtcgatctcttaaccttttcaaccatgcacgccttgagggatgcttctgtattgacctatcatcgttcccatccttctattgaacaacgttttagctaacggccgaatctcgatggccggtcttaacaagtccaatgtatcgatctttgccaaggctgtcgatgaggtcgtccggggcgaggattccaaactctagatatagaggggaaattgtgggagtcttgttctttcttctttccgttctttcaatgtctgttcaagtctcggtgtaaattccatcgctgtttatatctttaatcgtcgttcagctagctgttctgccagacggatacaatcacgccagaaaaagaaaacgtctagagtatttcacgaacaaatggaatatcaaaagttgtttgctcattcagattgaactttcaattgcaaaccctgagaaacaaaacgagaaatactagggagcgcatttccctactttcaagctgttgattgttgaccatgagaaaacagagatcatatcctgtttcgaggagaaaaagaaaaagaaaaaaactctatgtaggtaacgaggtcggaggacgacattaaacaaatgcgatagagaagaatctggtagaatctgaagaagagattcaatggaaaaaaaatgaaaaaagagaacatagggattgtccatattggcttcgtcaagaataccagagtagaaaagagaagaaaaaggtcgtcactgaagaaaaaggagaaagaaaaaagacaagaggatgcacagatagagacaggacagaaaccaggctgcttacaacacatattaccagtgaccaagaagaaaacagaccagagaagaaaaagaagaaaaagaaagaaacaaagatgaggagagatgtgaagattcaaaaagacagatataaggcagagcagggagctcccccttaccagcctccggctcttccaccatacttatagaacatatcttccaaccctttcaatccatttcctttctcccactccaccaactcgaccttgccttcttggtttccaccatcagtgaaatcttcgaactcaacatcgacgcacatccctcttcgcttcccggtatacacatacatctttgctccgtccagttcatccgatcgagctgaggtttcttgaggagtgagtaggccaccagcaccgaatttgtaggtagacgaagtggaggatgaggaggaaggattgatgtatttgatgtgagtaaaggttgagccttgtcggacaccggctgtgtgtttgaggaggtttgcgtgtaggaaaagtggggtatccgtgtatggtgggaggtcatactgttgaagggttatccgatgtttcgtttttggaatcaatcattgtactcacaaaacgaagaagaaagagaaaaggaagacggaaggaatttacctgaagcatagtgttcccacaaaatcggttgttctctgccgggttcaaatttccagcagagctcaaccatctaggagaagcagcaaagggaatgtcgagcatatggaacgcatatctgaacgtgtccttgtcgcctccgctaagtttgaaccaaaactcgtgatctttctgcatgaggcctgccaagtgtagagctgcgagattgaggccgttgtttcctcgtttgtcaattagaatctggccagagtcaatctgccattctttgtgatcacatgtttctcccaagatcctgaagattgcgttctcggctatggtattgtgaaagaaaagttgggaggacggatgtgatcagtaatttgaaggatgtgtggttagaatcaacatttcctttactcacgatgatcctaacagatgcgattcatgatcatggatacaatctaacatcagcattgctccacttgaccgactcggcacataggcgcgcatgagatgacgaaccttggtgatatcaggccagaacactgctttaccgcctgacaagtacagctcactctcaaacagatgcgccggatctttcaacgggatattgtcctagttcaatatttgtttccatgacgtccgacaaaggtatagtagagaaagaggagaggtgagcaaaagtttgaaagaagagagaagtacagatatccaaacacgcacagagtctaagtagaggacttccgagaatgtagatttcaagatcgatagcgctttgatctctgtacatcagccacccgtgaaaagaatgaaataattagtaagaattgaaacaaaagtcgccctctcaagaatcggattcagataaagaagtaaaagacgaacgaaagttcttccagatgttcaaccgcttaactccttcaaactgaacgagcgtgcctccgagttgctcgatctcgtctcgttcagactgggcggtgatctctcccgggaagtgaaacacttgaacgggaaggtttgaatgaagctcgtttcggaggattcgaagaagagcgagtaaccgagctgtcgtgtcctgattcgtagccgagaagaaaagggagcaagaagatcagcttcttgcagatgacaacgactcgataaacatgagatatagaaagaaagcaagaagacaaagaaaaaccaactctatttccaccagcgacgacaatacctcttccatcccctttaccctcatcctcaacccacgtgaccttctcgccttgactttccagagcgttgagaccgttgaccaactgctctctcctcatcaccacatcatccgttccgatggccttccaatgctttcgttcgcctttcaactgatcagggttcacctgtcgatcatggaccttcaacgggcatgcctttacgttttccttcaatgcctccgcgtacgaacggaccgggcgatccaggaaggcctgaagagatcgagccaacctatcctttgatgatgttgttgtcgtcgtcgtcttggttgacgatgattccgagtcggaggtatcatccgaagacgagctcagacccgagcccgagcttgaactcgaactcgaacccgagctacctgaaggccttgcatcgacctcaacgaccggcaagatatggacctcgccgttcccctctgtgaccttgacgacctcctcgaagtctaccgatggtttcgggtcgaccggcaggccgacacctccttctggctgagaggtacccaagtcaatcgaaggagggatgatcggtggagatgttgacttttcccattctgcttccaactctgccgcgttcgatgtcgccgagcctgcctctgataaagaggacgaggggagcgggagcgacgagagatagtatactgtgagaagactagtgagaacgatagtgagcacgaggacgaacacgtttgtctttctgagcaacatgtcgagaaggaggtccgacgagaagtgagagaacggtcaagaacgtatcgcagctgttgacctaaagatggaagctcaaaagaggctgagcaagggaaaagaaagttgactgcgcacgtcatgattctggggtttcctcctaaaggtttagaaggaaagaacgacctaggcgatgagggtgggtagtagacacagatgacagatggcagacggcagacagaggacattgctcatcattatagtacaatcgattgaatctttgatggacgatctctctttcgagaccctttttttttctctctctcattcgttcttgtcgacttccacctcccttcttttcgatattaaaaaagaaacgacacaaaaggaaactaatcggaggagagataaagagaagaaagcgaagagaagatgaataaacgtaaaacaagatgggaaaatagaggagccaatgtcgcttaagcggaagaagcaggggtggaaggcctggtgttggctcgcttctgaaggacagcttccctcctggctcggataccagcagcaagcgcgtcgagacacggcacggtctgctcccaggacaagcaagctattattttgagggaaggaaagataggggaagaagtgactacgtcaattccaagtacgataaaataaaataaaaaaacgacaagagctggaaggtcaaacagagaagatcttaccatcagtcacagagacaccgtaggccaaaccggcaggaccctcggacgggaccttctgctgaccctcattcaagttggactcgatcatgacacccataatcttggaggatgtttcaccgtgggacaactggtcggcctgtgaggaaggttcgagtccagaacaaacggacaagagatcagccttcttgcaactgatgagacaagattataacggtagaaaagaacgaacgatgtccttgcagacgatgatctggttctcgtgcttcttgttagagtttccgtgcgagcagtcgatctgttttaaacagacgtattgaaaaatccagagcgcgtaccagatgacgttagccaaaagcgacaggagacggaaaagcaagagtctgctcaacgaaccatcagcttctgaatcaaattggccttggcaagcttctcagctacagccttgacatggtcggcagagtagttgggtcccttgttggatcctcggagaatgatgtgtgtcgaggggttaccgaccgtctcgacgatagcactcaaaccctgcttggtgaccgagaggaaggtgtggccagaggcggcagctcggatggcgtcgacggcgatatcgatcgagccgtccgttccgttcttgaaaccaacagccatactgagcgcagaggccaactctcggtggacctgactctcagtggttcgagcaccaatggctcccctgtcaagtgtaaaagatggtggtagggtgagcgggtctgaccggaaggcgcatccgatcatcacggacagcacagaggaacaggaaacgcaccaagagaccaactcggcggtgtactgaggagagatcgtgtcgaggaactcacaggccgagggaagacctagctgagtgatgtcgagcaagagttttcgggcagttcgaagtccctggttgatggcgaagctgaggaagtaagacggaagtgaatggggtgagtcgatagaaaccaaggacaggaaagataacagttaagaaaggacatacgagccgttcatgtccgggtctgagagtcgatacaaacggtaggtaggattaattattcgtgaacttgattggtatgggaaatcgacgactatacacaccgttgataagaccctatgatgtgaagggaaagaaatgataggatcaatctcgacgtaggtattaagaagaagcttcatagagattgaaacataccttccaaccgacggtcgttcgaggcttctcgaagtagactctcactaatatccgtttgtgttcgttgagcgcctagtgtcagaaccactagagccagcgaagaagaacatggagaggaaaaaaaagagcatgtagacgaactcaagatgtggaggtcctccttgtgctcgtcggcgtacgctttgaggagcttggcatactccattgcggctccgacgtcgtgaacggaacagggtccgacgatgacgagtagcctgtcgtcatctcccttgatactataaaggtaaaagtatgagtagaatgggcgagtcagaacgatgataataaacgacagttagaagggaacaaccaggtagaacgataagaaagacgactaacatatcatcggtggcgcttcgtccgtcctgagaagagtgttcgattgaacagacgaaagattccggcgttgatgagtgtgagtgaaaaagagacggagagacgtggtaagcgaatgtttggaagaaggaggtaaacgtttatggttgtgaagaaacccccgatgttctcggagcggataggcaaggcaagggaaaaaggcatctgggatttttcatctcttcttattcagatgctccaagatatgtgagcgctgaacaggcttgcgcacgaagtacgcttggactgctctgtttgcttgatacgagtgaaaagaaggagaagaacgaaagaaaaagaaggagaaaaaaagtgaaaacgacttacgagaacagtctgggcacccttgaggtcgagcggcaactcctcctggaggatctgaggaggaatcaacggccggacgaccttgacgcgcttgtcgtccagctcaagcagagcctgctgaacggtgtgggatctagtaggagccatgatgtgtgattgagcaggtgcaaaatgtaggtgtatgtctgatagaaagagtgtgtgtgtgtgctttggagtgtgcgggaatggacgagtggatgaaaagcgaaaaacacttagataaaggtatatatgaaatatgaaaatcaaatataattcaaatacaattcaaataaaaaaatccaacgactcctattgaaccgcctggaatgactcgaccggtgagactttgggcttccatcgttcttctttcgtgcttccctcacttgcttgcttgtatgagtacccagtctagcgcaattctccatctgctacccactcagagcatcgttcttgctcgcccatcgtatgttggatcgatccctggaagcgcacccctgggcaggccatcatcacctttctcggccgatggggtgacgtcagggaggtgactgcttacataatcaggcctagaactattgaccgccgtagtacttccaaacatttttggtaatgttatcgtttgaactcattcatccatcatcatcatcatcatcatca

SEQ ID NO: 1463 - DNA, 2272 bp, Xanthophyllomyces dendrorhous
tcatcatcatcatcatcatcgtcccatccatcatcccacccaatcctatcgtatcctatcccatccagtgcgtacatcacacatctagccatgatcctcaacgttcacatcccgagcaacacctcgttcgctcttccatacagaggtcggtgcattcatgtttctatctctccgttcacctcacataccactcttctttcttctcgcttagacttgtttcttttccgctacgtccatattcatccatccatcgatgtcctgaacctttctcttttcaacactacagagtccgactcgtttccgatcatcaaatccaggatcgctgataaagcagggtaagtctaaacccaatgtgttcccggcttaatatccgtcctatatctcactgtcccgttcaaatcttcttcctccttctgcctccatcccattcagcgtcccttctggcgagacaatcggttcatccaagaacggctaccgtctgcagtatacctacaaatcttcgtcctttgctctcgatgaccaggacgacttcgatatccttcaggctcgattttcctcgtcatcggacgagccagacattcatctagtcccccctccgttggctgcacctactcctgctcccttgtcatccactaccaacaaaaacgcgaacaacaacactgctgccccctctccgtcaaagcctcgacttcagtctcagcccaaacctcagatctacacttcttctccagctcagtcccagcagtcgcaacctcaacagcatgaacagtcatccagtccacaccgacgactgccgtcactctcgatgttgaaacctcatatcaagaaatcgacccacccagcgtcaattccttctgctatccccgccccgctttcgattccgccgtcatccggcccgggagagccgttcggtggccgatcgggcagtccggcagctgctaacggatctccgaaaacaaagtcatcgaaacgactcttgggcggtggcctgctgccgagcgagaaacagtcggacggaggtagactgaagcatcagcttgaattcgaaaacttccacgaaaacaacggggtcagaacggttgtcggcagcatcggtcctgttaaggatgtgagaatgttgctaaaagcagggtacagacatgtgtacatttcacgagcgtttgcccagcaaaacggctttatcccgaacgacgctacccctggctggtacggttacggcgggcttgttaagtacgttctctccacctcggttgttgtccgcttgacataagggcctcttcaaatcctgacttgctttctttctctatcctttttctcaatttcacaccgcttcttagccttggtcaatggcccatccaggtaggatccgtcgctcagaaacatactgtcatgctgtccgaagagacacactttgatgtcgtgctcggtcgatcatggatggaaaagatgggtgtcaaaacggatccgttggacgagacgagtgttgtgttgatgaacggactgaaaggagaggacggcgatggcgagaaagtcgcgtgtgacttggtggtcattaaggatggaaggtatgttcttgtctctgcttccttgatcatcttgcccttcctttatccaggtcaagcaacgttgacattgttttcatccttgttcgctttcaatcttgtgtatttcagaggtgaagttgtcaccatcacttaggcaccttcacagaaggggacacaactatatgatacacatcttgattcgtcctctctgctttttcaattctcctttctttctttctttctttctttccttccttacttcattcgtcgtaattctgccttttcctctttgctcttctgtcgatcttgcctgctctgctttataaggatatctaattttataatctgatctcatggttgtacatagctcggctcgactcacgtgattgtacagccacatgatccttaatcacgtgactgtcgacgcgtcttgacgcgtccacactatgttcatcttcccttctcccacgcgtctgttttctcttggcctcctccaagctgagcgctaggtgagcctttgggttttgcctcctcttcagtctccaactctgctgatttgcaaacctccggagctaggttgactcgctcagatacaagacttgtcaaacgtttcgctttccacacacaagacaatagtagaagcgtgagcgaagaacagaaaaataattgaaagaacattcaaatatataattcagatatacttaattaaaaataaaaacattcccccc

SEQ ID NO: 1464 - DNA, 9081 bp, Xanthophyllomyces dendrorhous
cgcgtcgcctttctttttgtttctcattcctctccttccgacagtcaacctccgacagacatcccacagaaggctacgacgctgctcgtcgattcagagaacaggaatcttccacctgaaggtcttccctcctcgcttacactggagcgattgctccatccaacacttatactcctgcggcaacctaccctccatcccaacccttagctttcacttccaaccgcagatctatttttccctgcgggatctctttcgagtgacaacaaacactttaccttttcacatcttttttccaccgtcctctctgtctctctgttccctctgtcttccttccggttggatcctgctatcttatctcctgtcaaaaggcgttcatctttcgttttaatacctattcatcgaagtattcactcattgatctatcatcaacaaatcaagcaccaatcatgccgtcttctgtatcatcaaccggctctcaccaggcttacccaacagttcatgcctctagagctgctcctcggccaccttcgactgctcatgcgtatgcttacacccaagaacaacatcagcagcagcagcagcagcaacaacaacaacaacaacaacaacaacaacaacaacaacaacaacaacaacaacaacaacagccaccaaaacaccgaaacgcacctgcccctcccactcaacatcaacgacctaggtcaacggcttctaaccaacaggctcaggcgcatccaccgggagagactagcaatcagcgagtgctcaaacggacggcagagagggatcgaagaggagacgaagttaagcgaatcggggcgtggaggatcggaaaaactataggaaagggctcgtctggtgagtctccccggatggtttattctcttttctttatgaggtttcgcttttactgatcttttgtcggttcacttttgtcctttcccttcattttgcctccttgtctgtcgcaggtcgagtcaaactcgcccagcattccaaaacgggacagctggcagcgatcaagatcgtgccgaaacatgcgatcttgtcgtcaagattatcgatctccgaggcaggtgccaaggcagataaggtccttcagggaatcgagagggaaatcgtcatcatgaagctgattgatcatccgaatgtcatgaatctttatgacgtctgggagacaaacggagaactgtgagttggctcggtctttccctctctactctcgcgaaagcgactccatttcttcaactaatcatcttctctcatccgcttcagatatatcattatggaatatgtacagggaggcgaactgtttgactacttggtttccaaaggcaagctacctccctcagaggcgctccattactttcaacaaattatccatgccgtagactattgccaccgtttcaacatctgccaccgagatctcaaaccagaaaacttgctgttggacggtcagcgaaatatcaaggtggctgatttcggaatggctgcctggcaggcgggtgaacggctgttggaaacgagttgtggaagtcctcattacgccagtcccgagattgtcgccgttcgtttctcttgtctttttccgtatgtgtctgtaggattctagaaaacttactcctgatttctcctcgtttctcttctctttttttctgactcgttttccaggggaaagcttataatggagcagcctcggacatttggtcgtgcggtgtcatcctctatgctcttctctccggtcgacttccgtttgatgacgataacatccgagtactcctccagaaagttaagttgggacggtttgaaatgccaaatgagattgagggctcagcgagggatttactgttccgaatgatggatagaaatcctgataccagaatcaccgttcgttttctttctttctttctttcttttttttgcgttcttctcttcgtcgtcatctgtttagcagtttacgtggcgtttacttatcatatctgccttgttttcttcctttgatcttacgattgtcctatacccctttccgagagaatagatgccagagatcatccaacatcctttttttatctcgtctccccgtcgacagatcgacggtcaggcatttgtcgttccaccctctatcgaggatatcgacagaccgatcgagagcgaaagcgatatcgatccggacatcttaggaaacctgaggacgttgttccatggagagaaagacagcgtcatcgtcaaggggctactgtctcacgagtttgtcctgcttgtttttcgagacttctcggctccgtcgcgattgagtgttcgctatgctgatcgttttgtatttgacttttaggaaaacatgggaaaagacaatctaccatctcttgcaagattaccgggcgaaacatctcgagaatttcaatatggatgacgacgacgttgttattcctaccagaacccgatctaaagctcatcactctgaccatcactcccaggcccaaggtcaaacccagtccgtgaaccgacaggcctcttctgcatccacctctggcgcaccatcgtcgacgacgacgactgggggagcaagaagacacgtcgtttctcatcggcgaaagacgagtgtgacgatcgcgaaatattctgagaaagggtcgtcccctcagtcgtctccctcaaaggatcgagtgatgagagctcaagcgaccagaccgtctgccccgacgcctaccaaggcttccaatgctaatcccacctcgaatgggaccacacaagtgggatcatcttcagcacaagcagcgccgcctgtgaggatgccttcgattcgaacggcgcctcctcgatctccagtcggacctcgacctccgttgtctcctcgagaatcttcgtaccagtcatccggtgccggaatcagttatcctttgtctccagtgatgacgacgacgacgacagcagtagcagcaccgagttcaactttgatgactaacaagtctgcctatttaccagaaattcatgttcaaaacgcaacacctcaacgaccacctacccttgtacttgcccagaacctggctcttcctccgacgcccacctcacccggattccacaataacggatcgttcttctcagccgacatgtctagagaaaccgtcggttccccaagttcctctatcaacggtggcagtcccgctgggtacaccccgttgtctctaggaggttcactcggaacacccgccagtttggcttcccctctacagatggatcagttcgaagatgcggaagacgacaattccgatctcgcatcgatttattccaatgcaatgacgttcgaggctcaatcgccaggagcaggaagcatccttagcgctcacggaaacggaggcagaccagcttccgtttggacaaactcatccgatcatgggatcaaccctagtaacatcgggttggggatccaatatcgacctggcggaacaggaggaggttctcatcagaatggcggtggtggatcgaaacattcgagtgtgtcttcggccggtggggcttacgtccacgggggagcaggcgagaatggctacagggattcatacggtagtcagggaagtaaaggaagtagaatcggaggggctgaccatcaacatcagcaacgagagagagagagggagagggagagagaaagggactatactcatcctcatgcccaccaccatcaccatcagaatcaaaatcaccaccatcagcaacagagtcatcaacaacagcagcaacaaaggtctcctctgggagaaacaaacgggttcagagctcaaaactcggcggggaaccaacctatgccgctgggaggatcttctgtcaagcctgccggaaagaagggtatgtgtttcttatccgttcatcggtgctatgcatcttctttgccttgccttgccttctcaagtcgaaaaggccctctcttatgatacccatctgactttggtgattgcgctttactcgatcagtctcggctgtagattcttcggccggacatcgtccatcccggtctgcaccttcttcagagcccaacaagcgatcatggttctccaacctgttctccttcaaagccccgtcgtatacactgtactctctctcggatcgccgaaccaccttgatgaccgctaaacatctccttgaatcatatggtgtggtgtgcacccaagagggttcttctctcctccttcgttgcaagcgagatgaaatcagggatccctcgaacgtcatcactgtttccaaagccgtcaagttcagagtggaagtctctgcttgcggagaaaaagtagggaacgcaagtgggtttgtgacaatgttggtgatggttcaagagaagggcgcattgagtacgttgaagggtgtttacggtctggtcaagaaggactggtcgttggacgaaccgaaaacgtcgagtgctgggctggttggagacagagcggcttcacctcctccgttggggggtggattcatctatgtctaagtgcatatcgcgcgttgcgcctctttcttcattctcttttccttttccttttcgttctctcatcatctcagttgttgtttcggttcctattcttcttgttttccccatctcttggctacggcaggacttttcttttcatctcatttctgggtctccatctgttttcctgtctactcattaatctaatcagatcttttgaatgataccttcaatcttatttttgaacctccatctcgtctttttctcaattcatcccaaatgctccctagatcctcactccaatatgccttttttctttcctgccttcgtcttcgtctttttcttgttcttttattgtcttgatccactttctttgcctcgttcagaaccaagactgcctatgttctcgtcgtgcctatgaatttgctgttttccatatcttgggttcaacccagtcgttctcgcggtcttcaaatcgatcttgagtgacctccacatttgcgacagaatcaaccaaagaaacgattagattttgatttatttatttttccttaaagcacacatatatcccgcttcttctcattctgttcactccgcttcgtcatcctctccatccggcccgaaccctaagagatcacacagaccatcctcgacaacagccaaccatttggccagatctgcagtcgtctttcctagctcggcgtagactgcagaatgggtggccaacgaagcgtaatctaacggagggacagaaggtagatcctcagtctgctggagttgatggttgtatacattttggtttggattgctataaatgtgattatgattgtgagtgtgggcatagttcgatgagggatatgtcatcccggatacaccaccgttacctccagctccaccaagggacgaagagatattcatgacggaaggttgaggtgagattactctactagagttaattcctgaaggaccgggtgttataggtcttgattgattcgttccggggaaaccgttggtcgctgaagatgttgatgacccacctcccgttcccccgattccaggtcctcctgcgccgccggcgccattactgctactgttgttgctgttgctaccaccaccaccgagtcctccgttatgactgctactgctgctgttgccgttcaaagcagaagacgtcgcggcgatcaagaatctactcatcgagtttgatgaggtagacggcgaaggtggtagaaggtcaagtgaattcaacagaggtggtggatgaagtttcaacatatccttcagccctcctccactcgctgctgctgctgctgctgctcctcctattccattgccattcccgttggctccagaggaaatggcctgaattccactagacatcatcatcgctccgggcgaccttgaattccaacctccaccgccaccgttgctactgataccaggatgagcctctccccggctgtgacttcgttctctacctgcgctaacaggtacagcgatcgacaagcccggtccgccaccatgagaactcgcgaaagccccggttgcgcttctgaccatgcccggtctgttgaacacgttggaccccagacctccgttggaagaagaggagacggaggcggtctccatgatgggcatggtggcttgtctagctactgatggtcttcgagaaccaacaaccgcacgaggtgtgggtgtcaatccgtgaggtgcattggcagaggagagacctggataatgagggagcgatgaagtgattccatccggcttaggcggtggagaggatgggatttgtaggtttgaagtggccgaatgaagctgaggactagggttgccgaaggaaggtgaggcaggcgagggagaggaagaaggcaaggaggcattagtcggaggtgaagccgttactctaggatggagattagttcttggaccagatggtgaacttcctgctactgccgagggggaggaagaggaagagatatccacattcacaggctgttgctgctgctgctgctgattcgaatgtgaagccattgatttgttcaaatctggcttggctgtaccctcctgatcaggaaaccttggtagatgaacgccaccagagataggcgaagctcctctggcatcaggacctgcctgaaatggatctataggagggggatttgaaggatcttcgaacagtctgcgaagagagctagggggaagagtcgatcctggtccaggcggtggaggcagggtgtcgggtaaagattgaacagaagatgggattggtagagaagacgacgaggcagaaggtctgaaagttgaaaggtcggaggaatgattgtatgttgaacctgaatcgctattttggaatgttggatccgaaagagcataaggcgagtctgaaagtttgtacgtctgtgtttttatggccgcacgcgcatcaaattgaaaagcgtcaacaatgttggaggagagatgaggaaagaaagagaaagcgaagagacaacgggacgcacattgaaaagccaatcatcctgcttgccatcaagtccgaattcattatcatttccgtccccatagatactcattgctagacttgacctgtttgcattgggctcccttccggcttctacccttgtgaggacatctttcaaaggaacgagttgcgctttcgctacagatttgatccatttagtctttatgagttcatctgccgagagacgctgagggaaaggaatcagaagcagataaacagttcagcgccgactcctccaacttgatggcaaaccgaacgagaacaggaacactgacttcctctggaacttcattcagacaatccgcagcgaaatccctcatttcctttgaccaaccttccttttcgctcaacctgggcggcttgttttttgggatcaacatgatgactctcattggatcttccccactcaaaggaggttctccgttctcactggctaattctaacagggtgatcccgagtgaccacacgtcagctttggtatcatatggtgaacctagaaggatctctggtgccatccagtatggagttcctacgaacgtcagacgtttcgtgctgtttgaggaagaaagaaaaagcggggcggagactccaaagtcgcataacgtcacccgagggacagaggtgagaaggatatttgccgctggatggttgatgatgtttgttacatgcgttgcaataaagggaatcaactttattgctctctgagtccaacaaggaaggcagggaggacgaacctttaatatctctatgaattacacctagtcggttgagaaagctgagcgcggtgagaacctcccgaatgacgagtgctatacatctttcatctagcttggtcgcttgtcgctatttcagaagggaagaaagagggatccccattcagccctcagagaacaagaaagtcgtccaacaagtctatttgtccgatagaaacctagaagcaccgaactcaaagctcaagaggcaaagaaagacaaggactaaccaaagctctgagactaccgccttctgcgaaatccatggcaatccagaccttcggtccctcgacccaacaaccgaaatacctcgtcacgttgttcttctctgcctctccacttttagccatggcttgtaacatccctacttctctctgtatttcaagtgtatcatcatctgcctgatcgaggtcaatgcattttagagcgaggataaaggatgtcggtgggtggatcgctttatagaccgatccgtatgctccttggccgactttgtcgagtcgctgatcgacaaatcacaaacagacaaaagacattcagaaccaacgtaccctcgaagcaagaggagagctctcgagtgagggagaatacagactttaaatattcgactaggctgtgaactttttgggagactactcaacgcctccgagaacgtcctctccgctattgccgtcgccgtggccattatctctccttctttgctctattcggtgttttcttcctttctacaatcgaacgatataggacctagcgaccaagatatccaacgacctggctaaagagcgaggtccagttggggacaggatgagtaagacaagaaaacaagaaaggccagcccggtcaggtctgggtgtgggtatagatgtgaaagcgaaggctaaggcgaacagatacggttcacgtaactacggaaacccaagaaactacacgcgtcgcgtcgacgcgttccagacgcgccacgcgttcgggcgtgccaggattcatattgcgcttgactctttatacttttgtcggccgagaggaatcaggaatagaaggaaaactagatggggggggagtttgcaggaaggaccaagagagcatggaggtcttggatcggaccggaagcggtcaccatgatactttgtttgatggatcgagaaatatctgggtctaaatttgtaactgaatctctagctctggtcctgattccggttaaagattttgaattgaagattttgggtgtataatgtatgtgtgtatggatgaatggatataaccgatcgaccgaggagaatgtaaaagagaacagaaggaagagaagagaagagaagagtaaaaaggttggtttcaaggggggaaaggatagaaag

SEQ ID NO: 1465 - DNA, 12468 bp, Xanthophyllomyces dendrorhous
gactcattcgagatcacaggcaaagactgagagaaggacaaatcaaaccagagggacaagcactcctactacatgactacacactcattcttcgcctgttctctagtcggtctagctatctttccaccttttgctcctagtttctttagttctgttgatgaagacccgcgagaagggaggaaacgcacaagaaggaccacgattagaacattggatctgaatataaggagaagagttagagagactgacctgcgagccgctgtgtcgccctatgtagaccagacccgaaatcagcacatgggaagaaagagaagagagtaaacgggtcagatgtcatgaacggtctctccttgcgcggacggatacgagatagaaatatatgaatgaaaccctcgacaaacctcttgttgtgttgaactgagagaaaagcagagaatggaagacatggacatccggttgagattaattttctttgtgcccaagaactgcaagtatgcgtatgataagaaagcattggagaaaagacgaacgagcagcacggttgtaccatcctttggccgcttccagatctgggttggttcctatgccttgttcgctgtaatctatagaggagaagaagaagaagaagattagaaaaatcacaacatcgatcttatctgatgactaaaaattgagagagagagagaaggaagggacatacaaccgacggcatactctgctttggcgagtcccttgttagccgcctttcgtgcccaaaggaaggactccgagtctgactgtttgagtactccttctgtttgaggtggtcgaaaagttagagaggaataaaagaaagagaagagaacaagacgatcgttagcccttgacagaaaggccactaggcgacagggagaagaagaggacaaaggaactgaccactccctgtgagataccatccactgagggcaagctctgcttctgcgttccccttctcagccgcctttgtataccaactgatgctctttctcggatcgacctcgcaagtgaggtttccatattcgaaacaggttcccaactttagttgactgggcggataacctagctgggcagcttgagtgaaaaactctctggcgagtgcatgatcgagatggatgtactgagtgaatctggccggtgggttctcgtgcatcatccctagttcatgtagagcgtgtggattagaggcatccgcctgtgaggccgccaatctcaaccaatggacaccctctctgacgttctgagcttgttggagttttccttcaaggaggatcattcccaatcgatacatcgctgtggtgtcacccaaagaggctgcctttcggaagaacagaatggcccggttaggttctcgtctggtaccggcaccgagttcgttgcagactgccgaacggtaggtcgctcccggatggttttgtttggacgcctggagatagagcgtgtaagccttttctggatctgcctggagacctagttggccggtaccgtacaggtctgcgaggaagaactgggcgtccgccaagggttcttccgactgggtagccaactttttgatcaacttgagagactctccgatcaaagtgtctctgtacttccttcctgcttttgggtcatgcgtcgatatctcggaccccaactttttggcggcctcgatgaggtactttgcgaacgcaaactgggcttccgagtccgggtctcttttcattcgagctcggtactcgtccacgaaagcctttgtgtacggtggctttctggtgtcgaccgtagcggaggaaccttggcgtttcgcattggacgagccaatcacagtacccgaccgaacgagagatgtcccagagagagaagagcctgaagaagccgctcgggatagggatgggccgccgggagaggctatcgagccttgagggatcggtggcatcgagggcatcggcggcatgggaggtctgaacactgggggataaccgaccacgccagtcgccgcggcgtggtaagggttcgaatagtccgcctgtggtgaatagcttgggtacgcagggccggccgagtgttgttgttgttgttgttgctgttggtgatggtagccggtgttggcagcggtattattgatattgttggggttgcccgcctggtaggacgcgtagcccgggccgggtgccctcgaaggaggaccgttgaaagaagttggaagtgggtatccaccgataggagggtcataaccttctgggcccaactccagactccttacgctgggtgttcctcgcccgttgttgggtctcgagtagctctgttgatgaggatatggatgtggatatgggtgagggtgaggatgtggatgcgaagggtgcgagagggactgctgctgttgctgaatgactgaaccttgagggcccatatcgaaacttctaacggactgagctcttgagtttgcactcggtgtccttccgaaattcggcccagagggaaaggcgtttgaacggttggagattgagctctgagatctgttcgacatggacgtctgagaccggttggggattggatccgatagtctgatggctgagaagttcaggccgttgacctggtcggtcgagacagagtcctgaatagttggcgagtttgtttgaggggcaacggagaaagaagcagaggggctggaagaggacgaggcggccagggcagaggcagaggcagaagcggagctagaggacggatcaaagtacgcgcctgaagttgaagcatcgtacgatggaagtggcggtgaggatggactgtgtggtggagactgtgagcgtccatcgagatggccggggttcggccgagctgtagttggtaagaacgagaatgaggagggagaaggcagggagaagggaaagcgaggcgaggaaacatggaaaaggagaaagaacgaaagaagacaacacagaaacaagtagaggccgtcagactcaacacgaacgagacatcaacacggatagagagcagcaacagcagcaccaagaaggacgacacaacaaaggtaagagagcaagaagaaacacggacagtagtttatggtcgacgagttttcagcactccatctttgttgaacaacaggaggcgacgcggtatgtttccccgagagcggtttagcatgaccctgatagctctctggcatgtgggagggcacagcggaagacaaagagggaggagatggcgattgagagtgaatgagagcgagcacccgtgctggtgtccgtgagagtgagtgggtgaacggaacacaacgagagatcgaggagagagacgaaagaagaagcaacacacggtttcggtcgttcgacctgacgaccgatctgttcgttttgctcacactcagttctatcagacactcatatatatatatgctctatgttagggataacatgtacgactgtcgccatagatctgtggataccaaggatcattccattgtagacacggagagctgctcggacgcaagcacatagtgggaatcttatgggctgtgtggaatgcagcaagcgtgcgttccatcttcttgtagctgacggagaggacttgtggccatgtcaagatatcatctggttgctgatacacatgctgtgttctccaaggcacatgtacatgctatccttgatgtataggcacccaacgtctgtcgagctctccaccagacaacatggcataggatggtcctagggaatagggatagcagccttcagcatgtctaccctcgtgtctctctctctttatgaactctctccagcttctccctgtatatctatgttctctcttctacctctttcctgcttctctctgcactctatatcttccctccgttccctccacgctctccatctgctctctgtgtatgttctccatgctgtatgctgtatgctgggcatacaggctgggaacgcccataaccctaaccagaaaattcctcggccggccgggacgaaaacacgcacacgacattcccagcgttcaacttgcaacgttgaccttggacgttgagctcactgttcccgttgttcccttgttcccatccctctcacatgctcatcggttgaggtgtctgggtgttgatctgttgtcctgtcatctttgctgctcgctttatcactttccttcctcctctccttctcctcatagcttcgctcgccctctatgagcttcaacttcaactgggaacatgcgttctctcctgccttccacgagtccgctaaatcggtcctcgagaccgcactcaacaagggaaacactccggcgctcatcgtaggtaagatcgaggttagagagcttcatatggggacaatcgtgagtccttcccgttcagttcttgcctttcttgccgtctgagttcgccgtcattctcgctgagcattcgtttcttcttcctttcccttgctctcgccgtgtttgtatacacactctttctctttctcttaattacgcctcctttctctcttttctcactgtctcggtccctatcaaccacgctcgctctccttcagcctcctacattgaccctgctcgagatcggcgaccttcagaaggatcggttcagaggaatctttagactcggttatgccggtgactctcatatcgtcgttggatgtagagtccaggtgagaaccaactatgactctttttcgttcaagctattgtcgaggctgatcttgcttcctttctgctcttctcttcgttttcgtgctctctctcatgtcttgttttatgctctctcgtgcatcttcctatgaccccttttgtaccttctccctcacttcctctcttcatgctccattctgtactctcacccgatgtccatcctaggccaatccactttcaccttctccatcaccgctgccgacatcgacgacaccgctggcggcacaccggccgttgctagtgccgatggccctccggctgtcatccctcaaattacgagcgatcgttgtgcttgttgtgtctaaacagaagggaatcaccctcgtgttcaagaacgacccgctcgaatctctccaggtcagctctacgttcgactcgatccaagtcctcaaaggattcatccagaaagagatcgaaggcgcgttgagagagatgttcagagaggaccttcccgggatcatccatactctcagtcagaaatggttcgcacccgaggagccctcagccggaggacaaagtaggatgccctttcattccaatcttgaatcgggtagtatccctagagatttctctgcttcctcctcgacatcttccggtgatgtctcctcatgtgcaccagcctcggcctactacccttcctcatcctcctccgtctcctctccaccgacatccccaccgtcaagtcattcggtcttcactgatcgatccctgttctccgatcctcatctacaagcttcctcctctactagtgcctatactccgcctctatcacccacagaatcacacgcgacgttccccgatctggaagaatatgatccgacctacggtttcagatccaaacactctgtcttaccctcctcttctacgtctaccccgacggcagcaaccaactctatccgttcaggagcagaaggagaaccaaaggcaggcctacgaacgatggacgactcgaactcgacacccacctcggccggaccacagggttaccgtccccgatcaagaccccatctcgggccaggtcttggtctcttgggtttcatggaccccgaggctggtataacaggagggccttcaaccagtagcgggagtgggagcgccgagagtgactttgggttttccggccaaaccatcacgacgagcacaagttcactctactcaaactttcatcaggcccgacgtctgccggggagggaacgagccgagtcgaacgcggcaacgttcagaccgaaacacgtccaacggatgtcacttcctgctatattctcacctgtggtctctccttcaaagtcgaccgccactcgttcaggctatcctcaaaagtcaacagcccctcggggggcagagaaccatcagtctcatcacgggaaacaatctggacttcagcctcaaacgggtagatcgagagcgtatcacttctcggagtctaccaatccttcaggctcgtatgataacaggtcgacccctcctttgtctcaatcgactacaccatcgagaacgtcccccttaatatcaactcctctaggttccccacctctatcgacagacggaagtcgaccgtcgtccttgtcctcgtcttcgtcggcttatatgccagcttatcgatcgagaactcacccctcaacaccaagcgcacataccgactctatgtactcccgtccatcggtcgcccggtcgactatcaacacacacagaccatcctcttcgatagcagccacagaactctcctctgatcgttcatcctcctccccaagaggtcttccagaaacattggaccatttgtcgctcctctcgttatcaaatcagacgttgtcaccctacaccagagaactagctcacgtagccgtgagatctcaacctccttctcaaagacttcttgatgatccggctggtgggtacccttcacccgctggctatttccctggagccggaatgggaacaaggaaagcgacgagaaggaaacttcataggttcacgacatcacccgccgtgccgaccgtatctaaaccagatccctcagttcctcttcatgggagggctaccagtccgaaacagccgttcgatccttccccagtagccgcagggcagagaccaggaataggcgtacacagagaaagctatgggtttccatcgatagatcaatccggtctagatgtgtcttccggtccagttttatcagaccggcctacgcctagatcaggagggaaagcaatgggagagggaaggagggattcaggagtgcctgtcccggtcggttggcgcgatgggttcacagggccgttcgcgggtaaggctggatttgtgatgtgatggggaggaggttgctgtttctttagtgttcttctattgttcttgtacacatgcttttttgcccttccttcttctttcgtggtggttcgtcgaggatgattgatgcattcttcctcctccctcctcattcattcatcatctctgtccatgttcacaactctgacgatttctcttgtttctttctctctttcctcaagcaatgtatttacgtatcatacctcatctcttctcgtttcatcttattgccccctctctctctgttctaagcaacctcttgtcttccagtcttatacatagtctcgatcttgatatcttagtcttgatctatgccctggtctcgaaattcaccatgactatatatcgaccggagatcgatgattattctatttcctctatttctgtctttgttgcaaacgagccgaacctgttgagaaaacgaagagtaagaagaagatgcatgcgcgggtatgtactttcaagaggaggaagtgaagatataaatgacgcgacgcgacgcgtcacgtcagctcgaacgccaactgatgctcaccctcaatcttactcattttgttctccgtacgactcattatccttcttctgtcttgcgatctttcactcatattcgaggacatctcattcaacaagatcgcaagcagaagcaccaacaagatcgagatccaggcgcgaaccggcttgttgacaggaaagaatcgagatcagagctgaagcgagcgaatataattaagtggtcagcctcagaaatgaagagtcctaaaacccttcctgccggaacacagtctcatgctctggatcgaggcaaatgcgaaagtaggaagcgtaaagaaccatcgacaccgatgtcgagcggagcagaaccgacgggtaaagaagaacctgtcttgaaatcgatcaaaatccatccgatgtttgctcctaaatctcagtccttgccctcggataaaggaccctcggattgggattcgaatgtcccgttcgtattttcgttcctcaatcttcttcttgtttctttccttgcaggctatctcttgctgattggactgggatcatttgtgcgtgcggacgatcgttaacagaaagtcgctcttgaaatatacccatctggatcctttcacctctgttaccccccctgtcttctcaacagaggaagatgaagacctcaaacttaaacgaaagaggaaagtagcgttctttgatttggacgggacgttgatcaagacaaagtcaggagcgacctttcccaaaggcgatacggattgggtttggtggagtcctatggtgaaggatgaattgacccggttggcccagcttgggtttgtctcttatcctttccctcttgcattgtcatgttctgctcggtcttcgagaaaatgtcttaacgattggtttatttgaagggcagatttcttgtcgttgtgatatcaaaccagaacggattgaaagcgccgagtacaaagatgcacaaagcctggaaactcaaaattgagcatatctccacccaggtttgtcctcttcattttctctctatctctggttttctacatactgatgttcatccttctactctcaaccttaactatgcgcatgggatccgatgtctttctagttgaaggcgaccccatttctcgtcttggcagcacttgagaaagaccagtaccgaaaaccaatgttggggatgtttgatcattatgtcgaaattctatcatcaaatgatatgactttaggtttgtttgccttctgttcttcttctcttgtttggaatgttctgtagttaaacattcgtataccttgcgtcttttcctatggctgtttgagcgcctgcagattcagaagagtcattctatgtaggagacgccgctggtcgaaagaaggatcatggtgatggtgatcgaaagtgggcagagaatgctggtctaaagttctataccccagaggtgagttcctctccatcatctctcgattcgagatgtggattctgaccaccaatgttctctttctggtggggtccctctggggtttgaaaagatgtactttggtaagaaagacgaagctttaccgcctctctctggattcagaccacgagaccttgaaccatgtatgttctctttctcccttattcgaaagactcttactcgttcatactaaaggcttgtaagaaactctcataaaacgcgctaggtccatcgatcacaccgacatcgactccactcttctcatcaccttcgtcgaaccgatcagaagtcatccttctcgtaggctcaccaggttctggtaaatccacgttcttcgaatcgttctgtctaccaaacggatatgttagagtgaatcaagacgaactcggcacgagggtcaagtgcgagagaaaagtagaagaggtattgactgagggaggtcgttgtgtcattggtgagtcgattaggttcatatttcctacacgtgcgcgcgtatgtgtgtgtgcgtacagggattggaagaagagaacattagtttaacaatcattcgaggcgaaatagacaacacgaacagagacaaagcaactcgggcagcatacatcaaaatcgcccgacaacacaacgttcccattcggtgagtccttcttgcatcactctccgttgtatcaatccaaaatctgatcatacatgaacatcatctcttggagaaaagttgcttcttgttcccgtctcagccggcgttagagaaacacaacaacttgttcaggttatatcccacgtcatcaggatctcacgtgcctgagatggctcttgcttcatataggaaagggtttgaagaaccaactgtggatgaagggttcgacgaggatatcaagcgaatatcactcatcggagagctaggaaaagggttgatcgacgagaaacagaaagccaggtgggaaggctggatgaactagatgaagtagatgaactagatgaacgtcatcctgtactttcacgcagtcagatcagctatcgatatgctacatttcatctcattacattctttctaatttgcttcgtttcctctagccacgtttgtttcatgtgcttcaaggaagcccagcacctgaagtaacctcaggcgtgacactagtctcgacggcggcgcttctagcagcggtcaaacgatcgctctcagcttggtttttgtaagcttgagaggcggaagaggcgtcatctataaaagatcattcaaacgacgttcgcaattagcaaattgataaagccggttgacgactgaactcaggctaaagaaaggactgattttcagaagatgaggaatagactaacgggaggctcggacattggaagggacatcgtctctcagctctggatcttctgaagcaagatactcctgtttcatctcaacattctgacgttttatgtcatggaagagagaaaaaaggaaaggagaggagaacaagcaaacataagcaatcttgatgcgcgaggagataagatttcaacgtacattagcttgctgatcgtgttctacaatcttctctttgatcttattgacgattcccatctttgcgctcaaatataagtatgcgaatgaatgtgcgtatggtgaagaaaacagaatgattggaacgaaggtgacgactacttttctctttatgtgttgagttgggatgcttgcgtcatgatatcccacgtgacccaagagattgtggctatgcagttagtaacccaacatcaatcccatttcttcttaaccctttctctttagcaactttcttggatacgacggacgtcgtttgatgctgacctggtcgtctttgttgaatagaataacagccagtatatcgttcagatctcttatgaatccacacggacggtccaatccgtcagaactaccggctatagccatcattgggacaaccggggttgggaaatccaaactggccattcaactcgcccagtacatatcttccgtcggacagaatgaacaaggatcgacaatggagagtacaggaggatgggattcagcagagatcataaatgccgattcaatccaaatctttaaagggttagatgttattaccaacaaagtgacggaggaggagatgcagaatgtgcctcatcgcttgattggtgtggttgatccaaggggagagagaggttggggaatgaagaggtgggttgaggtaacaatggacgaggtgagaagctttctgtttcaatccgtttctttacatgcttgatatagtgcgcgctttccgtcattcgaaggctcaatggactcctccttcgccggtcgtacaacagatatcagaactacacgctcaacgatccatcccgctcatcacgggtggtacaacctattgggtacagcatcttctctttccgctcgggaagccatcaacgccttctcctctgtcatcttcatcaactagtacggtccatgtacctttccgtccaactccctctccttccctatctagctttctctctgtgcttcctgagccactcttgcctgccgagaaggatctcctagagtcgcttccatcgctaccattgaagccggacgaaaagcttgcgctaccgctccatgagctcttgagaaagctagatcctattttggctgataaatggcactggagggatacaaggaaagtgttaagagggttggaatctgtgtggaatgagggtaagagagaaagtgaggtttggatggagcaagcaagaaagaagacggagaatcaggactgggagaagaaaaggtatgtcaatcttgtacgagagcgtacaaggatgaaactgactgatggcattttcctctttgtcggacgggacataggtaccgaacactcattttctggctctacgcaccatccgaaatccttaaccctcgacttgattctcgaatagacaaaatgattgaggtgaattgttatctgttctcactcttgtatcctcagacgattattctgactctcatgagttcctcttcacgatgaatgtctagcttgggctccttcctgaacttcgtgaaatgcgcgaaatagctgacgaacacgcctcgtccttgaaagagagcacaacccaatctgatccgaatgattcgacttcgggtatctttcaggcaattggctacaaagagttttctggaattccgacaaaagacctcacgacagaagctgcagacaccatacctttcaaagatgcggttgaacggatgaagatgacgactcgccagtatgcgaagagccaggtcaagtggatcacaggaaagttgggaccggaagtagaagagagggtggagagggaaagagaagggttgttcctcttagacgcaagtggttcgttcctagcttagatgcccatgcattcctctcgctcctctatctctaaaacggatacgactgattgatcttctttcttacggatggaataatgatcagatctagaaaagtgggatgataaagtgttggcaccagcattatccgtcttgaggggtaagtag

SEQ ID NO: 1466 - DNA, 5627 bp, Xanthophyllomyces dendrorhous
  misc_feature (4152)..(4161): n is a, c, g, or t
cctatacacatgacgatcccagcttattccctgcttctacccatagctttcctcaatgaacagcctctcccgtcgccaacttcgattggtggttctcatgccgatacattgctttcatcactttcgaatagttccaagtcgtaagtcgtcatctaccaaagagataccattgatctcctcattgactttaagtgcacaaaacaagcagtacgctaccgaagggcactccgcacagatgcgagctctgctcgaccttgaatgagccatatatggtgatgctcgacccctcgaccgacacaccggaaggtgccagggtgaagcacgagcggggaaagagacatcaatcgtacgtcctttcttctcttccatcaattttaaatgtatagaatcaggcaagttcaagtaaagttgctgacagttcgaatatcgtcgctttgcgttgtggtttccttttcagaatcttgcgaaaaatgaaacgagcggaggaggcgcctcgatacgaagaattgcgcagagaggccagaaagcgagccgatttgaaagctctcgagcaggataagccgaaggaaggagacatagtcagctctgataaagcctagataaatatataataatctttcccttcgttcatgctgcacaacgtgtttgaggagagaagatcaacgccaaacaggagattgcgctatgtttgagtctgaatgatcacaaacatggttacaggcggaagagccctttggcttatcacaacaaacttcgactcttctctctcctcaccttcagtcgttgacctcgaccttctcttcttgagccttctttcgctctctctgctgtctctgtctcttacagcaagtacaagcatacagacgacgtgtctctgcatcccaaaacttcaccggtgtcttagatcccgctgtccgcctgtgacatgatgcagtccggctcggttcaagcgtatcccaaccaaccaactcaacctacgtcgtactttcaacggcctacccaacagcagcaacagcagcaacagcagcaacagcagcaacagcaacagcaacagcaacagaagcagcagcagcagcaacgcataccatcacaatctgctctttcttcatcccaacgttcaaccgagagccaaccgtcgtatgcctatgcccagtcacatggtagacagggtagcttgagcagtagccgaacaggagccggaggcggagcaggagagtttggacagattaatggagctaatgaccaagctggacaacttgcagatgataggaaagacatcacaagggtctactgggaagctctgagaacatcattggctgatctcttgagcaaaggttcgtctgcttcctccctagactctattttcaatcacttctttgagacaggccgcaatggatcacgcatggccccggtcgcgctataagaatttctcataacgctgatcagaaaccttcttgttgtatgctcgatcattcagagccaccaaatgctcgaagtcacgcccgattgaaacttgtccgattaacaaaacagcaatttcacgagctcaccatggatgtttacgatgaactcttacgtcgaaattccatctctgaaggaggaccggacatccctgggttgccctatcgacaagacttccactcgagaagaaacgaggccagacaaaaactggcgacgctgccaaagaaccgatacaaggatttggcttccgacgtgtttttcgaactaaacaagcgaaatcctgagttcacagcgagcattgcagaggagaccttaagccaggtgagcattgtatctttgctgatattcaatcaaggtcatctcatagagacacgtttgggcaagctgattgacgatcgtctctcgtttaaaatggcgcatgttccttcttcgttctcaaaactttccatcatattcgatctgcttacagcgctcctctgaagtccgatcgtctgtagaaccacacacagctccaaatgttcggcaccagcctgcatcctctatcggatctatggcctctagcatgcattcccggaccatgtcatcttcgaatcatccgcaacgtcagccccagcctcagccttcacaggcgcagcatcgaccaactcagtcgagcagcagctctattggaaatcacagcttctaccagaatcatccccagcaacagcaacagcaacagcagccaggaaaaacgcctgcaactaggcaaggatcgatgtcacgcacgatctcgaacagttcttcacttggcgaaattcctttatcttcgtccaacaatccttcttatccaccgaacagaactcgcaaagattcgaccagctcgtactctcctcctttctctaacgccgtaacacctgatgacgccttcacctcaagtcagaacccgaatttgacttcaaaccccaacacaaaatacaatcaaaattcgaatggagcgaacgcaagccttttgaactctgtcaaaacatcccaggttgtacccaacaaatcgacgattgcatccgaagagatcgaggttccttattcgcgcgattccgagtacatcttatcccctcgttcaccggattttcaggattctggcgctttcggaagacggcccggtaaccagagaactgacagtggggacaatgatggacttcaaaggaacgaggaggaaggtctcgtcaacgagttgaggaagacgaacgaacagctccgattggagttacagcaggtcaggagggatcttttggataaacaaggccgaggcacagacaccaaagaggtaggtcttgtcttgtgttttctctgatacttcacgccgtggttgcaacaccggatattaacactatggtttattctatatgaagtacaccaaggatcttgaaatgtctctgaaaaatatatctacagaactcgaacagagcaagacagcgctttcgaaagagaaagacaagtctcacatgctggaaactcagatgaagaatctagagatcagccacgaggcaaaggtgtcagacatcagaagaaatcgagatgttcaagaactcagcacagtgcgccgtttttcttcttcatgagggcgcgatatttagtcatgccatcgtgcttttggacggttcgattttctcatgctttacatttttgctatcaggtaactccaagcgaagatgattttgcggctctgcgagtgcagatcaaggagcttctccgagaactcgactcgctttctcaaacaaacgatcaccttcacgaacagatggatcgcgaacgggcacttacaaccaaggcagaggttagggcaaaggaaatggaacgaaagtggaggactgtcaagacagaactgagaaacttgaaaggtaaaactttctttatatctcatttcttattctaatattggtaacgtcacatacttgaacaaaacctgatcagtttatctcaattcctctgggcattcatcggatacattcagcaacttcccaaatgttcacctcagctcctcgcacagaagatcactttcctgcttcaaaaggcggagtgatcgcagacgtccatgttacagtattccaagactcgatcaacagcttgctagctaccgccaggtaagaattaactctctttcttgttctctcctcatatatcacgttagatagctgacctggaaggtttctcgttcagatcttcgtcaccgagctcaatcctcggtgccacccaccctgttctctccgcggtttcttccattctacgagacgtagaaacctttgagtctgatacatcagtcgacatgtcctccatcgacctacctacgcttcaaattatcaaagagaaaagctcgaccgcactctccgcgcttatcgagtctgctaaagatttcgccacctcttacggcctcagtccagtcggtctcgttgacgcggcggctcgagaattaagcttaactactgttgagctgtttaagcttttaggaatcaaaagagcggacaaggcagtggaccttcaggaacctcgaatcgaagaagagaatggggaacgaagttccatccaagatgaaaacgatgtgaagagcagtgcctggcttactgttggaggtgctcgatcatctccgtcgttgtttcatcctctcggagaaggaaaaggagcccagagaggagaagaagaagaagaagaagaagnnnnnnnnnnaagaaggaggatttagaagtcgacagtcgtctgcttcatcgacgtatgatgaaccctcgatatccattccgacggccaatttacccctaaacgggtcgaatgattacagaggcggagcaaacaatcacctaccttctgggctcaacgcggcctaccgactgacatcgacgtcttcagttgggagttcattcgatttggaacgtaaagcaagcttgatcagagcagatagtactcgagaaaaccctggaagattgaacggggtacacagcatactgacagaaaacgagaatgagcgcgaagaagaactagaggatgatgacgataatgcatgggttgcattgaaagtaagttctcgtgttgtgcagaaaacttgagaatgtgataaccgatcctgaagttgatatctccccctcatcatcatcatctctctctagccttacctagaaactcagtctgatgctttgattcaatccatccaaactctcctcacatcaatccgaacgggtgcgacgggcacgctcctccgggagcacatgtcctctgtgatcgtcgttggatcatccatcgtcggcgtgtctaacgattcgctttcaaagaagtttaggacaacgggcgacgatcgacagaggttgttgaaaattgtggcggagaattgcgagtcgttgagcgagttgagtgagagcgtggatatgggtaaggagacgaggaatttgattgccggagtcacgttcgatttggccaaggtacgttttggattgggattatctcaggaagagacttttttctgatccacgttctttttgcttgctctctcctccttgattgatcactaccaacaacagaacttgaaaatgttgatgagcttctagaagcttttgtatcctttattacctactttttccccctgttcacgcactactccacatcatcgcatgagtatgatggtgtgcttctccttctcgataaaagttggacgacctttccgttcttcactctatgttctatgcttcacacgcaccgttcgttcttcattacatccacttttttatttcttagtcttgtcacgttttattatgtacgatcggtttgtcatccatcccaaccacccagaccgtactttgcatgtatccatgccggtgttctcttcactttgttctactaatcatcaagcttgatcaggaggtgaaagctatcacatatgttcatacaaaaccaccttggagcgagattggccctttagaaaaaaggcatctctaagagagaagcagagaccgataagtgcgcttcaacagagttcatcgagttcatcatctcctgtttgttcaacttttgaaggttcggctttcaaagactccgggtgttggaatagcacgttgacttcctctctgtcgaaaaccaaaacaaagagacgaatagaacgtcaatcggtcaatacgcgcgctatcacgatatgataactatataga

SEQ ID NO: 1467 - DNA, 12925 bp, Xanthophyllomyces dendrorhous
cgatatgataactatatagaaaagaggctggaactcaccccagctctctaaccaaaacagcctgaagacctttttctaaacttctgctaacactcccaaactcttccttcagttccttcagtttcccctcccattgttttctctcctgaatggcctcccgatgcttggccttggccaacatgaatctccacgtcgctcttgatctacctttccactgagcggatgaggttgtttgtctagagggcataaacggcccggtgaatgagtcgtccgagtctgagtctggtgggggttcacgaggacttgtcttctgcgggttcgtcttctttcttgaccgcttgttcttttcctccgtggtcggaagctctatatcatcaatcagcgccgtgttgataccagaggttccagactttgacgcatccgtagctgaagtcgttgaagctgctacggctgatcgagcaagatcggcctgcatcctttcccattcatcttcatcggcttgccatcgttgggagtccttgcctttcggtcgacctccttcgaactggtcaagctcttctgtcgggacgacagccttcgggacgaacgtccggtttgaggtatctttcgtccggtgggacggagcaggaagaatattgtgttggacgcgcatgtgttttgctagtgcatcagatcgggtgaaggacttatcgcattctgaaagatccccataagcggacggaatgcacggagaaaatatgcgcccgtacgcagacatcaatcaaacaccgtcagcttgtagtctcagttatatcaagctgtgctggatgttccggtaagcagagtgaaaacaacgtacgaggctcggtgcaatcaaatggtttctctcccgtatgacttcgaagatgactcaagagagcaaaccttgatgtttgcggtcttccttttcgaacacagtccgaccattcgcacgtatactgggccttgttagtcccaatatgttctaaagagtgatttccgtcagaaatcaagataatcagaaagaagccaaagagagggacctcagggagaataccaagacagagaaagcgtacacaccttcgtgtatatgattgatgaacgttccctgtagaaatattcgacccaagaatagtcaacatcaccgttcagatcatgcgatcatgaggcttgaacccaatccgtctatgttccctagagagaattttttcctttgaagcaagaaggagaggaagcatgtaaaaatcctggaaaactcactagttctgagaacgtcgctccgcactcgacgttgtttgttgaactgtctaaccaataacaaactgcatgcaacgcgtttgggtctatactatccctcttccgcttcttcccccgttcatccagctgagcacctgcagtgtctacaatgggacctgccacatggtctgaaagattcgaaggggaggaaggagctgatcgaggggaagccggctgagtacctccttcggacggagtaggagatgaagacagggaggagacaggcgagagaacgtcaggctcagagtcgctgtcagaggcataatacctcatgctggaatgggtggtagaggccgaagactggactggagggagcgtgtgtctatgtgtatgagtgctggtatgagagtgagaacgatatggctgatggtcgtttgggaatgagatgatgttgatgatagctaccaacttctctcagacatactggcgcgcttgccttgccttgcttcacttcttctctcgtctttctcttctgtctctctctctctatcacattcttctcagcctttcactctatgttttactctatgtaggaacacatcaatcatatatccagtccttgagtagttattcatgttgataaaccagcttgaaccccagagtctgcacatcgggtcgatctctacttatgattttatagcattggatatccagtcccttcgcctcctccttcctctctcttcagttctttcctactccagctccatgagttgccatcttgaatcaactcataaaccaactgttcaccgagtctgtttgtctctccattcttcaactgacagtcgatcgtctcctgatcctcagagctgcccgcgactaaagcggagagttgagagcccatgaaggcgtcttcttgaagaatcgtccttgctttcgaagggggtaggacagaagagacaatgatcttgggagaaggatttgcagtcggaacgtccaggcggaagtgttgaagcggagggtccagctgaacggtggatgctatggtaggcgagagcaatcgtacatgaatggaggaagaagagaagacttccagagtggacgacagtaaaggggtatggatatcaagagtaaagtttgaactgttgtctggtttaggagatcccgatattcttttgatcgatcagcatcgatgtcgaagggataagctcgcatgatcacgaaaggatgaactgcagaggcaaaacttaccgatgacgactttggcgagagatgtcccaatcaggctgaactgcttgccttgcccgtcaaaatccctgaagaacacggtcgtccgtgatccaaacggagtgggagcaaccgatgtcggtgagaggaccaaaggacttgaagctgtctgttctggtcggcatcaccgtgggtgggaaggccacttgaaaggagctcagtcgctgtcatgtatcaagaacgattatctaagagctggtagcacatacgacttcgtatatctctcttctaggaatggcgaacatgaggtagagagagcgagagaaagaagatggagacttggctgttggcacgaatgcatcatcaacaacactcatcatagagtttgcttacgctctctcttcatcagtcagccttgtcctatgttacacttgcataaggcttgtttggccaaactcggacgaacccagcatgggtgttcattgcgcacgacctcttcttcaagatctatcttgctttatagatatctgggattatgtatattattgccgttgatggcacttgattgtctttacgtatgccgtcgaaagaaggcaaatctactgataacgcgggatgtatcgtgacgattgcttcgagtaaatacatggtatattgctggggtatcagaaagtgtcttgtacatgtgttgatatcacagaaatttgaacgatatgttttgcagattgagtcagtacgaaaggattcaatcctcttcgtcgtcgtcgtcgtcatcgtccccatcctcatcctcagagtacactacacctctgttgatgaagtaaacaggaaggaagagaagagtgacactacgtcagtaaagtcatacggagagacgacattcttgagagactgaccttcctgccctgggtcttccgttctttgtctttatctcttcagttgtcgaactagcggcatcgtcaagaaactgcttttgtcgcttagatgtagcttaaaaaataacgaggagtcagtcagaacggaacaagagtcgaacatggtagagagaaagaagctagggaaaaccgacttacgaggagtgtcgtcctcttcttcagaaccctcctcctcctcttcctcctcctcctcttcatcttcatcttcatctctcgatctcctcttgccgccttgagtttgtgttgccgtctggttacgcgattgagcgtccctcggggtgaaaagttgactttggccttgactctggctaggcctggctctgcgtttcccggcagatgaactctcgggcaccacaacttcgtctcctacctcaagccattccataccgtctttccagacgatctgacattccgaattaggacattttgggttggttttggagatcacccgtcggacgcaatgattgtgaagcgcggatagactatgcgaggtcggagagcaggatggacagatttttccctgaacaattatcaatgcaaccccaaagaactgtgttaattcaatcaccacgacgacgacggatgctctgccaagaggtatgtatgaggctacacaagctacaaacctttgtgacgagttttcgacaaagcttgcagtccaagatgacaagcgcgctatcctcgttttctccatcgtccatagagtatgtgtcccgtaggtaatggtccagctcagtcacggctcgtaaagtcaatgaatatcggttactggtgtctcgcgtatgataagggtttagttacaaacgagatgaatgacagaaactcgttgttttcagatgaaagcgcaaagaaactcacttgaccaactgtaaccaacctccgccgggtgtgcttccacagaacctatcaagaagtttctcgccggccgacttactgatggtcgtcttgagttcggaaagtagccgagaggcggccaagggcgagattgagaatgaatagctaggggcttcgatgatagcttcaatctgtgttgaaagtagtgggaaagtgagacagagctttttaatcgtagtctagaccggaggctgctcacaattaattttagatagacaatctcgccgggagtgtaatttgtcgctatctgggccaatggatcggcctctatattgagctgcaaacgggccatcggagagcacataaacatacacgtaagctcgatgcctatgttgttaataataatgataatcgaaataacacacgaagactgaccaagaagacccacttttcaccagtcgcttggtgaacttgttcatcgagaaggaacctcaatggctccagcagatcgttgatctgacccttgaaggccggccacccgtcatctgctctatcaggcggcggatcgtttctgtccttgtcattttcttgaacaccgaacgagtccgaagtttaaaaacaagtgagatgatgaaaaatcagcgagcgatgagccttgagaatagctagtaaatacaaacgggcgagtccggcttcagactgactgtatgcggcctgggcacatcgttcgtaaagggatactgccttctttagaggcaccgatggctgggagaagacggactgaagaaacaacttgtgagtatgaccgtgagccatggttcaacgattctatccgtccgtcgaaatgtatgctggatggtgaagatgatgatgctgctgatgatgatgatgaagaaagaacaagaagcccgacgggcgtcgtcgcatatttggactacaatctaattaggaaattcttattttttctctaatggtattttctatttttgtttactttggatcgccttctcgccgggttcaatggctttcttgtcaccttgcgcatacatccaaggaacacagcatacatccaacatctcgcatcaacatcatcacccctccagatacaattgcgcttcttttagcttggcccttcgattgttctcgtcagcttggtttgtctgaatagtaaatgaggattctgttggaacatctgacgatccgtcgagctgggcttctcatcgtgctccttacattcgggttcttggccttggaagcactctccgtgggatctctgtcgagcaaaccatgtacggctccagggacgactcagtggggactacttgtgagttctaccttccgtctagttgtagaatctgtggtggaaacgaattgtattctaatgcaccctcagaggcttgatggcatgctcttttcctcttcctcaggccgatgatgtataccacctgggtttaaccgagccatcgctgtattatgggtctcttcgaaactttacaaacgtgttccctagttcgtctcctctgaagacatcgcttctccattcggtcgacacctactcttcacaccccaattcgtccctgtctttcccatcgatggtcgacaatcgactcatctttcagaccgacaaggaatctaaaggtaccgaggcaacccggtcatggacactcaaaaatcaaaagtgggagtacaggtttctggacgatgcagcagcagaaacctgggtgaaggtgtggttcgatggaaccgagattgcacacgcttggaaggtgatgaaggccggagttctcaaagcggattttctaagatatctactgatgctcgtgcatggtggggtgtactctgatagtcagttgaattccttcttgttcaatgccctgcgctgatgatgtactgaacgattgtgaactccaacagccgatacggtagcccttcgtcccatagaacagtggggaaaactacaccctcgattatacaccaatggctcgctgtcctccttcgactatagtccagattctgaacctagtttgatcctaggtatagaggtagacgtctggaaacctggctgtggttggatcaagaaatggcctcggccacttcagatcgcgtacgtgatctagcatttctttatatcataccaccattcccgtccgatgagaagatgctcatgacaatcactatggtcatagccaatggatcctatcatccaccccacatcatcccatttaccttgatgccgctcgaagagtgtcatccaccgctaggaaaatggaagcatgggaaaaatctcgtgatgaggaagtcaaattgttggaaggcctgggcgacgaagcatccctccggaaagcttacgagttgaataaaaagctttggacaaatatggttagcactctggaatggacaggacctgccatgttcaccgatgctgtccttgcgttcgtatttcataatttctacaactgtactgcttacataggtaactctaatgattgatgtctgttcgttgtcctatttgtcttctttttctatatctagataccttgaaactcaatatgatgtcacctggccatcactcaaatctctgaccgagcctcttcgtattggagagatcctcattcttccccttgccggcttttctcccaacgcagattccgacctccgatggtctcgaccttcgagccctcaatccagtgtcctccatctcttcagaggaagctggaagaacatgggcaaatggaaagcgttcaagaggtggctggccaaccgagggggattcatctttgcacttggcatgattatcaccctcttcgggatggccatttggatccggttgaggatgacagaacagcagcggacgagggcatcagtagttggggatgagagtgtgacagatggttatgagctagtttgggatgcgcagaatgatagtttcgaggaggaccaaaacgcgaagaacctatggcgagtaggaaattgaggttaatcgtagcatacatggactatcaaattattcaggacttttatctttcttcttctttttaattgaagccatctctgtgcatacgtatttctcttctttgtctgtgatatatcgtctataccctttgtatctacccttgagttaggccccgtctatatgtaccatacactcgacaactttcatggctcatgcattagtttatgcttttcagtcgctcgcccaaacttggacatcacccatcatgctgagaagcatttcatctggatatctgtcaatccaaccggccttctctgcccttccttctgagtggagcctcctcgattataccacctatcgatccgactctggcatgtgactctccgactccacctcctccgctcaacatccggcctcttgccgcgcctctacttcgtcccaggaaaggaatgacccgatggatcgatatagccctgatgaatcgagacacgacggcagatgttgaacctgcgcctcgacctcgaggtgtggatcggtagcctggtccgtcatagttaaggatctcaattggcggattcagccgaggccaatcgacataacttttttttttggggggtccaaggggcaaaaaggaagaattggtgatgagctacgctcgtacaatagaatagccaggaatcgatggggaagaggaagtctcttactagattccattggcccagatgtaaagaaaagagagcacggtgacgatagaggcagcccagaaaaatgtccagcttatcggaattactgtgttgatttttttagtttaagacagagatacgaagaaacatgaaaagttaggtcacgattcagagatctgggctgtaaaaaagaaaaattgaatattctggaaggaaaggacgcacaccaccaccacgcgtaaaactcaattagacacacacagcctaacgctgttgatagcacagttggcatctgataaattgacattaccaatagggaattgttcagttgggtataccataaaactgaagatgagcaatacccacaatgcgcatcaagatcggtcgagtatcaacaaaaggtgatgtggacccccttcgtaccgaccaagctcctgtcaacaagtctagtgcatcctgtcatcatttagagcatcaagatatgtcgagatcagccgtctgaagtggataacgttgagttgacatacggagaaaatagacggctaaactaacctgtctcgatccgtccaaataattattcttcacgtatcgaactactgaattccaaccgtccatagcagcacccttagaggatcgcttgcctgtccttgtaaagtccgtttttagtgcacctgtaccagaatacgcgatcgagacaacgtccgcatggtccgcccaaactagaaagttcattgtccatcatgaggatgtcatccaaaacagaaaatgagtctaccaaactttggatgatagcaaagctagctgtcgaaagagaaaagacccactgtttcggaaaacatgcatgaattcggggtgatgttcgacagaatctatctcggtcaagaccctcgaacttcgtagctgacggtctaggacatctctcgctaacgcagattgcacaacgttggttcgatcttgaggcgttgatgtgaattgggatggaatgataataaatatgagataagtaaagcgacaatgggcttttaacttgagagcgttatagctctgcgaaatagcgtcgtcgtacctagagaatccatgcctatattgcaaagacccgcaaatgaatggaagagaccgtaaacgttgatattcagggaaactgatctgctcgggaacaaaatgagagaagaacatacagtttgtgcgtatcaccgagatctgaaacttcttgggtggataagaatatgcggctgattctgacggactagaataatggaaataactgccatgtgggaagagacattttctttagtaacagaatgagtttagcaacggcaattgaagcaaaactaaagaaacacacccttctttgtctagatcttctctcaatcgatcgatcaagctctgcacattctcaaacttcattcctttgcactctttgtggaagtcaaagtacatatactttgctcgaggttcgttgacaacgagcatggcgttctcaagtgcctctttgataggccgttcgtatttgacctggttgacaagattgactagatgaacatctccgtagatcacgatttgctcggaaagatgggattgaagagcagccgcctaaaacaatcagatgagtgtcagtatcagtgtcttatggacaacagagatattcgagtggccaggcaagagaaatgcgcacagtttcaggaagagccatcacttgcagatcgggtgtgtacctaagattgtttacctgcgcccaaaagatcggggcggaacctctgacctgaacaaaactaaatcgttccctcccgtgtatcacgtcaggtaaacctggagagcttgagtgtttgtcatcagaaatttgtccgtttggcgtgctaaacgatgacgatggtttgtcgaacagaacgatctgctcggtctctacgtagttggctgtgttgccatcatgatcaattcctctagtgaagaaccgggtgccggatcgatgacgagatcgacgcgagatgagcgcgagtaagataggttggctgccgatttcagtttgacggagctcaaagtctgagacgacccgacgtagcagaacgaaacacggtgaactgatcagattcgctgagaacgtcggcgatgagacttggtgtcaataaacgggttgtatgacttactgccatacatcacaggtaggatgaattgactcatctgaggtcaaaaagatcgataaaacattagcaacaccccaaccacaaactaaacaggcaaaagagacgaaccgcaggatcaacagaaactgctcttcccgagctcgacactctgccgacgtctaggaatttccgcatcaactccaagttccaaaagaaccggtcatctgcccgctcctgaagtccttccagcctgtcttctcctcccgcggccctcacctgtctccactggcgttcgagggtatttgtcaggtcaaatgtatatgagaaaaacaatcgagcggagtctaagccttgctgaacgagatcctgaagctgcgcctcgtacggagaatacagccgggccgggtcgagcggggaaagcggaaggagcagatgcgaggagacttgatagatatcatggtcgaggaatttacacgaatgggttttttgagtgataacaatgagatagtccgctgttaaagtttatacaagtagtttggtcattatgcatgcagagatagtcataaggtttcttagattacgcttggaagttctcaagacctactcatggcgagggagatgatgcccagaatgccatgaactgtaaggatttgttcagtggcaaccggtgctgttttggtcgtagttgtttgaatttaagcaagagaagatccaaggtcgtttggaagagccgtgagaatgtgagcaaactgcttcgatgccgaacatagatggaagtcattcttacgattcaacacgatgctgcccgtcatccgatcgatcacaagtgtatctaatccggccatcttatcattgaggtctcccctaagagctgattgaaagacctatatcattacatcgcgtcatgtttagattgcaggttgcaaaagacggtgataatcaacattggtaagaaagattggtgaaacattcgaaacagcatgagcccaaaaacccaacgcgtcctttgcgttggcaagtcggatgacccgaacaacaacagaagaaacgtacataagcatcattactgatatacagattgagagattggtggatcgatctcgttgttgatttcaaatccatctttaaacgtgtcgagtatcgttcgttgcgtttgctagcctgagttggactgatggacggatcggaggtagagagatgatgtactgtcaagaggggtgtcgacgaaatgaaacaagttcagagatatcgatatagctgaagcctgttggtccagccaggctgtatctcactggctgggctgtattttcgtggatacacttgtgtatctgagtgggtcgaggagtgagagaagagacggaacgggccgatagatggttggtgtactgatggaacgaaatgtcggcaggtaatcctttagactctgtttttcgggatcctcttttgatattgtcatcgtcctctcagtttcaaatcatacatctatcttatcactctttcgtatcaatcttagataagaaacagtgagaccttgtatgcatggaatccatcagccataaaatatgatgctgcacggtcgtagagcgcaacgcgctgtgggtgtttgccattttgtcttgattgtcttgcctgccagctgggccaaatcttaagtgacttagatggaccggtccactatattctttactttcactcgatctcctactcgccacacgccttccggatctagtccattagtttcgttccgggcaattggaatcgcgtagactcccaataaggggcacagtacgcctacgaactgatcaattgtggagtgcatctttgtgtcagttacgcgtctgaactgatttggagaacgaagaagagactttgagaaacaacagacctcgtccacctttttgggtcgttcagatgatatgactttgtggggtagcgtcggatgcctgactccagtatcagggtcgacgtttgggagctgagcaatatatatatatactcgacaagtaagattatgtctaataaacggaaggcaagcattaacagagaaagaaagcgatagatgaatgacatacagtacatctcacacactctcccaccaccaagatatcatctcctcctgattcccctgtcaaatggatcaattctaatcgtccccatttatcctcctcgaatgcgccttggatgtcatcgggctcggatccgtcgtcgagatcaacgacaatgtttggccgcagccgctgaatggcattgtttatcgaaaagtcgaattcattctcagttgagccgggtatgctaggagtgagatcagtgattgatcgagcgatcgaacgaagactttggagagagatcatgtggagtgggtatgtatctgcgaacgccttgtggtggaaagccaagtaagtccagctgtcagagcgggagcaacaaaaacgaattcatatcgaggcatgatcatcagaacgttaggattcaccgtggtactcttcgaatagcctaatcccgagctaggtgcttttttccctggacctctgacgtcccctgatttctgacatattctgacaggtcttccaaagaatttggaaagaatctcgtttgagggatcatctggaggaggtgatacccctgtgagtgtcaacgaccacaagttcagatcttgaaatctgatgacctgacccatgattgatcgtgacgatgtgcgcaaccaaacagaagccgtaacacaagtaaaaagttattagctacctcctcatcgtgcctccttctccacgcaaagcttgaataggtcctacgtttcccagtcccaaagatcatcctcagtaggctcgaggggtaggtcgaaagtttcgtggccagactcgaatgggacgtcgacaaccagtcgatcctgttcaattctacacgtgatgaggaccatctgagtatttgaatcaggttatagtcaac

SEQ ID NO: 1468 - DNA, 16165 bp, Xanthophyllomyces dendrorhous
atcaggttatagtcaaccatctgcctctcagtgatctggtatgataaagttcatgacggacggcggggaagtttctggcagtacaggccttcatcgttttaaagtcgactatcatccattgtctatcatactagttaacgtatcacaattcggttagctatggtaatgaataagaacaaacatatatagaatcttacactgagtccctcgagagtgtatgttgacgattccatagagatccctcggcagctcttcaagaagacggattcataagtattttgaaatccatttatccgagatctgatgcaacatacggaaaacacacttacctttattggataaacccatattgagcacaccctgatgccacttgccgagccagaaccacctgtcattcgactagggaaagagtattgtacgaagaaagagggtatacaactcgaatggtgaaggtatgccgacgacgagctcgtcggtctcaatgaggtgctaccggacagtcgaacaatcttcaatttcattttgccctctaccaccagcatcgtcatcagcggcagcgggctcgtcgttcttcgtttctaaactctctcaaggagtgttccaaaaggctcaatatgcccacaatagttcataccacagcggccaccatatcttcccagcataatcgccatcagcagcagcaacggcagcatcagaaccatcatcaaccacgcgcccggttctctagcccgtccaatacaaatgatctatggaatccccctagatcagatggatcagatgaagacgaatcctccggagtgaccgcccgtcctcaaccgggactctttcagactgtagaggaggagactgctcagtatggagaatctgatgggcaagaccacgcatcgttccgatcagttgatggagtgactgagcgactcaggaagagatcagaggatgaatcgtctaaccaaggctctttcgacgaggaaattcgaggacaaattcccgatgaatacgacgacgacgacgacgacgatgatgttggaggagatggagagaatagagtggaacttgtgcaaagtcagtctttctttcctagtctgctgcttcggccgaaccatgctgccatgagctgacgaaaggacgaaccttcgaacatgcacaaagttccttataggattattttaagaagataccttttggtacccctacttgctctaatttgctttggaggaaccatcgccttactcacatttgcttggttagtgttctttgttctgctctcttcattttggatttgcgaagaaattgtatcagccggctgagatttaaacctgatcctctctccaggccaccgcctcctgatggggagaacccatatcctcatcgtcccaagctcgctcacttcctcgttggtgtagccttctactcattagcgcatgtgtgtatactattctcttgagtgagcattgccttcctctttcgcagctcctaaactaaccttaccatgtcgcgtcattcagtctcttcgaatcccaattgcgaccatcttgtctcctcttcctttgtctgcgtcctctcttcaacggacttccaccgctttgcacactttcgtcctcgagatccttcgtcttgcttcaatctctatattccttcctcctctgcaagtctgggaatccaactctataccggaaaccaattcgttgactgaggtcaatacgtcagtctctgttttatcacataatcatttgctgccttatccgtctgtatgggaccagcggccagtgttcgcctcggccgcgtggttaggcctcggatgggccgcaggagaagtaaccgtcggaatctggcaagcgtttagtcagctgggattctatagaccggtcttgcctgatgtaggcggaggtatcgaattgggtcatggcccgaatgaaggagggtcacttggattggaaggaatagatgtccgacgagacatcatcgaggaggtagatgatgatgacgatgacgatgacgaagaaagtgaacagcagcgggaaagggaaagattggaagagggtgtttgggagcttatagcggttcagaagcgagaaggttcgtttctctcttgtcttttcctaccaccatgttgtctgacgtgaatgcgagactcgtgactttcatagaaatcgagtctcttctgggtgtccctctacccaacatacctgctatcatccttgctctttggaggatcgattcattgcttctcaacataggtatcaccctgtacgcccaaaacttttgattcaaccgtcttttctactctcttgctcttactttaaccctgaaattcaactcatcttcttactttccatctttcttttgatttcgccttggtacaccggcagcatcttctccgcgttgttttcgacccacagggaggacggatctgcgtggcatatcatcaagcacatgcttccccttttcaccgccgttgcaggtggtcatattgttctgagtttagtttgggtatcaggtattcctactctgggcggtgagtgaactccttccaagtcctggcttgcaagaggttttggcaaatacgaagagtatcgatcgttaatgtatttcctttccttctgtgtttcaacgggcttcggatgatcagcaccaacaacgacatatgcttctcttctggtcgccctggctatcttcttctggggtttgggaacctgggaggccttgatctgatacaatctcaaggttcaggaagcgaagaccatgattgcttggtagtcactctcctgaatgatctctgctaaatcatgtttgttttattagattagatattctatgacttttacgactatttccggatgtataaattgagaagcaagcaaacagggttcctagtctaatcctgtagcaaagttgaattgaatgagcaacccaagagttgctggaaagacataatgaaggcatagggtatatcatcattcctgagacctagataatgaagtcgtttcgatctcccaaggtcacacaaccacaacatcaatcgacccgctctccttttctgacaaagcatgtctgatcgtctcgagagcagcatccttctgtctttcggatcctacctcaatcctgacgccttctgcccaaggactcggtatctcaaagactttgaacaacttcaaccaatttatggcctccgtccatgaactgaaccaatctgacccgtctctcggtggttgtgttttgaaatcccagatcaatgatcggcctttgatcgagttgtttgactcttccaaagaatcgatagatgcaaccggaggtagtgtcctgaacagaaactggagttgtccgctcggagcaatcgaatctgggaaaagacctgcaagccgaacggttcgaagtctgttccatctgtcaacccctgctcctgtccggtcatcgacctcgaggtctccttgtgggcagccggcccattcgaaatgaacaggattcacagaaggaaacacatatgagaacagacggaaacgttcgggatgagacgatcttgtggtgtttctcaagtgaaaactggacagttgaaggggaggtaatgacgatagccgggtaggtattgaagacactggtcgatgaggggttcgacgaggggtaaacttgggtggggttgtgatggcgaggtgtcgggtattcgatagggagagaaaggggaatatccggtttgtcgactcgatgaagtctgtctaacaagaaacaaacagacaaagagtggaagtcgaagcagttataaagacatgaacagatggaaaaaaggatatgcgacatgcgtcggatgacgagtcgagaaagatcgataacgtaaacgagaatcaagcgaaccaatcaatcatctgttttaccagaaggctgctagccaaattttcaatatcagatatacagactaacctccacgaacaaagcatcaagggaatcccagtctgtgagctcgatctctccgtacagtagcggaccggccactcggaggacctcgaacgaaaccaagcaaagcgcgaggagtgttgaccgatcggcgaacgaaaagataagacagtacaactcccacggaagggaaaccgacttggtcggccgttgactgtaagtctagaagtttaaatatcgaacaggatttgagctgaatctctgaccagacggtgaacgaaagatcgaagaggatttatagaagctcatgatcaagcttacaactactgaggcttctgatctgccttctgcttcatctaagagcatttttgtcactttttgttcgtgcaatatacgcagttggagcggataatcagaacaagaggttcaacaatctgggtgcatctgttcccaaggaggatgcctagggagaaggtgatgatgttgaggtgagttgagttgaagacgcagatgattaaattggccacgtggtcttgcgatttttctcttctatttttctctacgcgttatttgcaacaattgattgatggtcgcaccaacaagataaacttgggcggagcaggctacagatttcgaggatacgaaaaatacggcgaaacatctcacgagagaaaccttctaatagaaccaaggacttctatgactggagtaagcgaaaggccacatgttgaatatgatatgactatagtgtaaaaagagatgacattggacagaaacaggaatgcatttcggacagagcccagagtttcaattgcgcttgagacccatgggatatcatcactgaacaatgataacgacgattagaaatcagctcaaaaggaaagcaaactctgcacctgttgagatccatttcgaagatttcgcacggcgacttgagtaacatcaggcttgttcatcgatcttcttcatgacgacacttagctaaagctacctgtgtttttgatcacgacgtcgccttttgctgcagttgggaacattcaccgctgctagtgtaaggatatctctcaacggttacttagccattcagggtcttctcccacgcaggggtttctcgcatacagcagtgaagccaaacaagatatgataaggaatgagtagaaatacatagagtcgagtcggagcttaagaagtaggggctgaaacatccgaataccatatatacagtctggaaaccataaaccaagattttcgtctccctctgtgccatacggatctattcttctgtcacatcaagtgccttgtgtccgtacgtatcatccagtcgactccggacgtattcacccgcgctgaatgacgggatgaatgagttgtacaaataagtaagcttcgattcgtctgctggacatattgggacttccgatgtccagcctcttagagcaaactcacaggatgggttcatatctagcaggtcgatcggcagagacacaggtgtggaatggctaacgagcaaaacatggaatatgagtatccggatgatcagatgacaagattaggtatattagggctcacctccagcacaacattgtaactggttgatgaggaacgaatgataatgaatccattgtcaacgcgcagccttggaagaacatctcgagtgagagacaagatagatcaacgtactctgtcccaaagaagaaggggatggagtaccgttctctacctgatcgattgatggctcggtgtcgagttgatacaaagatgtcatctattcaatccacaagaatacatcgcatagttgtatcagcggcaaagaaaaaaaaacataacacgttgagataaaacagaaagatagaacgaactagaccatcgagagagctgatcggcgatgctaagtcgttcacataatacatacgagctcagtctatttccaacctataagttcaacaacatacgtacttgatgacaaaggtgcctttgatgggaggtgcgtcgatccctgtttatcaaacgcgttggttagacaatgtgcagctattgctttctgcatcatcggatagaaagcacagagactcacactctccacttcggttgagtacttgtagcgcgccgacatccgtaccctgcctcaggatagtaaagcactcgtagtcggtatgagccccaattccttgaacttggccattgatatcaacatcgggagcctgagaaggataatgcagcagtcgcatgatcgccgctttttctttggtcttgagatagagccgcgataaggaagcagttaagcaaatatcacagcagtgagagatcagaaacagaaacgaaccttgtcgttaaaaaagtcttcaggaagtccgagagcgagggcgaatagagggaaaagtcggtagcctagatcgaggacttcatggctacgatagaattcaacatccgcttcgcatgaaaatcagcatttcgcccgacatgcttgattctcgagcgcaaaagaggatgcatccgattctcaagtagagacaaggacgctcacgaactagtacttcaagacatcacttctgaatccttcaagcgtttcatcggcaggccagatgttattactatggtggcctttatcgtccagcgtaggtataggtgcaggttcagagagcggctcgtaacctaggttgaatgcctcatgcctgtgtcaaagagccagtttcaaccaggatggcggatagtattagaatcaaactttgatgacttctgaataaatggtccattccacgtacaagtcgcctttattctcaggactgtaattcatccgatgataagttcctcatcagtcctctttttctcttcttctttaatggattgagaacgtactttgtgttctcttcgtagagtccttgataacctctaaagttattgctctgggagatatggagcttcatcttgtcttctttggacagatcttgaaagagacgcttagccgtatcgaaagtctgctgaacagtgctttcggacacagaatgatttttgactgtatggcatgaggtgattgatacgcggggttagtcttaatgtttgaataagttgcctgtgaaataagaccaaccatagaagaatccagcgacgaggcaagcttcacgaatcttctcgacaagctgatcatttgggagcgcaagatcgctgggtgatatcaaggacgatgttgaagagtgaatgtcagcaatcagtcgttccactacgcgatctaagttcaacgcggatgaaggaagacaagagaaaagtgattggtatgaccaacatgatgggaatatgatcaaactcctcggagtgcaacgtctcggcggtggagagcaaatctggagcggacataattgtgtatattctcgagagtgtgttgagaagatggatgaatggtaaggatgtatgtatatatatcaactatgtgatcgaaatggttataagaaaaataagaacagcatcttggttaagcttcctcgtgttcatgctattgacttgaagagagaaacgccgataagcatcaaaaccccggacaaatcggacggcgccgtagccagaagagaaggataagcggctactaaccgagatagacggcttagccggcctagccggccagattctgatccggcgtttttcgtaatcgtcgatatatggcttaagtaatcaggtcacgtggactaatagtttctcatttgccacaaatgcagttcttctcgaattacagatctcaactcaacatcttcatgacaaccacctagagtctgcgaagatcattgaattactgtcaagtcctttgaagaacagcagacatacgtcaggcctaggagcagacaaatttgtcaatggattctttcaagggatcaacagcagctgtggtctcaggtgtgaacgctccgccggaatcgtctgattctcaaccatccctgccacccactcgttttcttgctcatgattctaaccctaacatagtcgacatgtccgctcaatcggttctgcttgtcaacccatcgactgctgatcccactcttccggctagtggctctcctactgttgggacctctgtccaccagccagtcattgaccctatgaacaactctgaacggggtcctgcctctaccacatctaggtcaacgtcttctccccggcctgaagctgtgcaaatcgatgagatgtgtccttcttgtttaagcccgaacatccccctgccaccaggatatcagaagcgatctaaagagtttcgaaagaacgaggatattttgatatggatcagttgttcacattgttcgtttgaattgttatatacttgttctgcctactcagttgagtgcatgtgctgatcacgggcttgctggctacatctttaatttaatttcaaaaccgcatatttatcaatcaggcgaggattggtaccattggccctgtgttcggtctcggaatcagggtattccatcagcgctggaagaagataaaggagattggaaagctcaggtcgaaatgatagacaagtggtactgtccgaacccgatatggtatgttcttttcttcctgtctgtccatactctcctgcgcatcacaaagatttaacccctttttactttcgaccttctctcagctctggcccaacatccggccacattcctacattgaagcctcacccttctcgtcgagcctcaagccgtccgaagcctgtcgtggattataacgcgccttctccaccattgactcaatcctctcccgattggatttcgctctatcgggaattcgaagcccaaggtcggatcatgaccggagattacactgaaatgctcggaccggatgtcaaccttcagtggctcattcgagatggttgtgcgtctgggtggtatgaacggcacaatcaaggtgaagggccgtgggcaaagcctattgttgtcagagaggttcaaggtgctccagcaggagcaggtatcgagagtctcggaggcaagatgccgaacagatcattaaccgtagcagagatcgcagaactaaacggacgagatactaaggtcgaggtgatgaatgtcagcaatcagtcatctagcaagaacccaccgggtaaggagaagtctggatccgaagaacagaaggagagggagaaggggcatggaggttggacattaggggattggtcagactattttcagaaagataaggagacaagagggggcgaagtgttcaacgtaattagctacgaagtgtcagggaccaaggttggagatctgattacgccgcccaagatcgttaggtaggtatcaggtttctaattcgctggcaatctgttgtgtttctaaacatattggttctggtttgattgaacaatcgtcactatcccctttttttcgctttgatgattagggatctcgactggactacacgggtttggccgacatcagacgcaaagcacaagcctaaggttcagctctactgccttatgagccccgctggatccttcactgttcgtctctttcatccaccatcaatcttggacatgctagctcctatcaaatttactaaagcggactcccctctgggatatttctgtgtacattaggattggcatgtcgactttgctgccagtagtgtttattaccacgtgatgtctggccagaagatcttctacttgagtgagttcttgttctcacttcatccacctactttactaatcttgctgaatggagatgaccctatccagcttatgttgctctaatactaactcatctatcgccaaccttcagttcgtcccacgagcaagaatcttgacgcgtacactcgatggtctagttcagagaaccaggcaatcagttatctgggtgaccgagtgaaagagactgtgtggaaagtgactctaagtgcgggcgatacgatgtttatccctagtggatacatccatgcagttgtctgtttttttttcacattctgtacaagaaaaaaaaaggaaaaataactgatatctcctctttcttcctttgaattcatatattgttgttcgatttctgcagtatacacctgttgataccttggtctttggaggcaacttcttacattcatataatattcctatgcgtcagttcttcctctttattcgttcaatgactgttctagttcgtctgatcttgttttgttttgttttgttttgatggatgtagagcttaagctacaggacatcgaaatcgctaccgaagtaccgaagaaattcaggttccctcatttcaataagtacgtatcctctacatatttcatcaaagttatcatgtcgatcaatgccttacaaccccaaaggttatgttggcatgtcgccgagcattacagaagagaacttcaggctcgtcaaaagatcaaaacctcccgaaagacatctcatccgacaccaaatcttgctcctagttcacttaacgatagcgtatcgtatctggtcaccgagccattcactcctcggttactcgacaacctgtgttgcctctcggtgtatctcatgcgtcaggtccgaccaagagaacgagggttgaatgtggacagcgccgaaccagagtttccattcgataagattaaggatccaggagcggtagcgagagaattgaggtggagggttcggaaagcaatggacgacgaaagtgaggatgagaccgaagactacacggctattcctcagaaaagtatgaatagggattcgagcaaagaaaaccgcgactctgaagaggtgtcgtcgacaaaatcaaggaccccggcttctgcgcctacacctgttgagtccattggcggctcaggaaagaggagactctcattggaaacgaggatggatgagaccagtcttaaaaagcagaaggtagaaggagataaaacggtggacgttgtctccaaagagtatgtagatgctcaaaacactttgcttgtctgtcagataaatccaatgctgaccgtatgaggtcttgccgcccttgatttagttcatctccttgggacgcagatgaaatcagtcaacccatcatcagaactcgcacggtgactcttccccggccaggaggatcaaatgctcgaccagaacaagctctcgaattgtaccgatctgaatctcagatccgaacgagaaagcgtgcaatgcctgacggggggattgtagtagaatactcaggaacgacaaaagtagtggtcaagacgacgtgggctcctcctggaggtgaaggtgtaggtggaaaaggaaacgacagagctgtcttcagtcattcaaacccaatttacccgacgcaacaagcaaatccatccggttcttatctttctccccctctgaatgctccaaatccgtatataccacgaccgactcacccaacccaaccacagaggcctcaaccagttcagccggtcagatcacctatgccaagtacttctattgatagcacgccaactagtgggctacaacgtccaccttatcctgtacaagcccaaaccaacgcaatttcccctcttcctccccctttgcaacagcatcaacggttccccttacgacaagaacatcagcaaatacaccaacaacctcaacgacagcggccgatgtatccaaaccagcttcctgatggatatgctgcgccgtctttcaaccatccgatgaactctatacaacggccacctgctgctagttctgggatggtccttggtggcccgcgacctatctctttgaatggaactcaaatttctgttgggcaaactgacgggtcgcgactccaaccaccaccaccactaccagcaccatcgtctactctatctgatcttcactcgataccaaaccaacccttcccacatcctatccctcgttatcacgcaggtcttccgagccaaaaccaactgcagagacaaaccgtacggcctcctacagtaagatcggttcatccaccaaaaccgttcaattctgttcccctctcccagcaaacatctttgtcagaaaatttggtggcgaatccagcaatttcttcgccccttgtacatccagcaccaccggagtcgacactctcatcaagtcagagacgagagcctcctgtacctcctttccctgtactagagacaggggttacagcttctgtacctgtcaaaggggctgggcctgatgttgcgcagagttcgggtcttggtcatccgtcacctgtcgtactcgctgttgaaccagtcgccccgagtgcttcagccaagtctccgtccacccgtgctaaagctgtaaaagttgttcctatatccgattcagtgtcggcacctatgactcgatctgcacacgtgcaggcagctcaggtagcatcgccatctcctaagactcctactacggccaaggcgcctcaaagttcttctccccaagctcaaaaatcttctccggccatgacgatgagccttcggaaccatcctcctcctcctgtcgttccttccgttctcgcgcctacgactgaagctccccaagcgtcaaattcgacgttaaaggcaaagccaacagcgacgccaaagaaggttgtgcctcctctgaccaaatcgacgccgatggcaaccagacaacggtcgtccggaggacaacaaccagttacatccagcacccaatcgaccgaggggaaatccgtattgacttctgaggttgtaaacacatctggttctactacacctgctcctgtcacgacctcatcagagaacaagcgaacgacaagatcgagtggtgcaaagatgacaaatatggcgagttcttctccgatcaagacggggaaagtcgcggcagaggtttccacagctatggaagtagatgcagacgactcgctctctgagctttctgaagaaggaggatgaacaatattctatatgatatgaataactgtactcatcttatcgtgcatattgttaccaatctgactttgatgttcaaataaacgagtgttattcaatccgaaagaacctgcttacaatctctcacacgagcatcaatgaattctgggatctgagagacatagtggtctgtcgacaaggttgagctaactacgtcgattacgtaatcgaccaattataatcgcaatttcacttgattttcttctttctatctcaacagccatcacatttaagacggccatccagcctatcattcctctctcgttcctctcctcctcctctcttctataccctcacccctcaaagtaatggacgatgtctgccggatctgtgttaggtctcccgcaagcctcgagccttgatcggtcatccccgtcgagctcaacaagctcagcccttttgaacagatccttgaaatggaatccgtttcctctgtcggcatcggattcagtgtcgcccggtttgatgtcctcgaccaatgtagtcaagaaacgaggaaaaggtcgaccgccaggtagtaagaacctgccgaagccacttccgggcgcacctccacctcccaaaaagaagcgcgggcggcccaaaaaggtttgtgcgcttgctttattcaatgatttcggtcttctggcttcatagaatttattatctgacgacccttcctatttcgatacaatagtcggtccctttaggtccggacggtcagccgattgcctccccacctagacgagctcgtggccgacctcgtcgtgatccgagttcacttcaatctcctaaacgatcccgagttcgagcgcgaccgagtgtccctgtgctgtcacctgtggtagatgagtctggggcattcggcgtggatatgaatataaatacaaggataatgactgaggagatcgggcaaaaagaagtccggatgacatccgatggttcaaccgctggttggaactcagtcgatattcagatggcggtcaattctacaggaggcatgccaacatatgagcttgattcgcagacggtcaaggtcggtgagagtggaacaacgactggctctctctatcagcttgcaaatcaaccaaactctgaatccataccactcgctcaagtgagtttccttgctcagtatctttttccttttctggctccaaacccaactcatgcaagaccctccgcttgatacatctgtgcgcgcatatttttctgtagcccatcgactcgttcgaagcatttgagtttccagactttccattctcatttgattttccagcgttccttcaagaaatccaacagtaccgtcggattcaagatgatcatgaacggacgggtgacgtggaaggagagccgggtcattcccttgtctctccgcacaatccatcttcacatcccctctgttcttcatcctcttcgtcaacagtaccaccagcttcgctaccatctcctaatcctcttcctgcctcttctcatactcaatctcttccggagaatcagacccaacaagaacaagccgaacctacgataagaacacgacatagactttcacctgaaccgccgatgatgtcagagatcgaacctattcccttggcagattcgtttgcctttgatatgccggctttcttgctggagattcaacagtatcatcgagatcactttcaggtcaaggatgacgatgcaggagatggcgatgagaggtggtgatcgcttcgctacttctttctccgttgctttccttttttctttttcttctcttcttttttcttttgtgttttatacatatatattccctctctcctcctgtcactaggaatataggggaagatgacccatgtctgatttgaccgtttctgttgtatcgatgtctatcacccctgcctatgtctgcctctgcatgatgatctaggaaggtggtttctgtttcccttcttctttcttttctttttattcttcaaatttctcattgagcgactgtagacgactccttctttgtgtatcttttcctctcccttcctcgttttccttagatactttatagtttgctttctcttgcaggaaaggatatgaatgatgaaaacaactgagggagactgagagaaacattcacatgttcacgcaaaccaagggcacaagaatgagagaaagaaacgatatatgtgtagaacgagcagaaaggaagaaaaacagggcccaagacaagacaagtgaagagaggaagaacgagaaacgggggaagcaggaaagtacggtttggaaggcgagtaggagtaaggggatcagaatagaagagtagaatgtagaagacgtatcatgccgctgaggtccgattaacatcagtcgaccggacgacaaatgcagacgatttttagctgaagagatctagatgctgtcagcggaaggggagatgatggggagagagagagataggatataaaacaaaccagaatgtgaagggagggaaaagggtaagagatagagagattaagaaacagaaaagggaaactaccaagtgaaagcctcttcgtggtagacgatctggtgagcagtcaccccaccgcccaaagactgcttgacggcctcccgcgaggcatcgcacagcgccgtcggcccgcaggtcgacacagcgatccgctcgctcgcaaacggaagcagccgctccacatgagccgcaacagacggtcggccggcagtagggatcgtccggatcgcaggacccagatgggagaacgaccggtcgatcgcagccagcgcctcctcggccggcaccatgcccgacgacttctccacatccaccgactcagacgcagccgagccggtgtagtgcacatggaactcgacaaagccggcaggcatcgacccaaacagcggctccagccggttcaagtacgggatcaccgcccggatcgagtccaggtcgcggatcgaccagacgacgacgacccgcttgacggcgagcgtgcccttgccgagacactttgccaggtccgccagatgggccacgttcgccgacacgccagacccgccagacacaagcagcacggagccgtagtgctcgagctggacagagtgtccgtacgggccctcgacaagaagcttgacccgcttggtggacacgccctggaccgttccgtcctcggcagacgggtcgttcgcaagcgacctcgagagcgactgggtgaagccagagtacggcttgacgagcagctcgaacgccgcaggcgagtcaaggtccgagctgtcgaactcgtggtccagtgtggagtgggtcgaggcagacgacttcttctccctgtcagactcctggtcagagcttgaggcggccgacgaccgggcgccagactcgagaggaagcgccatccccatcggccaggtgatcgtgaacggatgggcctgggtcaccttccagtcggccgaccggacaaacacatac

SEQ ID NO: 1469 - DNA, 15996 bp, Xanthophyllomyces dendrorhous
acatacgttcccggcccgcccatcccagcaggccaccggacggaaggcacgagccggagccggatgaagctgccttcgccgacgaggtagccttcggcggcaaacgcgcccgtcttgggcttggtcgaccgcgacgtccggaagagggcgggcatgttgaggacgacgatgcggacccatcggaagaggtggtccgaggcccagaagccgacggcggcgtagatccatcgaaggagttcagtctctcggcgcagcaaggcatggtagtaacatccgacgacctgtgggtgtcaatgtgagtaggaaagggaaggtacagggacgaagagagatgtaactgtcagcaaaaggtctataggatttccgagggacgagcacactggagtacacgtgtgcaaagagtgtgaaggggtgcgatagaaagagcgacgaacccagaggagagcaccagtaacgtgtccaattaagaaaagctgaagaagaaatcgaaaaagagtgaaagtgaatgttggacgtcagcagaggcttggttgaagaactgtagagcaagagaaggctccgatgcgagacagaacatacctcgtagcagagctctcggattcgccgctgactgcagaagaacaggaggagacctccaaagatggcctgatatgaaaagacagagaggtcagattggagcgtgtagaaagagggaacagaaagagaaagggggtaagaggaacatacgacaaaaccccaattccagtaagccctcttgaacattgtgggtagctggtttgaccaaccctccatgagcagccagcctatgattggatttgatcaaggaatattggtcagtcacacgggaaagtagagcagccggttcaagtaaaagcaagaaacgtacagactgtatggacaaagccatgcatgaagcacatcctagacacccatcggtggtagatctggatggtcgagtagcttgcgccggtcatggccgtcaggatgttgtttctgcccgcaagcgcaatggcgagcggggtgagtccgaaggcgaggtaggcgcatcgatcggcggcgactcggaagtactggcttcgggagtatccgacggcgatgtagctgtgattgtataagttggaaagtgaaggggagtgataaagccagggtgagagaggtcaaagaaagaacgaagacaagaacgagaaagcgggtgagcaggaaagcgagacagaatgagtcaatcaataagcagagtgaaggaacgaacgtcaagttggggtatacagtgggttgatagaacaccatcaggacattgaaggtgaccaagatggtaataaaaattccgtgaagtctagaaagggtcaaacaaaagtgacgatgagggtgagaaatttatcatttcaggccgaaaagaggaccaaaagcacggaggagaggaatgcagtcaaggtagacataccgggtcgggatctgcacagacgtccaccttccaagcgcacctttcgccccgatgaacgacaccggctgagacgtcttcttgccgaacagagacgacaggtacaggtgcttcacgatcgccgtctggacccgctggacgggggcggggagcttgccggtgacccactgaccgatgaagtgtcggagggtggcgacgatgaagatgatggcaacacagccgaaattggcgtaactggaggtaggggagtaaagggtagagggaaggaaacaaggttcacatcagagacagcaagaggggagagagagatgaaagaataaagcagtagagggaacctacttgatgaacatcggaagcgcaaacgagctccacagtcggatgatcgaggactggacatcacgtcgaggacaagattagtaaaatgcaaagcgcaagaccgggcaagtgaccgagtaaatggttcagacgacccacctgaagataagcgagctgaagctcgggagggtagctcgcctgaagccaatgaaaggaaggaaaaggaaagagaagagcgctgtgtgagcatagtaaacgacgatgaacgagactggaaagatacattggcacgtacaacctgagaggtgactctgctgctaataccatactcgaagggcagtttcaatgcctcttctatggtccagtaaccccaagccatgttgaaagagtgtaagaacgaggaggggggaaagcgaggggagaggagaggattcgagaaggtgtagaaaagggtcagtaagaaagagccccgggtgaatcagcggactagactccttgttgggacgatgagaattgagatgatgaacagagaggaagagaggaagggtgaaacgagctaagatggaaagagagaatggtctttaagactcaacgggttagtttcccatcaagatctccgtttggtctctttttttcgtttttttctctcgctctccttctgctttgtccgtgaatcctcgtcgttttgtcagtcttctctctgtccctatctctaccgtctcatcacgcaagcaattaaaatgacaacaaagaagaaacaggaatgggctagaattcaaagcattcacggaaatagatcggtggcgggacagcatcagcagggagaacgacgttggttggttagtccatctagtcagcttgtcaatcgacgaatgagaaaggtcgaggtcgataaaggaaagcaaacaggaaggaacagaacgaaaaggagaaggaagaaaatactagtcggggcaacataacagagcacaccagcggtccggagctcacagaatcgaccgtccagccggagccgctttgcatattatgccgacgtcaacggtgagttcgggctaaaagggcaagatcaacaaagcccggacaaggacatgttgctataaatacgtacggagcctttaaaaccacgatatctgattatcgttcatcatgcccgaccgccctgattaccaaaagaatccgttcaccgacggaaacggtcgatcttgtttatcagattgttcaatctgattcgtccgttgttttttcactctcgttcctctctttattggtttcccttgtgttgtctctacatctgtagtattccttatgggattggtaccgcccgtttgcctccttcacaatctttcagcctaaccgagacacgataggctcgctgaacagacgacagaacaatcaatcaatcaatcaatcaatcaaattttctctttctcttctctctacgcgttcagctggcttgactcgtgcatgcatcatgataaatcttctttgctgatcttcgattgggaatgattatctgattggtcgaaccggcccagtgctgattctttcgacctattggttctcctacacaccaattttcacccgtcgccccacgcaaccacatggctgattcaagccatgtttggcgggtcgtattcaactttctttttagaaatgttctcctagatccatgctcgatcgatatccggacggaagggagaaggaaagaagatgatgaacaaagagaaatgaaaggaaaaaaaatcgtttttttttctctctctcacagcgttgacgcttaccagaatcgcgcacgcttccttcttcctcctgaaccgcccgtgtttgtcatcgtcttctttttcacatcgaaaccgctcctggttggtcgcttagttggataggatagaaaagtaggtggagggagagaacactcgaaagatgatttattattcactcctcctttccacttctctcgaaagtctcttctgtctttcttctttcttttggtcctcttctttccctctcttctcaacaactcttctctttcttttcatacagctcgtcaggcagatcgtcgtgatcttcatcaactctttctcctccttcctgtctcacaactctcgtccaaaaaagaatgcgctctgttcagaccgtttcgtgtgttgccgtgctgtcaagtgtagccaccgcatggaaccctttggagtggcaaaagtagattacccctgcaatcttcagaagcaacttttggttcccaattgactgatggccgctcctgcttgtttcctcttgctatcatttctttctttctcaagatatgccaactcagtgctctcttcagtcgcacaaattgacaccatgtctaccacggcatgggcttactggtccgttgatctcgctcttcatcgtctatttctatcttctgctctgatcacaatcttggctaatcccttcaccttatctccctgaacagggctcagaccgcggatcatgctcttattccgctgttcaaggagatcgaaaaggcaggcgccaactacaccatcgccgttcccaccatcgccggcttccgcacgttcaccacctccaaaggcgtcaacacctccgaccttgccacgctcaactcgaaaggatggaagtctacgtgggcagatgcctacccgtaccactgtgggtgctgtcttcttcttcttcttcctctgctctccctgttctctttctcctctctttctcctcctcttcgctctcgcgtgtcgccgcgctcccttgctgatcaaagcatgcgctcgttcttcgcttgccttcttcccagtcctcaaatcgacagtcaagacaacagccgtcaagtccaaccagaccatcatcctcgactcctacaagacgtcgcctgcgggcgactggccgctgcagatggtgtactacatggacggcaacatcaaagccaaggacgtctctgccgcgtcgacaagctcgtcttcttccaactctaccacctccacttccggccacggttctagttcttctaactctactacatccgcctctggccatggctctagctcctccaactccaccactgtcgtcgcatcctctaccagtacggctaccgattccgctgcctcggctgcaacttccactaccactcgtactcacaaccacaaacgagctcgtggtggtaaaggaacaaccacctcttctgttgacatgagcggtatcttcaacggaaccttcggtgactcgttctgtcagtcgtttactcctttcccttgttgcatcttttgccatatggcgtccgcgtcagtcgcccgctgacactacttctttctcgctctctactcgctctctccttcttcttctccctcctcctcttcctcctcttcctcctcttcctcctccagacggacagtacaacgtcaccatccctgacacgaccgtcgggacgttcgggatcgcccaggccgtgagcggatgggtcgtgagtctgctctttacgctttcctctgctgcgctttcctctttgctctttgttctttgcgctttccttttcctccttgctcgtgagcctgcttctgagcatgtctgtctttcactttttcctttcttctcccttctccacgccttctgtgtgctcctgtgtgctcctgtgtgctcctgtgtgctcctgtgtgctcctgtgtgctcctgtgtgctcctgtgtgctcctgttcttgccccactcagaacgagcccaagtggctgaaggacacactgtcggacctctcgatcaactacacctccctcgtcgccctctacccgtcgttcgccaacctgtcgacctcccggtacaccctgttccttccgccgtcgagctcgatcccgacgtattccggcgcggcgttcgagtcgttcgtcggcaagcacctcgtcaagagcctggcctactcgcccatgtacggctctggcggagcgaacctgaccgcgcaggacggctcgacgatcgcatggacggacggcggcgtgaacggcgcaacggtgctccaccgggatgtcttgacgaacgcgatggtgctccaggttcgttttctctctttccctctcttctcttctcttcttcttgcttctgctgccgccgctgctgctgctgcttctctctatccaaggctgaccccagcgctttccctccttcgttcgctttttttctgcgcctctactctctaccttctacgctctagctcatcgaccagccgttcaccaactagtcgaccgatccgagaacgacaagaagagggacaggagcagggatacggagagagcagggcgagaggtgtgtggaggggggtgtgaacgcgtgtgttgacgggcatgtgatgggcggagaggggtggagaggaaagacgagtcgataaaagaagtccacatgtacatgcgcgagtgagaacgttcttcgaagaagatatcctcccgagagcacacccacactgtctcatccctatccctatccctatccctatgctctatttcgcttctcgcctttcgttctagtcttcatttcatctttcatccttgttttcagtcttccatcttagtctacacgctgcttgtttcttgggctttcttctcactaatatgtatgtttcctcatcctgccttccgtcgtctgctttctctccctgtccctctctctttctcttccatccccctgttctcgagatcaagtacactctcacactcacacatacgacataagagtaacgtagcatcgattagggtcatagaaaatacagtgtacaggccctcccccgtagtatcctcgtccatcgcaagccgtcagcgcgaatcagaccagagaacgtctgacgagaaacctggcttccgactttcagagagaaatggtgatgacatcaggagagggagtttaatatttgaggataatgtacaacgcgtggatgattcctggatttccgttgatcagaagggtgatgatgatttgaagatctcgaggtcagtatttgtgagatggtaggtaagaatgcatggaggaagaggacaaaccagggatgtaaccaaggatggtcaacaagacgttgatccagaagtcggctgtaagaacaagttgtgtgaagaaaaaggtcagtccagacttttcgccaagatggaagggtagggttggatggacgggaaggaaaggtaggaagatgaacgaaccggcacatcctcgctcactagaaccgtttgcatcgtcacaaagaaaaagaatgcatccaaaggttttgttcggtcccaagaacacacaagaagatccgaagggaatgaagggtaaaaatagaacatcaagaaaaagagtggtcagcggataacgtcccttgttcctcagtgcccattctctctcctttcgtcattcttgtgcctctaggcttgacgaaagatggatggatgggttaggtagaacgattgaaaaggtagaaacgcacaggaagacgccaagaggaggaaggaagatggccaagatgatcttgaggatatcggagcaggtgactggcctttttttttcgaacgtgaggaagatgaaggcaagaagcggcagagccgacggcgagaaaccgaggaatcagagatagctcgaagaggaacgagacggctaacaagaacgacgactcacatgttggaaggactgtttgttttctaaaagaagggcgaaggagagattatagttgatgagatgatgttggaagggaaagagaaagaaaagaattcagtagaacgaaaagaaagagaagtttttaaagagtcggtgtgtatgcgtgcgtgtgtgggaatgtatgtgtctctcgcttgcggtgacatcaccgcccagatgtgtctttacgtttcccgcagtcaagttctcagtcatacctcataatcaaacactaacgcttccggctgccgtgtgctcagcagcgagaatagttccgagtcccggaaacagtcatccgggttctctctcttcacatacaaagtaagaagagattaggtagagtgaacacacgcctgcatcccgtcgagatgaccctgcggatataaaggggcatggatcgtcgattacctgtatatccaaaacaactctgctgtgtctgctcatggtgaaagcctaagtggtccaataacggcaaacctagttttcttcggcgcttacttgccggcacgtttgatgacttcatcggtcattttggccgttagtcggaggacagatcgactagagattttggttgatagacagaatgatgtttgctccgtaaatgtctcacactcttggcaatgcttattgttggtcaagagggaaaaaaaaggaaaagatgatatagttgtagcggcaaggaaagatatgatggtttatgcaatctatgtagagaagagatattgaaggaaacaacagattactcgcaagacagatcctaccaacgttcgagacgagcgatagtgatcaaagggtaactaaggatacataaaaaaggggggatggggcggaggtacgaaacaaaaatgggacggttcgtgtgatgatagaaagaaaaacacgaaacgaacgaccactgtttaaagaccttcgaaaagagattcgggctcaagaccctggaacgagatcttgtagaccttttcgaacaaggggtagccatcgagtcggcctctggcctcaaggaattggtagatctcctcggaagtgatggttccctggagcttctgtccgtcgagaagctcctcctcgagctcagggaaagtcttaccagacttgacgaaagcctcggcgcactttcggtttcgtcctccgaacgaggtggtgatctgaaagagatgatcagaagttaacggtttagtatgtgtaaatgttgaaacaaggatccgacaagatatgagtgctcaccagatcagccacaccggcagagtggtgagaaaaggtggaaggtgaagcgtcagggaagaattccaaagtgaaagaggacatctccagaagaccaattcgaaggatagcagctgccaaaagcggacgacggatacagatcaatacaaaaatctacgaattagagaccgacagaggaacttacccttagtgtttccacccatgccaagcccgtcaacgaaaccggcggccatggcgacgatgttcttgagagctccagagagagacactccagagacatcctcgatggcgtgaacacggaacatgggggtatcaaacacggcgtgccaggcggcagcatcctgctgagcgggcgtaccgatggtggtctcacagaactgggagttggcaacctcgagagcgatgttggcccctccgagagctgaacaaggaaggccgagcttctcttcgatcaaccaggggtaggtgaaaatatcgggtccgtggacttcgatacccttaatggcagagatggctcgagccttggggtgaagaactccgggcttgctgagctcagctaagacctggaaagaacgatcagggtgatggatggtggtgagcgttgaatgagatagctaggtcggtgttaagaaacacacttacaggaggcaagaactgatgaggaacgcagaaaatgatgagcgtagcatccttgacgacatcggcgagctcgggaacggcgacgaggttctcgggcaaagagactccgggaaggtatcgtgcgttggtgtgctccttgttcatctgttcggtgagctttcctcctccttcgacctaagaggccgaggagaggagaagaaggggatagagaagggtaaggatcttgattaggatccaaaaaaaggcagatacaggcagaaaagaagcagaaaactgacctccttctctcggacccacatcctgacctccttgtcgaatccctccttctcggccgtgttcatggcggcaattctggccaaagcagttgcccaagaaccagaaccgacacaggcgaccttatcgaacgagccaggctctcgctggggagccggggtggccgctccgctaaggctgagagcttccatcttgggaaggttggcggaggagcctcgtctggagccaggggcggatccagatcgggatccgacggaagatcctcgtctgagcttgacggtcggcgtgctgtcgatctttgtgtcttcagttagggacgagatgccctggagaccggagagcgcgttattgggcagatggctcggcctcgtcatcggcgacggaggtcgggaagaggcctgaggataagtgtatgcgtgtattcagaaacatgtcagtctggcgttctctatggacttgctgatcggatcaagattgtagacaaattgagagaaaagaggaagaagaagaagaagaaagagaaagaaagaagaaagagaccaggaatcaaggttaaaaaaaattcaatctcacaggagtagacatgggcgagggaagggttgacatggtgaaacccttctctgtcttttgctcggttcgatcggacatgatggatgactatgtggaagtgagagtatggatatgggtgtgagtgtgagtgtgatagattaaagcaagtggctgataggaagtaagaaggagacagagatagagatgagggttgaaagaaaagggacaagaagaaaaaagagggagaaaggaaagacagggcgcaaggtacagaaacaagggggcgaataaagagagatggatctccccctcgactagctaaccctagtacgggcgagacggcgagagagggagagagaaaaaattaatgctgagaaaaacgcccacgtcagagaacgtcccaaagggaagtgggaaaagtggccccggtttaattgttttggttttttttcggtttttttttttcagtctcgatgttatcgtcattactctggctgctcaggtccaagaccggagtaacccttggattaaccagcagagacaacgttcaggagaaaagctaacgacagccctcagaggtgaggcgcgaggcgcaaggcggagaaagaaactcgttaggctcattcccatcatgcaggatggacaagacattttccttccatgtgcctggtgcattctatttgccttgcctccggcgcgaaaacatcacctccctcctacccctttgctgtctgatggggctgataagtgggggagaggcagggcgtgtggtgtgaatgtgtgtaccttcttggtttgatgacgtcaagtgatctacttaaatgcggggcaaagtgactgtggagtgaatgatcatgcccctttttttactatcattttgttttattttattccatctcccttcttttccctagttttttcaccctttttttcccctcaagcgtaatgatgaatggtaattgatcgatctgtgtgtctgtctctgtgtgtctgtatggagtgtcattttcccccacagcccggtcattcatcgtctcacccacgcccacacacttccttacttgacctttccccggccgcccggccccctccccttttttttcttctctattcctgccctcgctctatcgcctgtcggatctcttctggctcattccaccaagagtacctttttttttccttcttttttttttcttcccccagcacatacataatttccagccctctcgttctttcctttctcctttcttccaccatcccatctctccttccttccatcaactttctttaagagatagaccaggacttgactcattctttaacatccacacatccagtaatcttttatacacatcgcaatgtccgagaccatcaccatctcccccaaggcctgtcttttcgacatggacggtaccctcatcgattcttcccctgccgtcgtggtggcttgggagaccatgaaggagacctaccctttccttgtgagtccgctcgtctttgtgtcgcccttgacaccgttcctagcttccgtttcctttctaacgaatgaatcccttttcggtcatataggatcttgatcacatcctcaagtctgcccacggataccgaacggtcgacgccttgcgaaagtggtgcctgatcgacgatcaggagctcctcgcgaaggaggtcgtccgattcgaggttgccattcttgaggctgccaaggccagaagtgcctctggagctgacggtatcgtttccttgcccggagtcaaggacctcctccgacagatcggagagggtgccgaagaggctcgagatggtttcgagggttgggccatctgcacttcttgtaagtagacttgtcctcttttcctgggttttctttttctctttgcgtcttgcccggttatctacgagtatgtctgacattctttcaaattctcttcctccttctcttagccactcacttctacgcctcccaggccatccctaccgccggtctccctatgcccaagatcttcatcaccgccgagtctgtgaccaaggtatgtgtgattttctgctctgcgcgcatatagcctttagttttagtcattgaacatcatccctgccctgtcttgttcatcacagggaaagcctgcccctgacccttaccttctcggagccaagcgaaacaacgctgagcccaaccagtgtgtcgtgtttgaggatgccccgaccggtatccgatccggaaaggctgccggttgcgtcgtccttgccacctgcacttcccacaccagggagtccctcgagaaggagcaccccgactttttggttgaggatctctcccacgtccaggctaaatgggttgacggtgagctccacttgaccatcgagcagccgaccgaccgagcctccccggctcccacccccttggctactccttcggtgtcccgaagcggttcccaggagaacctctctgagtttgccaaggccgctaagaccggacggacccccgttggtactcctgctgccgatatcaagggagccctccgaggaatgtctggcttctaatgggagcagtcgaagaacgaaaaaggaactcgaccgttttgtttcctctctcccatcgatcgtgtacccctttgttttattcttgttcaatttttcttcacttctcaatccctctgttgtttgatgaggtagagcatctctttcctgttacgtgaccatgtatctctagatatccattttgcatagactactctcgaggttccgtccctctgcattcaatgttctttttcacctcctctcaacctctcgtgcgcccgactagtgacattcttgcactcaaacgtgtcgactgaaaaaaccgttagggaaaacgctccagcatgaagagacagaaaggagaaacacacggtcactcgggagagcggtaaaggcaacacgcgagatcgagttcctccgacgctgcaaaagtccctgcgtcatctgttctttcctccatcagccacggatcgtttcttttgcctccttataccggtcacttcctcttaccactgttctaactttggcctagccctctccgtttttcatctgtcacctatcgatctcgtattcgattccatcagcacatttggtagagacaaaacgacccttatcgataacgcaaaccatgtcaccttcatcctcggaaaccccatcgttcccaaacagagaggctcgaaagctgtgttgggcagcaagagacgagtattatagctgcttcgattcgaagggggctgtcgctcctggctcggagggcaaggcttgcgggaaggagaaagatgcgttcgaagggagttgtgtaagaagctgggtgagtttctcttttctctcttttcttttcttttctcgttgtctcctttctttcccttgcctttcttctctttgtctttccttctccttcttctcttctctcttcgtctttatcctatattgaaaccatcggagagcaagggaaagttgatcgatcgattgagcaaagcagaaaagatcggtattctcctctctcgatgagaatgatctcccgacggagaatttcacattcccctttctacacacccacaacccatgatatatagtccagaggacagagtggcacgactcgattgactcaaggaccatcacactgacgaacgcatcactttctgttctatcatctttcacttggcttcttacctctcaccggttctgaacccggaacgcaaacgaacccccttcgttctctgaccctccgattcccactcgatatcttcatcctccccttcaccccatccccgtgttccgcaaacgaacattctcagatcgactacttcaacaaaagaagagtactggaagcaggcctccgagctcgtctactcgaggatcaagcaaaagggatcgatgtctctggacttagatacggtcctgacgatccgaaaaagaacttttccagcagaggttaaaattgcctgtcaggcgaaacgccaatgccaacggcgaaagaggacgggaggagaagggtgtatatatgtgtgatcatgaaatgcgatcgggcgggtgtatattgacagacgggccggcaacgagtttgaatgtgttttcacgtgtataacaggtgcacatctttccagccaagtggtaaatgaaaagaaagtagaagaagaacaaggagagaagacaatctgcatttgtgggatcgtacaccatctatgaacgacaggaggaagagaaggaaacaacaagagtataagccgtgttaggaaaatattctatcggtaagccagattttcatctctgcgatacgctaactacagctcctatggcttggcctgcttcgggtttttgcccagtaactctgctacaccggaattagcgagtagaggtgcccatttgggttcgatgtaaatcgcgctgttaaacaacagaaaagttgaatttccatattagtgatacgttccgcatacgtgaataataagaaagaaagagaaaacgaagaaggaaggatagaaagaagaaaagacacctacgtagcatccgccaagagctctccttcaagactcttcatctctgcggacacgaccaccttccggcctttaagttcttgaagcttcgtccggatgacaacgaattggttcgctcgagtgggtgctcggtagttgatattcaggttagccgtgactccgatctttgtcggcaagttcaaaagagcctatatgggacaagaagcaaagaatgaacaataagtgtgagtgaatggactggcaagaaatgcccgcagagagagagagagaggcaaagacatacgtttctcccggttgcctcatccaacacgacaccaaccatacctccgtgtacaatcccgtcgtgtccgcacaagcttcgaccaagatgaagcacaatcaccgcctctgactcgtcctctttggcaaacaccaacgggggaacggccagccgaccaggaccccggagcgtgcctgccgtaagggaatgatgaatcttggcaggatccatggtcgcgtatggtcctgttcatcacagaaagtcgcagcggaagccacaggatcatcagctcatgtctactgagctcaagagagaagtgaaatagcgcaagtgagggacaaacggcaagtgtaccatccttccttgacggcgtactctttgacgataggaagcgactttaaggttacctcgatctcttcagtgtgctcctttccttcttcagaatgcaagtgcggacctgtgatcatccggtagtatgcgtattccactcaatcatcagttgctgtgatctttcattgagcggaagaagaatcaagaagaaaaggaaacttgactgactggcaggagccgaacggggagagataaaggtagctaggtcgggagggtagagtgctcctaaggtgtagacagagatggcgaatgtgccgaatagaagtgtctttgctgcacatacgaagcattcggttagtccttggtgtacaaatccgactcgatggacaaagaccaagcaaacagacagagaaacgaaccaagcgcgtcgaaagccttctttccacccgaaggccgatgatgcgtcctgtgggtttcatgtccatgatgagcgccagatggagtccggtgggtggaagtgaacctgaagctgtgaggactcagcctgggagtaacggatgacctgatcgttctggataaagactgcatgagctcgataggatagagacaacacagaagcgagggagtagatggaatggatggctgaggagaaacgcggatgggcgggaagtcagagtaaccggaagccggcggtaattcggagtcagggcaactggccctgaaccctgaaccttgggcctggcagtgtgcctgagcttaaccctaaccatccgttcggccaactcctaggcttcatcctttcttttttcttgttcttttt

SEQ ID NO: 1470 - DNA, 4565 bp, Xanthophyllomyces dendrorhous
cttttttcttgttcttttttttgctctccctgcttgaaatctttcagttcatacaatcctatccttcatcgcaatgtccaagccagtccagtttgtcatcggtcagtctctcagtcggatctcttaccaagactaagcttctgctgacagatccttcttttcgtgatcactgctctgaacagagcaccttgaggaggacgatgcagagtccaagaacgtccctgcttgggtcgaggtaaatgattagcataggatgtagcatatgatgatcacgaagctgatctctttgaaaactcatcgtacatgtcgtcaatgaaaagctcgagtacagggtaaggcagacccggcgctgagtcttgttatctcagctgtagtcagttactgatgtactatgtatctatcgaaacctctcagcacatgctccaactctctcccgccgatgctaccgtccacttcacctctctctcttctacgtcgtccgctcttctcttgtccactctagcctcgccatcatcctcttcttcatccagctctccggcaagacctcaggcgaacgccgaggctcatactcaaggcattctcgagctgatgaaggagcgaaacatcccgttggagagggtctgccttctggaccccaaggccgagaaggtaattggaacgtctgactgggagcatgacggatctggagagtttgattggttcttgtttggaggcatcctcggtaggttccttgagtctctctctctctctttttctatatccgacacggcataccaagttcgagtatctttagatggtcccgaatcgaaagaactgatttaaattccgacgctatacgcgtcaacttttctctccaggggacgacccaccgttggatcgaacttctgttagtttcttctcttcataattcattggtttaggtaaactatgcttactcatccgtactatgcactctgtaatagatccttcgaaagatgggcttcccttcccgacatcttggccctgtgcaaatgaccaccgataccgcgcttggagcgaccaagctcgtggtcgttgataagagtgagtatgctgtgattgagaagacgcgctcagtcctgacaaactttgtttcactacttttggattctttgcgtatcacagttcctttggacaagattgaatataacgagtttcctaccatctcttttagcaagtccgagtctgtggaaatgcccttccgtatgtcccttccgatgtcgagcaacaacccttggtcgagtttcatcgcgtcgttacgagccaagctaacgtgccacatctattctcatctttgtcctgctgtctggccgataacttgctcgtctaggatacatcaaagaccagaacggagatccaatcctgccggaaggaatgaaggagcatcttcgaaaagatctggacagagcgttcgagttttagattcagatgaccatgagaacttttctgatgctaccacatccccgaacaccagtcctcaagacccatgtctggcgagcgcaagcatgtcaaagcaagaacagtctgcccagagagaagagtgttgcaagcgagctgaaaaggaagaaagaactgccacgaaggctgtggttacgatgttacacggccatggttacaaccccccctattctccctgtgcaagatgggttttttttttacttctcgtttcctcctctgcacacgcgctcgcatctctcgcttccatttgttctccatcaactctcctggtaagtctcaagctttgttctttcgtacgaggcgagcaccgggctcggaacgctgggtgtttcgtggtggatgtggcgtgaagaaagaccgatgggaacgaaagggatggcaggtcgaacacgtggatcggatgaaggtcaagagggatcatttttcccttccttctcctctcctcttcatcggagagtgccttcctggtcggagcgtagagcctccgatgtggattgatccatgcttggttccggacaacaagcttgagcaagccgttcttgacttgctgggaaggaaaacgatcgagagaacgaagaacaacacatttcaagagagaaaaaaagccctacgtcttccctttcccctcgttttctctcttctccttctcttccttcgttcgaccttctcgcatcgagtgccgttcgatgagtgattctctctcacaataaaaacatcaacctcattcatcctgttcccttcctgtccccttcccagtctcgttaccacatccttcctgcgccctcccacacgtcggatcaccttcctcttccctacccaagccttcctaagagaatcaagagaacctccgagaacaaaaaaaaaagtctacgacaagtactaaccttggatcccctccctccgtacctcgtcgtcttcaactctacgtccgatctcatcgccttgtcctcctgatcaatctacacaacctcaactccacgccctaccaaatcaataaatatggccgacactaccaaccccgcttcgcctcctgctgctgccgctgctgctaccaacaacaaaaggcctttctctgctgagcctgaggattcgactcataacaagaaagccaacattcagggtgaagaagacgatatcaccgcggacgacgtcaagatcgaacagcccgtagcgtccactcaagccaccgagcccaaagccgaagagacgcctgctcctaaaaagatggaaggagaagattcaaagatgcaaggggtggaggatgtcaagccgtacgtgtcctgtttgcttaccttgtactcttgatcccatagcgtcagggatctcatccagagtcgatgtcgatcgcgtctgacgtacaatgtttggttctacgtccacttttttatctttcaacacgcgcctctacctcatcagtgctggcgaagcctccacttcgacccttcctcctgccgctccctcagcccccccagcgtatgtgtttcaatcatctcggttctgagatcgctttcttcctcatcgtgttcttaattcttatttgtccatcatctcttcctttatccttctctcgaatcgacagtgccgatgctgccagtcagcaaattcagatgaggtgcttgattgttacccaggatgctagtgtcatcatcggtaagggcggtcgacacgtcaacgagatcagggttcgttctttctcaagatcttgtgtgtggtcacatatctgtggatgaaggtagtattgtgtaatcgaacagccgctcatcgtgtccgcaatcatctgttttcgttcgtgtccaatcgtggtgtatgctttcaactggttacctcttcgatcatctttgggttgttgttgccgtcatgaatatgcattgaataggagcgatctggagctcgagtgacagtttccgagtccattcctggtaaccccgagcgaatcctgcacgttagcggtcctctggatgctgttagcaaagtgcgtctgtttgcttaaggtttctcttttttgagtcgtaagtagctgacaaagagccgaacgcgtcgttgttactctttgcaggctttcggattgatcgttcgacgaattaatgatgagcctttcgatgtggcctccgtgcccggatcgagagctgtcaccatcaagttcatcattcctaactctaggatgggtactgtgtgcgtcttgacgagccatcttttatcgttgtgaaatccatcgcctctcggctaacattagcatctcttgtttggtctttggctggtgatcacaatgaactgtatgcaggatcggaaagggtggaagcaagatcaaagagattcaggaggcttctggagccaggctgaacgctagcgaagccatgcttcctggttcaactgaggttcgacctgtctacatattctcgcgacgcaagcagacatcgactgacctgtctcttctaaattttttctttcaaattcttatttccaacagcgagtcctttcggtctcgggagttgctgatgccgtccatattgctacctactacattggaaacattcttatcgagtaccaggatcgacccggatcccaccgagacggttctggcgccggccgatccgagtacagacagcagggttctggacgagactcatacaggcctggatccgagaggggtgataggtccgctcagaacgtggctctcgcccctggagctcagacccagagcatctacatccccaacgacttggtcggacccatcatcggtaaggccggatccaaaatcaacgaaatccggactctttccaacacccagatccgtattatggagccccatcagcagggcagcgagggtaacccgaacgagaggctggtgaccatcaccggtcagccggactctgtcaacaccgcaatgcagctcctttaccagcgactcgaacaggagaaggcccggcaattgcagtagatctgacttacactggtgtccatttctttgaatattctttgttttatttttacattcgtcatttcgtccatcacccttccccccttcccctccctcttccttcctctcgctgttttagtaaaccagtattctcaaaagggtgtcttattcc

SEQ ID NO: 1471 - DNA, 14305 bp, Xanthophyllomyces dendrorhous
gggtgtcttattcccccttccttcccctctcctcaatctcttctatcctccccctcttctgtggatccctgttattccatcttcttttgattcttttccccttcccttccttctctaaaccctttccactatcatgatttttttactggtccgatacggaaggcaaaccacgtatgatgacgcatatataacacacaaaagtcgatggtttgcttggtacttatttgatacaacacactgacgggcaagattaaacatataatactgaatgaggaaaaagagaagcatatgcattatacatgtgaggtgaagagaagaaaaaatggaaaggtaggagaggaatagtcacaaggcagggttttttttctttcttttgatcttttatgattgccgccgtcatcatacgtatacttatggctggattgagcagacacatccaagagaacatgttcaagcccaagacggactcaaacatcttcgtggtgctcgggttcgctctgagtggccaatctgtaaggaaacagaatatcggattcatcaacgaaacgacacaagaacagttcatcgtactagctcgcccatttactctcgctgatcgaacgaagacgaaccctttcttctcgttggagttgacttccatggcgtctcttcggttagcgtagcctggaggactccaagaggcagatcgccaggcctgaggtttgcgaaagaagacattagctcaacatgtagtattcgatcgagcgcaatatgttcgagaatgaaaaggtaagagaaacaagtcagacgccaacttacaggtgtgtctttgtcctcccatagcacttccagctgttcgagcgacagaccggctccttctttaatgaagaagaagacgatggccataccgacaaagttacagcacgcaaagacgaagccgtatctataactaatagagtcggtgatgaaaggcgtgaagaatgctagcaggaagttccacagcctgtgttatatcatccggcagagattagactcattcctttacttttgttagattcataggaaagaagaacacgaattcagatcatctaaaaagagaacaaaccagttagatgaaacagaaagggactgcatctttgctcgggttcgtgtcggatacctaggtagagggcgcgaaaaaagtatcgtcgtattcaaacaaaacttcgttcacgagacaacgacatgacgcgggaaaaagaaaggcagaaccagatggatagaaacatacatctcgctggtaactagccaaacaccaggaccccaacaagaagcaaatccagctgggcaagtgaagcagagcaaacgtgataagcagacatctcttgaaatgtttcatcacaaaacttacataccgatgaacaggcagctagctacaatctgatgtagaggaatcatatgtaatatgttagagagaccacatggacatgacgataaccagtagggtaaaacttgataacacgattaaacagcagcgcaccatgaagtttccaatgggcttgcttgtcaaggggttcccggcagtgccagcaatggaatacgcgaataaccctaggacgaaagagtgcatgagatgacaaaaaggcagttcttgttagatggatgaactgagtaagttcggatattccttttggcttacagaaagactgccaaatacccccgaagatcagtggcttccttcttccaaagcgctcatagaagtatagcccagggaaagtgcagacaacgttgactgcaccgaggatgatttgagttgcactacagtcaaggcaaacgaagtcaaagtgtgagtaaacacagtgtcagtaaccttcctgcgcttcaatcttcactaaattatatcggatgaggacataaccactaactatccatcgcttaggcctacaccagcgaaaagagttgctccgtagtagaagaagaagttggcacccgttagctgttggaacatctgtaggaggattcccagtaaggtccgcattctcattcgagaagaaaagcattcggctggaattacaagaataggtcagtaatgcatcttctcgattgatcacaatgagacaacaacaacagaagacacatacaccaggttcctttcccgtaggtaagttctatttcgcatgatttttgaatctcatggaagtcgtgctcgacatagggatcaactatgaatatcaaaacaacctcaatacgatgggtaccgaagaacatcgacaccaataacgatcacgctcacgcgcatcgacagtagttcctctaactctagcgagcgattttcttgcttcttctggtttgccgtgcacttaccaatggaataaagtttacatcaggaagcacaggagaggttagtcgaaaagctcctatgtttgagacatatcacgagtcaaagacccacttagaagccatcgaggtgactcaggcatgaacaagatgccaactccgaggataaagcagaagacaatacctgtccaaacgaagtatcatcgcgtttacaatcactgattgagatggtgcaattagaagaagttgacccacagagacctatcaaagttctccaactggcagctgaatcaagtcttctaagaccgattccaaaacattcagcgactaggatgcccctgagtttgatatagagcatttgaatgtcagataactgtgaaataggctaagaaaatctgatatgcagaaggtttaggagatttttttaaatctacagtgtgatagccaattggtaagttccctactagccaccaaactcccaaggatatcagccatcgagtgatcgaatacatatcgagttccaagtactaaccactagagatccccgaatttgctttggagcaagctcagcctggtaggtagggacattggcggacagcgctcctacaccaagccccgcgacgaatcgtcccatagcgaactacaatttaaacgggccaaaatccattgaggattagcctaccgacatcggaacaagatagagaacagtggaagaacgaaacttgttgccagacgtgagtggaagtcatttggatgatgatacctagagttgaacaacgaatggaggaaaggtcatgtgtttttattcttgagtgaccagcatggtcgaacaccatacgaaccgacaacaatcattgaggcagcgcaagtcatggctttccttcgcccaataatatctgccatacggtttgccgtaagagtattagcacatgcccatgagcccgatatctcggaaccaagggggaatctcaagtcaacagttgtctatctacctgagatgtagcctccagtcaccgctccagtcaacgttccgatcgatactgtgaaaccgacggatgcaatcgcgtttagcatacatgctaaatagggacaaagctatctgagtttgagcctgccaaatgaggcagagtatttacaaaggccaacaatcaacccgtttctggcgtttgagaggtactttttaccagacgcatcagtttgtccgaatcgttgtagctgggaagattgaaaggtagctggttatcattaagagtaatccctcccatccagaggaatggtgttgcctaagcatgcgatcgaaagagttgattcactaacaaaatctggaagaggagtgatgcaagcaatttgtcctatatgtattgaaacaggagaagttttcatcagtggtcagcatcacatctgtctgagatcagccgaaaaggaggcaacaagcgaaagaccgacgaacctgtatcgtagccaaacacaaatcctccaattgaagcaaagacctatataacgacataacgacataagaatgtctcacgtcaggaccctcaacacagtccatacatagaaaagacgactgttggcaagcggccgtagccgatcccacgtacggtcaaggcgattgatgtaagccccaccggggcatcgtagattgtgaattgcacaggcatcctaacaagtcaaaacgctgtcaatagccagatgtagagatctcacaagagtgggatagatggagatgatgaggtctgggtttgatgcggttggagtgcaaggtctctctctaccagtagtcaaagaaatgcatgaccttcagtcaagagaaggatcatccagattccttgaagaagaaaagagatctagtttatattagtgcttctttcctgcatgaacaacgaaacccaagtgttagttaggtcatccgatcagccagagggaacgtcgcaggaggactgaaggtcttcaaggagggggagtcggaatgatgaatcctatcagtctttagtcagtttcgtctattcatgaatcaaggccgatgtttatatccgtgttaacgtcagcagccggcttgagatatgtctccagtgtgcttgctcgctcgtcgatcaaagagggagagaaaaaggagatagcttatgattaagagtgggagagaaagacgcggccgttttcaaaacgctcaaacaaaacaaagccgagctccaacgtagatcgttttgtgccgaagcctcggagatatagtcttcggcggtcatagtttacgccttcaagacgtgctgcctctggtctttcttcgaggttgctgaccattgtctgatgatgtacgtcaggtgacgagatggcgaaggcagggcaagcgagccagctagacaacgcgtacggataatcagatagatgcagtaatcatattatgctctacatgggtaaataaagtgggcaaaagaagaggaccatagaggcaggaagcaggaagagcaacccacgggaagaaacagaatgataaaatcaattgatagaaaaaaacaaatacaaagagatagacaaaaatcgaaagtgaaaggtacgaatgaacagaatggactatgatagcagggtagcagcggaaaaccgattagaggaaagatatttacaacgaatactaccacattagaaaagccctacaccgctcattcgcctcgagccagcgctgccgctgttgaagctctgcttgtgtcctgaagatgaatggtagctcgacgggagtgatgaccgctgtatggcataggaactcagatggaacggaatatgatctcgtttcttcgcccactgttatgagagtttatgatacatcataaagcagaaccgttagacaggagttcaaatatatcaacagtcgtagaagatgctttgaaggacatacgcaagagatgaacagaatccgcttttgtttcctgagcaagttgaccatcaagacacaagtagacgtcagcggctacatccaggccgaaattgacagcttatggccatagccgtagagtagatcacgaagaactgaaaaacagagacttactttgaaacaaagaaataattcaccgaccataagcaacctttccttgtcggctcgttaaatgcgttcttgctctccccaaccaaaggaagagagttcaaactaggcggcaagaacccctcatcatcactctcactccctccagaccttcgccaactttctctcctatgacctttcccatgggctgtcgatcctgccctgccgccgccagcctggtcatcctcgaagccttctaagaagtcgtcgtcgtagcttcggtcgtttgcttccgtcatatcgtccttgccttcctcatcctcatcatcatcttcttcgctttcgtcctcgtccgaactcgcggcatgcgggtcagagtccatatcgggagagtatgagtagacttcgcaagagtctaaatcaccgttgaggacttgattaagtactcgaatgaggtgtgggtgagtgaatcctgggcccgcgttgaaagaggtgctttggagagaagtcgaggtaagagaataaggagaggtcgctagaaccggcatggatgtcggataagaaccatacgatcgactgtagaagataaaggatgtacgaggtacgagataagcttggtaagacccactcatttggtatatcaagatcatgctgaacgaaggatgactcacgggccctgagagcttagctctagaacagttgtcgaaagctgtcgcagaacctgattcacactatgctctctacgtgaaccaaaacagcacggttagctcgaaacatcactcttacacgtccagtctttcgtttgttggataatatggatcccgagcagaggtagagagtctgaacgtacttgacaaagtgatcaggcgccactgaggtgaagtcatgatcaggaaacgcgacatttaacaaagcgacgatccagaaccaagtttgtctgtgatgtgcggaagagaatcggaagaaacatgttcagagggtgatctaaacaaatgagcgactagaacggactcaccggctgtccttttggtccaacctcccaaaacagctctctagaccagcatctcggagttctgggctcagcgagagctgctcgtccatctcggcctgttcgagcgagtgaatcgattcaagatgcttgaatagcttgcgttccttcgagacagatttgcaggaatagacctctgtttttaagaagggaaaaagaaagaggacggacaattacgtgtcagttctttgaataaatagtgtttcgagaaggaggactcagacgagataggcagacagaactcgacagagctatgaatgcgattaacatgctcctatcaagaaggtctgttccgtcagatccaaaccaaccgaagaagggttcatgctacaaaacaactacgcatatagttctctttatctctggcctaaagtaagggagaagagggattccagcccatccctctcagttctatgccaagcgatctttgggctccatatcctgctcttacgtcggcacatgtacacacacagagctccgagaagtgttcgttcccagctttctcttttctttgtagaatgaaatgtccggagatgaattagaacataaagtgagggtacgaaccgaaccgggtgtggaccttgcattccgctccttcgtattcgagcctttcagatagatggttcagttcgggagtgtcgagatatttcatttggaatggtagtagatggtgatggagggtttgatttgtatgcagcaaagagagtgctgaacgagttggcaccggattggatacaataacaacaataataagacggatagaattgaatcggatagggttgaagagatagttgcagaaacaagggagatggcagaaggagggcgaatgatgggaaagtacttccggatgcgggaacttgttacgcccacaaaatgacgcatcctttggtcagctcgacctgtcatcgcgaatggatacttccatccgtcctagctcaccttaagtggaacagatggcagagtggctagacaggataagatgcggttgaacgtgaaggagtagcgacgacatttattctcatttcagtcaaacgtttgttttctagtgttgttgtcccatggtatctcatcaacgtgggtcgaaaggtgcagaccattcgctttacgttcgaaacatgggtcatctctcaattcaacaataccttcagtcgactctgcccgatcttccaaacatcatccaccgcacgcttgacttcgctcttccattcttctgatcctgctggtcggactcttttctcgtctggcgtgcctactcttatctgggtttccatctctggaatgatggccgctcgagatcgcccgttgacaaaagtgatgtatcttagaccggggaacagctcttcgtatgaagtgttgagatctctgagtctgaacgatgtgttcgaacacgaatggatactgtctgtcagatatgaggggaacatggctcgagaatacattgatcataaggagagaaaaaaaaacgaaccggtcaagagtggcctgactggtaggggctccggtagctccctgctcctttttgctgagctcactaagaatgtcgccctcaccgatacgggctgtcgagtttcagttcaacatcaaacttatcagccatgtgaaagctttccatgcaagcggatacaagcaagaatcactcacgatgtccgccgataaagacactctgatcttctaacgtccattgttcaaccatgataccctgtcctctgtccaatacatctctgtaagcatgaggaggatcggaagagagggattctgccagacgaggcactagtttctctagtaaaatcggtgtcggctcgaggagtgtcgacaggaagttggccaaggcaggcgacgacggctccgaaagggaggagagcggagggagcgttggggagaccattctgtgttgaagagttcagatgtatctgtataggatttgcacaaaagacaagatggtttcctgggtagatctggctgatgctcgggatacagagtaggtcggatggtatgttgagaagtcgacagattgtctgttgttctctaatctcatctcatctcatctcttcgtctcgaccggagttggtctgacgataagcgcgagatatttggcgaactctcgtctcactatttacatcaacatcgtttcattacgtttttctgtcttcgtcattccatctttcctcattcttttctacagatacatacatacacatactctcttatctgaatggggcctcagtcttcagcccttccgtttggttctaagcctggagcttcgtcgaatcatgctcgaagtccttcaaccgtccagtcgatgctcggcggctccctcccgccctcacttcaggtccctccgcggccgacgtctatctatgataccctgtggatttcttcaaacgaatccggattgtacgttaggagtgtcagatggaaatatgacgcggtcaagggtggcatcaagatcggttggggtctaaagggcaaagtcgaggttctggaagaaggagagctccagagcggtggagaagaggctgaggtcaaaggacttgttgggatcgttcggttgtggaatggtatagtccattctttttcgccggatcttctgcttcagctctcgatgcctgatactatctatcactaccagctggctatctgttagttattgtcgaatccaaacaggctggatcatgtatgtttgttctaaaactattttgatgggccatgtctacgaattgatcagatcttgcgcacgcataacatagttccatcctctgtgcacccgatttacaagatcggtaacgtccaggccattcctttggtacctaccgaggcccaagaagctatcagaaagctctgttcctttgtttctcatgttcgatctcgcgacgcgccagctgactcaagagcatccatagaagagaatgcagcccgatcggattggcttcgatcgggagaagttcaaacgcccggtccggagagagaggagaaccagactgaaagtgaggaagagacaacggccaagtcgaatgcaccgggtcttttcaactggaaccctttcatcaaaggttcgtcggccgtctcgtccgccattcccagtaggacgaccagccctggccccagaagaccggccgatgaaccaacgcaagctccatccgagttttccgccccttccatcagtcaatccggacccagcctgacaccggcatcatcgacctcagcgtcgcgttcgcagctcgagtctaaggtggtactctcgatcgcctctcagtttgcctcagggcagatgtttttcagctatgatgtcgatctaacgaccaacctgaacgccaagcaggctaaacttggtggatttgaagggagagaggaagacctgatcgagccttcgttacatcttcctctatggaggagagttgagagaaggttttggtggaatgagtggttgagtcgggagtttgtggatgctggagtaagtagttcttgagttaagggcttttgaacggaatttatgtgagactcagatgtacaatgactaactagctaccttcttttgtcaacgaactcaagttgcatgcatatgttctaccgatcatgcagggttgggttcaaacggcgacgttacactttcctcgatcaattaacactcttacctctaaatcagaatcgacctcatcttcttcatcctcatcttcatctgaggaagatgagaacgatgatgatactgagtccaagaaaatatctggcaagatgccggtccggttgaccgtcatttcgcgaagaagcagagaccgggccgggctgagatatcagcggcgagggattgatgatgagggtgatgtagccaactttgtggagactgagcagatcgttcaagccgaggtatattcttcattccttctattcggttgttctcagtttgagaaatatgttgaccactcgatcactcacgtctcgtatctacaaatggcggaaaacgaaccattgatggtatacgtaccttaagggccgaacgttctcttttacccagattcgagggtccatcccattattctggtcccagtcgccttattcagcctcggccttggccctaaagccggcacctatgttagatagacctgtagaagactcgaaaggcccgatgaccgtccatttcgatacgctcaacaaacactatgggcctcaggtacgttctggccatgagacacacctgcgtgccttcaatcttgactgattcttcgcaatgatgttttattaggctattgtttctctgagcgaattgaccggaaaagaagctgtggtgactaatggatacagagatttgttagccagtctgggtagggatgacgttcagtgagtgattaattaattaaattcttactgtcgtctacgttcgtctcacactcatacctggatattgctctcttcctgttcattttagatacacacagtaagtcgaaagagttgactaggaattcagatcaacgctctcacacattttctttcttgttgtagatttgatttccaccatgagtacgtgaattctttcgataatacatctctcttacaaaggctacgacagccatatgcaataattatccattctttgggaggttcgcttctagatgccggggaatgaagttcgagaatgtttcaaaactagttcatcaactagacaggacattcgctaatcaagggtacgtagttacaagttccaggaccttatttctgagctctctgctaagcctttggcgttatcatttgtgtgtgcagatactttgagcttggacccctctcaaagactcaaaaggggaccttccgaacaaagtaagcatcggttttctctgatgtgtcatggcgcgattctctgaccatgtttctgctttgatagctgcatcgattgtttggatagaactaacgtagttcaggtgagatttacaatcaatcgagagagtggaacgcgaccactgatttaatttcccctgcttttagtctgcatttgcaaggagtgtcctcacgacccaacttgccagtgttggattgaccaacttatctgctcttccaagatcaactctggagacggttttcaacgacatctgggcgaacaacggagatgcgatttctaaagcgtatgcgggcacttcagcgtgagtttgccctcaattctatatctgatcatgacgtccgttcttaactattcgcttgtttttatcattcaatctttatcagcttgaaaggtgatttcactaggtatgttctccaatcaatatcgaagatgatctcgacacattgagcattgataactgagtggacattctcaaatgcttaggacgggaaagcgagacttccatggtatgatcaacgatggactgaactcccttgcgaggatgtattcatcttcgtttaccgacttcttcgctcaaggtgtgtttcgttattcttgtcttgatttctatcgcatatacactcaatgataacacttatacttcttatcgaaaatcgaagcgataatctcattcatgttggggcaacggagtatatcaatctttaccgagttctcagaaaagcttcaggtctcggagccttcaaatcttcttcgactgagcatcatccgagctgaagccagtcagtcaatttgctcttatgattcttcctccagatatgaccatctaaccaatcggatgaattacaaaaaaacagttgagacctgtacagcacgggttctgaatgaaggagagactcgtcaggctggatggactcttttttctcccgtggagcaaagtcgaaccattagtccctcgtttgaagagaaggttctgcttctggtaagtgcgatgttgattcataactacctgtagaatcagtctttgacaagagctcttttatgttttcgtgaggatagacagagcaagctctctatgtctgctcgtatgaattccaactagaaaagtgagatgattctctatcttatttttgattatggttgtgttcaagattttagcttcgtctctgtttgtcacacagggttgtcagttttactcggattcctcttgcaactgtacttggattacagcgtggagaatatattctatctcctttacaagagtccggaaaagaccccgaagagaattatgggtgagtttctggcttgctactacgatcttctaaaccggcggccttgctaacccgatcatgttatgtattcactttcagcttcaaaatcatctatgaggatacggatgagtcaaccactcgactgacttcatattctcttacgaacaaaatatccagttcctcccactctcaatatgattcgtcttcgccctcagtgtctaatccggccaattcatctacaactcagaaaagaaggagcctccttaagccgttttcgttctcgaaatcttctgccgagaacgcccctgtcccttctacgactactgttcctatcccaccctccaagttctttgcattcaaagccattcccagagatattctgcttcataaaagaaatcgaccagacttgacctacacattacctgttggtggaactgaagacgacgaaggtctgaacgacggtcaaacgtgtagggaattcatcgaaggcgccgtgtcgaagatcaaggtcgcatgcagcgaggcagggagcggttcagacgggctgttgggtcctgggaagaagtttattgaggaagagagtatagtatctcttgcgcaggcagagaagcagacgagttggtcagacagggtcgaatacggaatcagtgagttatcaagctttgatcttctcttgtctcatcaatataagaagttgagatccaaatgctgataatttcgatgtcaacatctcgtagagcgattcctctggttatactaaatacttagtatgggtttagctactagaaagcagtcgcaactgatggtgttcgatacatgacccttttggactagggtgtcctcagaccacagaccacagactcccatgggtcatacgtccagtctgcccccgttcctagggcagcctcactgtccgtgtcggtgtcgactgtaacgaccagagcagcagcggcagtgccacacatcagcagtctcgccccctcattctcctcctggtgcatggccaggtggagtatgttgcgggacgcactgacatctatgttctgccaagtctgagaacaagcacagagaagacagggaagacagggaagacagggaagacagagaagacagagagagcgatcagtactcgagacactatcctgagatagtgaagaacagacacacacacacagatatacgatacacccgactcaccagacagacgcttcgacagtctgtcgacgcccacaccctgcctcttcccgagatctcgctacagcactcggagcacatcctcgacgtccgctactcccaggcttgacggacctggagcagcgcagggacatccagcttggcaaacagtatcttcgccgtgtcagaggcatgcccacaagaaggcgacgagaaggcgccgtcgccgaagaccagaaagatacgtaaatgtccttccaacagacagaccggcagcatgtggtacgcttgctctcggctgaagtgtgcaccctagcgaagacgtctccaccgtcgagcagcgaagaacgtcgcgagcgaagagtagggctgagagtgcaagacgagagcagcgcggagaccatcgagactggcagatctgaacgaaggaaactctgaagatagaagccgaagcaaataattgaagcgagaaaccgaggtgaacaagacagttatcagcgttggcgtaagcgtgagaagcacttaccacggagagttatcaacaagttcgcatgctcttcatacacagtcaccatttccgacggtctctgcccacccccacaaggtgctttcttgagttatgagagagcgacatttgagtgccatgctcaggcagaccgctgttgttcagagacatgttcagccct

SEQ ID NO: 1472 - DNA, 20005 bp, Xanthophyllomyces dendrorhous
gatgacgacctttgccttcggatcctcggtctccattcatagtcatcagcatacgtcggagacgatgtgggtatcagcgctccgacagatacgccgataccgtccgtactaagcgaccgggcgaaccgtcgtcgttgggactctaaaattggcacaggcggtttgatctcattgagtgatcaatccgatggtaggctgagcatctgggattgtcagtcgcaaaagcgagagaaactctgccagggactgagctgttctctcgcgattcagttcgaatggaggaaagtaatactctctgaggcaactgatgagcactctgatgcggaagactgttgtatgatgaaagattgttctagtgtggcagaatgttctcctctcccaactgctttgtgtcccataagctgtcgagatcgatgcctgctagcttgcatgcaagccatcctctctggtcagtttcactggctgtgggacatgatggacattgtcatgatggccattaatgatgcttctacagttgatgatcaaacagagacagttgaaccctcgttgaaagagatcatttatttgatcgagctcctaacacagtgattgcaaacacttacgtcatcatcatctttcacgacacagatcgaacaatactctcgatgatcgttcaacgtttcgttcactggcaatagaaaggtaaaattggagacgatgagaacggtctttcttcattcgatcttttgctctgcaagaccgatcttgagttctcttcttcatcactggagtccagtcaaattcaacaccctccaaccgcatcgttcattctctcgacaacttgctttcctttggcctcatcgcgcaaatcatgtcgcccactacgaagccaaatgttttggttctgttgtttcgaaacgatcttcgaatccatgataaccccatcttgaatcactttccaaagtcaatcactcatgttctgccggtttatatcttcgatgagcgagttatctcactttcagccttgcccggctttaaacccgatcaagacgagaaacttgaagaaccgaagagcagagtgttgggtacatggagatgtggtggaaaccgtgtcaagtgtgtacacgatcttctgctgttttcattgctgggtacacattgtaataatgtttttttgtatgtgtggacaggttcttggccgagagtgtctttgatcttaaatctaatctccgcaaaatcaattctgacctgatgatcggctatggcctacctgagaaggctatccctgaagttgttcgccagcttcaaaacgacggcatggatgtttccggagtatgggtagctcaagaagtcagtccgaaaagtatctttggtctgtctaaaagatgactggtttgctgaaccttggtttaccaatttaggtcaactctgaagagatgcgacaggaaactcgtatacagaaagcattgggaaagctctcgccaccagttcctatcaacatcctagagggatccaagaccttgattcacccggctgatctcccgttcaagccctctaagacgcccgataacttcactgccttcagaggtaaagtcgaagggttggacgagatgatcagacccaacctacctacgcccacatctcttccccctccacctcctcggccaaagtcgcttgatgtctaccaagcccctcagggaaaatcttccttagagcacattctgcctcttcttcttaagcccataacagattcctctttagattcctttcattccttcacagctcacccatatcatggcggtgaaagctctgggcttgaacgaatgaaatactactgtggacgtgaccatcagaaagccccattagcaacctacaagcagacaaggaacgggcttattggtagcgacttttcgaccaaattttcatcctggctcggacttggttgcctcagtccacgaatgagtacgtcgtcaatcagtcttgtttttaagtgatcagttttgaactctatgtgtgtctcttcgccgatagtcgggaatgaaattaaagcgtgggaggaagtttggaccgaccgaggaagaggtaccaaggattcgtgagtcaaaattatgaaagcacatcgagaactttacggaggtgcttacctatgtctaaacaatctgtgcgactcgatgttctcgaggtactggctgatcttcgagttgtacgcataattcctttcactatggtttgtttcgcgaattgcgctcattttgtgatgacatgtgatttcacaggctctggagagactacttctcgttcctctcgatgaagtatggtcctgctctattccatgtggacgggttcaattctgtcacgcgacctcaacacgaaggtccggactggaagtatgcgggcgaggatgaagaaggcagaccgctgttagacaagtggcgagatgggaaaactggtgttccgttcgtttcaccttcatttctgacttgtttggcaatggttttggaccactcacttttctttacacttctggtttggctacatttccagctttattgatgccaacatgattgaattgaaggaaacgggcttcatgagcaaccgcggtcgtcaaaatgttggttgttaccttaccaaggactatctagtggattggagagctggagccgaggtcttcgaggaaggtcagtgtttgctctgttatcttggctttaatcatcaatgctctcgttctgaagacggttctgtactgctctgtcgtttagagttaatcgattatgatacgagctccaactggggaaactggcaatatgtggcaggcgttggtactgaccctagagaagcaagatatttcaaccccatcagtcagtaaacgctctttttaacacattcttttcagattggaactgattcttcattgtctcaactttcagagcaagccaaagattatgatcctcagggagactatgtcaagctctggattccttccctcaaaaacgttccaactgaacacgttcaccatccatggacattgccttcatcccatcctgcgtttgctgaagtcgctaacttgtataaaaccccacctaaagaagagcgtggtagctggcggtcgcaataccaacggaaagttggtgaaaacgaaaagacgtcgggcaataaggccgaaagagtcaaccgagggcctaagggcgggcgaggcggacatagcgttagaggcacaggaggaagaggtggcgcacgaaagggtaacaattgatcatgtaatgtgtctatcattctctttcgttgttcatattggcgatcaggccagagacaggggagtcatagatattcaccgcacacataactgagaagaaacgcgagccatactaaaacatactcttagcatcaaagacaaaaacatatgaacagacttcatgacaagtagtgctacagcttatgaggtaacccgatgagacttgaaaaggcaagatcgcctctagtttttcttagggactattgtgatcggacagaaacatgagctcagagatacagtcaggggcttgtgcaagcatacaaagtgatcatcacaagataatcgtaagatcatcacacaaactgagagcactcactgtcgttgtggaggacgtatcggtatctgacctttccatcgtacaagccctggacggcctctccagcctggctcatgttgagctcctggatccaaggcttgacgcccttggcagcggcaagctccaacatctcgtttgcctccttcttcgatctgcgcacgtcacctcctagttctgtcagtataccaatagatcgaagcgtcagaggaagatcatgagactactgacccaagaagagacgaagagaagaggcatccgttgcccatgaaggatctagcgtggataggaagggtggcatctccagactatatgtgcatcaatcaaggcgtctcgcaatcagtatccagtcatgaccgtcgcaggtcttcgcaaatgggcaactaagaacaactaacaggaagtccgacgctgcatgttcgaaataggcatgactggtcagttttggacacagcttcacaagaaagagataggagctacgtacgtcaccaatcggccgttaacgacgagaatcctggccagcttgtcaagaggaagaccctcagtgttgtcgacagtctgcgtgtttgtccagcgtatggagaggtcagacagagttgcatatacactgattgaataggaaactgtccacatacggagaggatgagatcgagctgatggtagaacttatcctggaagttctcttctccgttggtgacgatctattacaatcagatgtgttaatcggaagtgagcacagccagtcgtagagcctcgaacgagatgaaaaagaactgacaatatgctcctcatcagcaacacccatcttgaggatatcgtccttcttcttgagagagtgggtcagagcgtacacctcagcacctgtaaaaatcgatgtgacggtgtggggtaagtagctttgaatgtggtgtgagacaaactactatgaagcacgaaccgagagcagcagcgaactgaagggcaatgtctggagtagagatatcaacacatgacggattagaaaccgcgttcgatggcaagccatacgattaaattaacgtacgtccaagtcctccgatacctgaaaaaaaaacccatatgaaccattgaatgagaaccagaaactaatatatgattagagaaacgatcagattacttaccaacaattccgaccttcttgccaggtccacatccatttcgaaccagaggtgagtagacggtaagacctatcaaaagacaacaggatgaatacctattccgttccgaacagcgcggagtaaatttaaaaaactaaccggcacacatcaatggggcagcgtgctttccctcaattccctcagggatggcaaagacaaagttctcgtctgtatgaatcgccaaattagttttgcgcgccttgaaacaggatgcgaaacgtgccatgacggatacacttacggactcggatcttatcagcatatcctcccatggtgcgatccccgttagggtacttgtggttgtatgtaaacacactgttccaaatacaattggccgatagtgagctatgaatgaccagtcaagacatgcgaaatgtggactgacccgtgcgaacagtactgcctacagatcaaacaatgaagacatattagtgaagagtcatgtgtggataaagagagtgctgccatggcggttgcgtactcgttgtttgcggtgcctatcgaacagatcatgagcgtatccagtcagtttgatagtacatatcttggcgaaagtgaacagagttgagaatggtatgagattccacagaagaaaacaacatacagtccgggcacttggtgcaagatccaacctgggctccgacaccaacctgttgattgaagatgatagagaggtaggcttgtttgagaagctgatccaggagagcaataattagatagtgtgctgcagacttacgagttgtccgactttgaattcagaagaagccttagggccaactttcgtgacacgaccaatgatctcgtgtctggagtattaaagagaaagaaaatttgatgagcacataggcttagagaaaaaaaccagaataacggatatttacccaacaacagcgggaagcatcacgtcaccccctgaaaaagaaacgctgacaagatcagactggtcccgacaggttagcagtacgaatcccgggactactcacagccaccggtgatggtatgactgtattgcaaacgcggaaaacgcatatgagcatccaccatacattcaagaagcgaaacatattttattaaagcggcaacatacacatcacttccgcaaactgatgatgttgatcaaacattggtcagtcagaaatgccgagcttgtcagatgtaacggaagcaggacaaagctacacacctccacagtctaaggaggcgacaaaagaagtgtgatatgatgagtaaaaagattaattcaacgtgaagaaggacggaaataaacgaactctcgatattaacgtcctaagaaccacgtcaaagattcgagacgcgtcagtaccagaagcacatacacaagaatgaaaaggagaggtcgaacgatatcgtgatcctcagcactgaacaaagtagtatgcagccaacgtcagtatatgtgcctcgagtgattgattggtaagtcattgagaaccaggaagaatcttacgtcttaagagggtactcgataagcttgaaatcggtccagttctgcagaagtccaaagagggtagttagctcaggcctaagatcggtacaatggtatcaacaaacctttgtatcgctgtgtttggagcaatgtagggtgaaaagcgtgagtagtcatgttgatttcatctcgagacccagtcatcgttcgagacgtactgaatagcgctgcatgaattaacaagtaaagtaataccagatcagactccgcctcaatagaaaaccgatgtatgtctaccaaagatatgaagagagaaagaatatggaaagaaatagaaggattctttcctctcgatagcgggaagaggactcactatctgagatatccggagatgaaacccaaaaaaagccagacatcctgttcagtaagtgtattgcaaagcgagaaacgatcgtctgacaattctgagaatcatctcatgtactgacccttgagcagtcatggcaggctgttgtaatcttgtttttgaaaataagggagtgtaaagatgggagaggcaaaaccgatgatgagaggaagaagtgttctagggggggtgtcgaaaaaattcaaagttcggagagaccttcaatattttgtacaagttcagaagcagctagttttggaggctacgtcattctccggttattcatcccagacctccaccttttactcgctgaattaagatcggctatatcccccaagtttgtaagcacttgagaaaatagtccgacaaaaggcgtctaggttacactgcgaccgcaatcttactcaatcccgttcgggcttactcaacgaccttcgtaatacatacgcaaccgcttgtttgtaatgtccggtcaagacggtgaggtataccggcaaaattaaaaacgttcttgtaaagtacaatggcaatttcgagaagatcagaatatcaagcccaaagagtttcaatggcgatcagaacggtgcaaccggcgaggctgttgccgctaatgccgatgctgatgccaagactaatgggatcgcaatggtctatgttctgagggcatccaagtccagacgggtcacctatcgaccacgtttggttagggttactccccatacgtttactggatcaatgtaattcggtcggtctactccgtcggcttttgagctcactttttatacattccttctcctccattcttccatcgctatctctacacgtcctcaaactttcgtttgattcctctgtatcatgccttccgtgtctcatctgccgtctactcaaaaacccgtgaacaaccagctggtcagaatcgccatcggtaagattgtacccttctttgtctgctgtattccttatctttcctgcccatcgcccgaacatacagctttcttccttcgcaaacagatcgaggaggaaccttcaccgacgtttgtacaacgtttctggatggcacacaaaagattttcaagctactctccgtggacccctcaaattatgctgatgctccaacagaagctatccgtagagtactctccgacttgtccggtgaggagattggacgaggagataaacttcgattagacaatgtagaaagtgttcgaatgggaacaaccgtcgccacaaagtaagactatccttctcatataaaggtttgaattcattttatgatttttccctttgcttactcaaattgtatcacaatagcgccttgttggagaggcaaggagaaagatgtgctctcctcgtgactaaaggttggaaagatatccttcggattggtcaacaaactcggccgtgagtttgctttttgatgagcccatcatgagactactacttgagatgctcatatcgtagtttaaactcgttataacagagatatttttgatctgtccattcaaaagctgtcccacctgtacgaaatggtggttgaaattgacgaacgagtgactatcgagacctcggatgaggtaccttctgcttctcctttttcatcttctacttcagaaaaagaccttccagaaggtttcacaaggggtctaacaggagaagtcatcaaaatcatcagaaggcctcaggagtccgagatcagagcatctctcaaaaatctcaaggctcaaggcttcaagtgaggtcgtatcaatcgactctttcgcgagtcttgagaagtgtatcaattaaccgctgtgtacacactcttcttatcacaggtccttagctattgctttgcttcattcgtataccttcagcgagcatgaagacctcgtagcaaaaatctccagagagatgggcttttccatctcagtatcaagagaattacaaccaatgatcaaagtcgtttcacgggctaactcggccactgctgatgcctaccttagtcctgttactcggaggtgaaatcaatcgttttttgtgttcatctcaatcaactaagctgagaaaataaaacccatcggcctttatgtttatagatacatcgaatccttctcggaaggatttgaaggaggtttgaaagcatttggaaacaagcttttattgatgcaatccggtaggtcatcagcatcctgtctttcttttgtaacaaccaaaatgaacttcttctcgattcaacacagatggaggactctgtacctgggacaaatttagcggtctccgagcgattctttccggtccggcaggaggagtcataggtcagtagcccacccatcttctgactcttctccatcaattctcggttaccatatgcacagtatagcttagaagtcttttatttgctttacaaacacgaaggtttctccaaaacctgttacgatccggaggaagggacccctctagtggccgttgatatgggaggcacctcgtttgtccagtcattttaaaaacagcacgaaactgtttactgtgtctcttgatcatttcttacgctttcacgacaggacggatgttgcccggtttgctggccaagttgaggtcgttcatgagactaccacagctgaagttatcatccaagcgcctcagcttgatatcaatactattgctgctggaggtggatccagattgttctttgaaaagggcatgtttgttgtggggccagaggtataagcgcattccttcttctatcaacaggtatcagtcctattatgcgactgattcatttacatcgttcatatagtcctgcggagctcatcctggcccggcgtgctacaaaaaaggaggacccttggccgtgacagacgcaaacctcgttctcggacgactcttgccagaacacttgtatgcattgtttcttttgaactcaacatcgatccgattgtttttgatttgttggctgatcctctatctgatttaactttcaaaaaagtcccaacatttttgggcccaatgaagatcaaccgttagatattgaggcgagcaaaaagctctttcgagacataactgacaagatcaatcaagaaacgagtgcaaatgagccgatgtctatcgaggatgttgctcttgggtttttaaaggttgcgaatgaggcaatggctcgacctatcagaatgtgtggatctttctctgcttttccttttttgatcgagtatgataagacttgaagaaacaattgctaaaatctacttcttctccatataacagtttgacagaagccagaggttttgatgcttcaggtcacaatttggtcatgtgagttctttcgtccgtcttccactgtgtgtgtccattgacctgatgaccaatacatgccatgacagttttggaggtgccggccctcaacatggagccagcatcgccgcttcgctcaacatttcgcgcattcttgtgcccagattttcttctgtcctatccgcctacggaatggctctcgcagatatcatcaccgaatcctcagagccgtcttccttctctctctccgcttcttcagctctgtctactataaagtcaagagtcagtcgactccgtgagaatgccaccgagtcgcttcgtagtcaaggattcaacggcccgtctatcctctttgaaacatttctcaattgccgattcgctagttcatctactgcgctcatgattcaaggcgacccggaaacgtcgaacttcgaaaaacttttcatcgacactcatagacagctgtttggcttcgttttggagggcagagagatcgttgtcgatgacgtcagaatccgggcaactggcagcagtacaggagggatagagtgctcgctgtataaggattggtcgttttataaacgaaaggtgcctgagctggatggctggaaaaagaagaaggttttctttgagcaaaaaggctggtcagacactccagtcattcctctagcagaacttgaatttggtagtcaggtttacgtgcgtagaaaattcaatctatctcagatttattaatttgacctgttgaccgagtacgctctttacacagggacctgcgctcatttgggatgctactcaaacgattctcactcctccagggtacatggctaccgtccttcctaaacacgtcatcattgacgcaacgaaagaaatacagaacgatcaccaggcagagttggacctcgatctatctaccgcaaaagttgacccaatccagctttcggttttttcatataaattcatgagtatagccgaacgaagtgagtcaacctgccttcttcagaatggttgaaaacacttggttcactcgaaactctctactattaatagtgggtcaaactcttcgtcagacagccatttctgttaatatcaaggagcgtcttgacttgtatgtcttttcttagttctatcctgggttggttatatccgtaacgctttaggtgtgtgatcacagacagccctgacgtctgagtcgcctcttatagctcctgcgccctgttctcgcctgacggaggtttggttgggaatgctccaaacatccccgtgcacctcggagcagtctcacatgccgttcggtatcagatcagacactggggtgaggacatcaacccaggagacgtgttcctgtcgaaccatccttctgctggaggatcacatcttccggacctgacagtcatgacaccggcgttcagcgaaagcggagagattgtgttctggacagcctctcgagctcatcacgcagatattggtggcattcgagcaggttcaatgcctccattttcaaaggaaatttggcaagagggtgctcagatcaccgctttcaagctcgtatctgcaggcaaattcgatgaagccggcgtgattcaccacatgtatgatctccctggcaaataccctggatgttctggaacccgaacacttgccaacaacatttctgatctcaaagctcaagtttctgcaaaccatcgaggcgccgtcttgatcagagatttgatcaaagagtgtggtatcaagaccgttcaattttatatgaaggccattcaggacaacgccgaagcctctgtcaaggatcttcttcgattcatgtccgcgaagtttgcgggaaaaccactggaggccgtggatcatatggatgatggctccgctatcgctcttaagattgatatcgaccctgtcagtgggcaggctatcttcgattttaccggtactagccctcaagtgtaagatttattgttggctctatgttctggtcagaatatacatttgctaatttaatctgtgtataacctgtattgggccttttaggtacggaaacctcaacgctccgacggcaatcctttattctgccattttatatgtgttgaggtcgatgctcaactccagtattcctctcaaccaaggatgtttgcttcccattaccctagttctccctgaaggaacgattcttagcccttctatcgatgccgctacagttggagggaacgtagaaacctcgcaacgagttgttgacgttatcctcaaagcattccaagcgtgtggggcttctcagggtggctgtaacaacttgacatttggatctgagccaggagagaaccaaaccggtttcggatattacgaaaccattggtggaggtgctggcgctggacccacttgggatgggcaaagcggaatccagtgccacatgacgaacactcgaattggagatcctgagatcattgagaagagatatccggttatcattcacgagttttctatccgagccggaagcggcggtgatggtcagcgtaagggtggtgacggtgttattcgagacatcgagtttaccgctcctgtcgaggtcgccatcttgtccgaacgacgatccaaggcgccttatggaatgaaaggcgggttgcccggtcaaacaggatcaaacttctggatgagaaaactaccagatgggtcgtttggaaagagacatctgggaggaaagaacgaattcatggctgcagtcggtgacaggatcatcatcagtacgctttttgtttatttcttctttctcctgtttaaattatcgcgatcaagaatgatctgactctgagtgattacgctgtctgactaccctctgcagactctcccggtgggggtggatacggtttgcctgactcatcttacgagggggacaactctatgtacggcagtgaggagtacaagcgaaaagcagccatatccagagccagagcgaatggctctctcgccaactctaaggatacggagaacaccaactagacgtgtgtctcattgttcctttgtctacttactgctttgcttctttacatgtacatgcctttgcctgtgatctgtagagccatcactgatggccatcatgacaatgtccatcatgtcccacagctagtgaaactgaccagagaggatggcttgcatgcaagctagcaggcatcgatctcgacagcttatgggacacaaagcagttgggagaggagaacattctgccataccagaacactcatcagtgatactggcatttaatacggctgctgctgttgaatttgacgctaaggctgcctcaataacaacgacagcaagggatggggttgaatatgtgacacatctgctgctgccgccgccgacgacgacgacgatgctggtgcttagaataatgagatcttggtctgtagtttaagaacatccgagtccaaaaggaccatgtattgaccaccatcggctgaggtctttctcaccatgctgtacgcatataatcttcatgacgtggacgtaacttcgttcaggtatctggcttaagatggtatcctcaggtaaagatggcattcaacatttttgaagtcgagaaaatatcgtgtatgttcattaggtaaatagatcaatcagggccaacagatccgcgaatgatattgactagtagatacagtaacggggaggctaggtagagcgatggtaatcataaaggttattcatgataaaaaaaacggtcaacatatgagcatcgaatagcagagactgtcttcgactaaccaagtcgaggctccagtataccaagctcgctcggctataccgttgttgtcccccctcctcgtcgacgtccaccgcaggcaccacaagctaaacaagataggtcgcatacagatcaacactggtagaacttaacgatagtgtctgattaaacagaagaaaattgactaactgatgaagttcctgtagttcaaagcgaaagaaagaaaccagtcaaacacaccgtcagtttatgattaagagttgcgaagtagggaaagcaaatataatgaaggtatacgaaccaaatggcaagaaggacgttggtgatacccgaaacaatggccatgataactgatccaatggcactaacgacgctgttgattcctcggcctgcaaattcgtacatgagccgagagaagtcagaggtcagaactcagaacccaagagtctcaaagcggtgcgagggcatatgttcgacaagagcgcaggaaccaaccaatggcactgatctgaatcgtggcggtacaagtaggataggccgtcagctgatatgaaatatgagtgctcaagacaagataaaactcggtcacctacaatgtttcccatattgaatccgaaagtttggtggcggtggtggttttggtctttaacaaggtgagttggtggagagaaagagagagaagaaaagatgtttcgccagaagagtcagccttttatgctgttctgtcttgcgcgcctcctgaacaaaattgaaagaatttgtgggcctgataaaaaaggccagaacaaaccttgcggggtcaagagtcaacaagatatccagtggaactttaggtcaggaaattaagcaagccagaaacagcaaggcgttgaggttgatgtacaggactggatgggccggacgggaccggcgatcattctactgcgcatatgcctccaggccacgggggcaggcaccggaggattataacaacgtcatcaattacgcaccggtaaaataggggctgaaacctccacagataaattggcaagtgccggatttgttctgcctcttgcctgccccctagtctatatcaggctttagagctttcagaacgttcctgctcgtttcgtgactattatctacccctcagtttttctccattctcttctcttacattttcgtttctttcgcgcgctcgacaagcaatgacgtaaagaagagagttctggactagacaaggtggtttatctctccctcaatattttgtttcagctcgagaggaaaaaaagaggtgtcattactatctgccgccgccgctgctgatgctgatgcttagactaatgagatcttggtctgtagtttaagaacatccgagtccaaaaggaccatgtattgaccaccatcggctgaggtaactctcaccattctttttgccaacgcttgatcgaccgactgatatctatattattctgcctgtcaattaatgagtggagcgtttttaaacgtctgtttgcaagataacatagtcagcgatttgttttttcgcttcttacaatgatggctagagaggtgtgaaggcttgagcactcgcgacgtacagtactcgactttggttcccaaaatttcctcctcaaccaaaccacttcctggcgggttccgttcgtcgtcatagagctcctttccggttctccggatccgctccttcagccattcttcctgagtcggtgcgcgtccgccttgatcaatccgactttggaacgcatttttgccttctctttgagcaagaggtgattctgcgatagggttcaacatcgtatccggcgcggctcgagcaaaatgaatcaggatgtatcggatgatgtctgcctgatccgacggaggtctgatcacccggtggcgagttgccttaaggactcctccagataagactgtacaagtcatgaaatccctcgtttgtcagtttgtctggaagcatagacaacgtaccacaccatgagatgtgtgatgcttacagtctagtgcgtcggccacattcaccactagcgccccaggcgtatgtttcacccacttccacttattctctccaggcgtcagaacctgaagagctgaaattggctgagaccagagcagactgagcgtgttgtagtcggtgtgacccttcgaccagatcccatctgttttgctttccgcgtcttcatccctaggaaagtatcccatgaaacgctggcaggaagccccgatgggtttctcttggctatggagcttccagagggcatcctcctccagctcgagcacaagagacacgagcgtgaataatctgcgcactatatgattgttggtatagtctgcaaaagcttgaatttcgggcagaaatgggagtaccgaagggtgatgttgtttggttggagactgaaaggaggaggactgcatgaaaaggtgattaaatatatgaacaaaagtgagcgatgatatttcgagagctaggagatgactgagctgacctccagattgtaatgctgtattatgatcaaccaatgtgatatcagacacgaccagatccgaacaagacgatccaagaatgaaaacggtcaacacacctcaatgttgtctggtatatcatctctcttccaaacgcctcttaatttgtatcccttataacttccctcatcgagcttagcggcataaggacctttttccgattgaggaataccggagatgacatgctgagcgatcgcgagctgtctctcgagtgtctcctggggaacccctgtgccgatgacataaagaaacccgtctctatgtaaagggaaactgttagtatgcaaagccaggatgttcgtaacttgcatgaacgatcttggacatacgtgctcagcgctttctttgtcattgcaaccaactctttccgaacttgaggatcctgagaatcaagaagactcaagtcgatagtagccaaagatgcccagttgacttgatgagaattattttatgagaattcagcagaatccaatcgttagcacagggacagcagagccaatactcgacgagttacgtacgatcttgctttgtctctggagatgacacccatttgggtagatgcggaggttcaaccgaagcaggcaatctgggtatatctgcgcgaagagtggagttgcggacggttccgacggttgccatgatgttctgtcaagtcttcttttttgagggcctgtaagtgaagatgggagatggatgagttgcgaatagagatgcacatgcaagcgacggctttatatcaagtcatcctcaacctggagatgagcgaaaggctaacaatcacttcgggtgacgacatgctccgtagaactgattaatcagctgtaggcggataaagcgcggacgccataaggtcgatgcgtggtcggtacgacggatgtcgccttgtgggattaacatagcgtcaatcaagctaaccctaacactatcttgttcaaattcaaaaagaaaaggtgcttgctcactgtgttctatgcttactctgtgctttctctcagacatgttggaacagagatgtgaatgcgtcgcgcaacatgctgcacctaactctgcaccaggaaaagaacgaaggagcaagaatgctggtgtttgacaccactactgctacgctgatcgctgaggctgaggctggcacaaactgaacccataacccatggggatcttggtggttcatgatctgaggacaccctagtccaaaagggccatgtatcgactaccatcggtcgaggtaattttcaccaagcccaaggcttgtaggcatccactgtatgtatagggtttcaaatttcttctggggaatacggaccgcaacatttaactctctcgttgaggggtttcagaccggtttggacgacagagccttaatagcgcaagattgaggtctttacaccagccaggacaatgcggagattatctccttggatgcatcttcatacacgacaggatgtttccgaccttgcttccaacaattacatactgggtgatgccaagtgcagggtacctcggattaatttcaaccgcgaaagtatccaaaagaaacattaagatacccaattcacagaaggtttgatcatggccatctctatataaggcagagttgatgagtgtccaagaacgtcaaaccaacctcaacttctcccgtccacatcaatccaaagctccattgacgactctcaagcaaaatgaacatgtctcgccctgctcactcctgcaaaagtgcgttcaaaccttctatcctgacgtatcagtcacatgttgttttctgcgtttgactcatcctctcctctcttcactaaccactgcaatctaccacgccgagatagtttctatgctttggaactggaccactcttgatgcttgtttcctttcccgctcatggcacgtcaacacaaaagcccagttcgctggttcggtcatcggcgttttccttctcacacttgctatcgaagctgttcggagactcggtcgcgagtatgatcgtcgcttgatcttgagtgctgaaatcggatctgccgcttcggatagcaaacctgcatgttcgaatctcaagaccagcaccctagatggagcgagtgacatctctaactataagtaagccttcagtgtataaggtgatgcagaaagcttctgtttggtttgattttacttatcattcccctcactaatcatgctctggcaagcttcactccctcctggggtcaacacattctccgaagtatgatttacagctctcaattcacagcaagcttcctagtgtatgtcttgttttctgttccgcaaaatcttcagtcatttcaagctgactctactcgcttcgatcggacatcagaatgcttctcggaatgtacttcaacggatatattctcttcgccatttttctaggtcatacattcggatactgtgcatttggaagggacacttgcgcaaagtctggttctttcaggcataccagtggaaactgttgttgaaaggccttatgattgctatgaaatgcacaaacattccatcttccgtcatatcgtggctcgtcagatgcacacataacggtaaactatttggtcacattgcgaagtgtaggagatagttgaaaggtgaattctctatagtgatgacgactgaagttttgagacctcaaaacatccttcgaactattttctatcgattctaaactaggcaaatgtgtttgcttctgtgtcaggcgctgttaaggttcgttgtgtcttttgttgagcattatccatggacttcaagaaatttatctcaaaccctcaactgctagttggtaatgtgcgcagtttccgtgccgacatgtcaatgcgctctagatcttcgaaagtcacaatatcatgatacaacacttttgtgagggatatgggacttgaaacaattgtaaccaccaaataagatgtttggtacaaattcataagaatattgttatcactaccattcatccaagagctcaccttgtattatctgagcatgttgtcctgtagaatttcagccaatatttaattgcgcttatttctttttttttccatgaatgtgagcaactaaaatatcggaatgttttctcgtcaaaatttctctcttttgcagcttgaaagcaaccttgatctaagtttaaccgtgaaaaaagcgtcactccgtttggcgaccattgacctctgacacatcgatccaaatttggtctcatgtcaaaaccttgctacttacgctcgcaccaggtgccactaccgatgataccatcttcattactaccgtcatgaagaagcgacatcgatgaacgataaaaatcttgcgaacgctgtcgcataatgaagctccgttgcttcggtctggtcgatacaatttcgagcaaaccttcgtgtgagagatgctcgacagctagcttagggtgtttcttcggcgagttcaccataattctagccagttttggcctatgaggatgtctttgtgtattaatggcctgaatgaaactgagaagctcgacatttttccaccccggcagctgacaaaggacgggtggggagacccagagaatccctcagaacttggagcaacgatctatacagtgcctcctcatcaggcacgaagacagatctcgcttgttcaccgttgagctcgcagtctgaactaagatctcctgcttcacatagacgtagttcacgtacaggatccgcatttggatgctccgtgcattgtccttatgacttgactgcacctatcaaccacagctcttcgtctgcagtgggtctggaatatgcgcttccgctttcctctcaactgtcaagcagtgcttcgccgatgttatcaatggacgttagggttttagattcatagatagttcttttagcaaggtctggttgtagcgagcag

SEQ ID NO: 1473 - DNA, 330 bp, Xanthophyllomyces dendrorhous
gtgcttggtgcttggtgcttgatgtgtgacggttgatggatgtctgtgctcgtgttgtgctcatgttgtgctcgtgctgtgctgtgtctcaacctggcaggcaagtcgatcttctacaacatccagaacttcctggtgttccagctgtcgactgctgtcgctgcattgtcgatcatcacgatcacgacggcgtttgggctgagcaacccgctgaacgcgatgcagatcctgtttatcaacatccttatggacggttcgttggcttttatcattctgttgttgcatctgtgcttgcacttgttcttgcatctgtgcttgcatctattcttg

SEQ ID NO: 1474 - DNA, 557 bp, Xanthophyllomyces dendrorhous
ctttcgaggctctgatggagttcctcctcgcacgaaggcgatacggcctcttgcgactcttattcaaagagtcccttgatgtccgatgactttcccaagggctctttgaatccttttctctcccaaaccgaaggtaggagagcttacggagaagcaaaaggaggtgtaaccgagtgatgcttcttctatgcgtctctaaagagtcgctcgtgagcggaaacactaatttcctcgagtgagccctttagagacaataagtcgttatgcctagcataacgctcataaaagctcttcttgcgaagaagaagctcttcgacgtaaaaatacttaaccgagagcttcttagagcaagaaagagacgacgattagcctccgaagagttcttcctagaggaggcttttctagtctcccacaggaggtggaagagacgaagtcgatgatacttttacaagcgccgcaggcacaacaagaagcagaaggagcgtagcgggtgatgctgattccaggaggaaggctaaagccacaaaacaagactcagctttagcctaacgactctt

SEQ ID NO: 1475 - DNA, 347 bp, Xanthophyllomyces dendrorhous; identical to SEQ ID NO: 192

SEQ ID NO: 1476 - DNA, 417 bp, Xanthophyllomyces dendrorhous
tttgtcagcttcctctttggaggagacgtctgcaagctgcatatattttgatggaactgtcgaggacgtgaccgaggtgacaggaatggaagatgaagataaaatataattaagagcagcgtttgtgtttgaggccggtccagatgttagttttgaaacacacttagtctgacagtcagttggcgtttttggatcagaaacgggaatcggaatggaaacagggtggttgggagattgatgacgagggatgatgatgtttttgttataatcaatatcaggattgttttttcgatgccatggaacacccaagatcacttcgaccgaagagatcgcagccagatgtaaggacaccgactcagtgtacttcccgagcccaagctcgccagtcacgatggagtcaatcggaccggtcgtcaa

SEQ ID NO: 1477 - DNA, 322 bp, Xanthophyllomyces dendrorhous
tcggtttgtttgccgaaaagggtggccgattgttgggaaatgtaaagaaggaactcgagtcccggttcaccatgaaggacatgggcgagatggccttctgtttgggactcagagtcaccagggacagaaccaaacgcacggtcagcatcgatcagctaccatacatcgaagagatggtcaagaagttcgaagacagggagacataccctgtgtggacacccggcatggtgtctgtcgatctctcaaaggagatgtcaccgaagaacgctgaggaggaggaagaaatgaaggacaagccgtatgtcagccttctcggctcact

SEQ ID NO: 1478 - DNA, 448 bp, Xanthophyllomyces dendrorhous
ctttggctcaccatggtcaccaggccggacctcgcatactccgtgtccagactggcatcgttctcgtccaacccaggaccaagacactggaaagctctgcagagagtactgacctatgctaagtccaccaaagctctttcgctgacctatggaacagccgtacactcacttgctgtgtattccgatgcagactatgcttcagttgtggatgatagaaggtgtcactcgtcctatgtggcgatggtaaacggaggagcggtcagctgggcgtcaaagaagcaagcgatggtagtgctatcgacatgcgaagcggaatacgtggcacttactatggcagcgaaggaagtcggctggttgcgggaagtgcttgctttcatggccgatccgacaggaacactcgacgtgacgacgatggagccgactcggatctacgaagacaatcagggag

SEQ ID NO: 1479 - DNA, 902 bp, Xanthophyllomyces dendrorhous
ctagactgctatatccaatactaccactcagtcgaagacatcaaacagaaaaagaaaggaatgaaaagaaatggaaggaaacgaaaaagaaatgaaagagattggaagaaatgcgcaagaaatgtcgagaaataagttcgagaccgggcgcgggaagtcaacgagtgaacgaaagatcaaacaaatcaagcaagaaagagatgaggaaacaaaccaggacgaaaacaagaacaggaagatgagaatttagtagtaaaaagaacagaaggaacagaaagaaccgaatggaatcggaaagagaacaccaaaagatccttgtctggtcgagaaagagcaaagattgaggatgcaaagtggtgagcttttctggactgggctggaaaacaaacaaaaattgacttggagaatatcttcccttttcaccctgtttcctttcttccctcagatcaacacaagtcccccaccgacatcttatctcccaccgtctcccactatcctctgctatctcccactatctctcactatctcccactatctcccactatctcccactatctcccactatctcccgccacctttccagctgcctgcctcatcatcttcttctcccgtctcctttcagccctcagcctcaggatctcctctcggtctctctcggtgtcggtctcggtctctcccatctgatgaggtatgtcttctcccactggaacggctatctcgccgtcgaggcccatcgctgacctgaacttctcgtgtttctcccgtggcagtgcttttgtcccgatgtcggccaccatgtcgtccgttcggatcccgacgactcggatggtcccttcctcgaccttctctcggataaagtgatagcgtacgtggatgtgtttcgatctggaatgggtgtctgg

SEQ ID NO: 1480 - DNA, 1735 bp, Xanthophyllomyces dendrorhous
gagtggaacgactagtccctatgggaaatacctttgtaggggagtcgaggaagatctcctccctgcgctttatggtcaaaatagctggagccattaaacgtgaaacatgaatgacggcgttgccgctgctactagcatcggagtcaccgctagccaatgcatgcttgcagcagcaaaggcaatcggtgcaggtctagccgctatcggcctgacaggtgccggtatcggaattgggtcaatcttcgccgctctaattggcggcgtagctcgacagcctgccgttgcaggtcagctcttcagctacgctgtactagggtttgcactagcagaagccacaggactattcgccctgatggtttctttcctagtgctttactcctagtacaactagaagagagctgccccacaatgggcaggagattctgctggaggagtcggtggactcacggtacctcgcgaggttggggcgagtaccactattcatgtttccgtgtaccccaacctgccagggttggtgagtccttgactcaggtttaagggctgggagatcataaagagaagatagcattggccccgtaatccctgacgggtgagctagtacgtgttatagagtccaaagactctaggggataagctattggtaagcttatcttctaggcgaagagagacagtggacagtctaggctgaaaggcatagactgtaaggctctctctagcaagagtagattgctcgagaggagcaactatggcccgtggaaagggggactgtatcagagacatgctgaaatgcaaggaagcagtaaggttgtattgcgtttctcatacgccggtaacatttggccattaaggcgtatgaggtatatttctttgaaaagcggcgggaggacaccgctataggggatcgataaatctcaatgagctctccccaagcgtggagaggcattgagagtgaaccatagggcacaagccgagaaccgcgagacaaagagatgaagagcgctaaactggagtcgcctggtccgcaaaaacaatggaagaacgtcagggtaaaggcgccaagtaagcggaacagcacgaacagaagggacttctattactgtggagttttatttttcttgatccgaagcccccgtgggtaggtgatcaagaaggaaatgtgttgatgatcacctaaacagagcacgtttgtgtcttcgggttgagtagcgaaaggaagcgggtagaaccgtgggcgttggtgaaaggcgcggggggcacctactctgagttagagagtttgtgccccgtatgagaatttattcttgtatgggggtggggcagtactagagctgtcgccattagtcctgctagaaggaaagccctttggggtatatctttctgttcactacccgcaggtagctcacaaattctgttatctacggatcactaatgcccagagatacccccgttttcaacgggtttacctctattatgggcatttaatagtggtgatccgagctcgcgagataccggaggtatttcttcgacaacgtcttgttaggaagaaatagacacctttcggtatagacgcgagcacccctagaggaccctcaggaagaacagcggacgataccgctgggacaacgggaaagaatgagcgagctcattctgagggttgcgagagacgatactctcgccgaagggcctatggaggcctggtgatcaaggggcgatacccttggggcagcaggctctg

SEQ ID NO: 1481 - DNA, 485 bp, Xanthophyllomyces dendrorhous; identical to SEQ ID NO: 197

SEQ ID NO: 1482 - DNA, 749 bp, Xanthophyllomyces dendrorhous
cggggaagaaaacatcaacagacctcgcgatcgcttgagcgattacagtgcgcttggtactcaaaaaagtcgggtttgtccatccaatcttggatctgtcgcaaagagtcagtcatgagatcgtatcctgaggaaagtcagcaggctcacatcttttcgatggagagattaagtctcaatgtctatagattgctcaagcggggacgaggtttggtaagcatcggaagaagcgttacaatagacaacagatagagccctcactgctccagttagatcaactccaaatcgagcctcggttgaggcgtacctgccccagaacttccgtcgtaaggcgtagacaattcgaaaggataaatgcgaaaatcagatacatattgttgtaggtcaaatccatgaaaatagctgaaccgtcaagagaatagaatttacaaacctcttttgtaatcttttcgaacgtcgcattctttctaatttccaagtcgattttcctgctgtggtcgtcccagatctcttgcacacccttcatacctcctcggaagaactctcgaacttcagtcttgcgctctacgttcagctgatctgagccaagatcgaatttggctgatggatcagatgggtctgggaagtgcgacgacaactcggtgaggagccgttggttcatgagtgctgcagtctctgagctctgagtgaacccggtgatgtgagaaatggaaagttgactatggaaaggagggacaggatcagcgcaa

SEQ ID NO: 1483 - DNA, 536 bp, Xanthophyllomyces dendrorhous
tctcgacagccagctcgtctagaacggcttcctcggcttcgtccctcgagctagtggaccctccgttggcactgcacatagaagaccgagaaaaccagccggtcgaggcgtccccttctctcggtctcccgcgtccgtctagcttctctagtttctctagtttccctagtttccccagtttctcctgcctcttgtcctcttctctgagaaactcatcccatgcttttcgcttccgtatctgccaccgggccttcatctcgttcgatacagcatcgttagccagtaagccatgctcgtcgaacgagaaagccgagctcacagacgtactcctgtccgtcagctgaccaggcgaagaaagtgtagaggatgagcacaaagccgagtgatagtatgaagcagaggctggtttcgtcttggtgttcggtgtattttgcgttggcgaagcaacatggatgatggcagcagtactagtggcaactgctgggatagaagtaggagtgggagtggacctgggagtggaactggaactggaactg

SEQ ID NO: 1484 - DNA, 1401 bp, Xanthophyllomyces dendrorhous; identical to SEQ ID NO: 200

SEQ ID NO: 1485 - DNA, 445 bp, Xanthophyllomyces dendrorhous
ggctcggtcagcagcaggacgtcacgaggcagcttgtcgtgttcgaggcagagcaagaagagacgatggatagcaagaagagacgatggactgcatggtagttgatggaagaaggacgatcgaccgaggcccgcagtttgcgtgtcgcgtgttgttggcggacgcgttcggtctgcctggtgttctctcgtctttcctttccttgcattctccatcaccgtccactggccacggttggacagtatgtatgtgtgtgtgagtgtgtatatatgtacgttcgtctgttcatctgttcgctcgctcttttctcctcacttcgcatgtagatgaccgttggctgaccgtatgcctggtggacacagcttgggtgtttatgaaatgcagttggccgaaagggaagccttgtcgaagagctatctgacgacgatcactcgacattcttcgg

SEQ ID NO: 1486 - DNA, 24613 bp, Xanthophyllomyces dendrorhous
atcactcgacattcttcggagcatggctcaagatgggcttgataacttgaaagacgtctgtcactgtccgcggtgaagacaacgtctctgttgaccacaaggaccgaaagaatcaccgtcccgatgtagctaatataggcctatcattcagtaaagaggttgtcacctagacgagtcatccaagatacggttacctagtaatgctctaagctcttgggtcttgcgcccaacggtgactcaggagaatcagaagttgggaggagtttcgagatgcgatgtcttacagccagttgctcattctcggaaaggttctcatgtgtatctctggcttcttgtacctctgaatttgttgtctcgacccagcatgctttctttcgctctcaccttcgtcttctatgcgttcattgctttctcccattctgtggaagcagatctggtacaggctcctctcatcaatagcacgttttcaagtaataccacgctcggtcctctgttcaacaccacgatgttcgctcccggaacagagccaggcatgtactcgtccaacttttcccgactcgtcatgttcggcgactcgctcagcgacaacggaaatggctcccgagtgctctcgaactgaacgaaaccggatcccagggtaggtccttcgtctggtttctcgtctagcttctcgtctgtttttttgtctagtttctcgtctggtttctcgtctgtctcccttcctgtgggtcacacgatcgctgggtctgatgggtctgcttgtgttccgacctgacgaaacagatctactggaactaccggtggtcgaacggaccgatctgggtggaagacctggcagagcgtatgtcttgactcgtctgtttctctctgcatctgacacgacgtccgacgtgggctatcgcggttgttccttgtcttttcttggctgacgtcgccatggtctctctggtgtttcttcggtgactgtgtgatatctctttgggtcgtcccaggactgaacatcaccttgtttgagtacggtatgtgcatgctcgtctccttgaccagtttacttcttgatctaacgatattgaaacttgctctcattttttgtaccaatcctcttcaccatatgtttagctactgggggagctacggtgaatagcacccgaacgcctgctgtcgtggatgaagtcacctgtcttcatgtcccatcggctctcgagcagatcgaggcgtttgtgaagaaggcgaactcttcgcttgaccacgacaccctggaatatactctgtttgccatttggatcggagcgaacgatatcattactatggtcgacagcaacatttccgtcaccggagctgagatcgttgacgatatctttgtcggtattgagaagctgaaggctgttggtatgttctgagataagctttagccctgatcaactacacacaatgattgaagtcattctactccttcttaagtgccaaacatttccttctcaactctgtacctgacatcggacggactccatttggctcacacgtaggagagaaggcggcatcggtgctgacagacaccacgctagaccttcgtaaagctctcttctctgtcgtcgatgctcagacggctatcgctcgaaacatgtcttcaatgcacgcgatgatagtactgtctaatggtatcgtcgtggtggatatgtttcgggcggcggatgagatttatcagcatcccctagcatatgagctttcaaaaatagagataaatcagagttgtgttcacggccagagcgctttcgagctcaaatacgtgattcctgtgagcttgtgcacagattcggacgtacacttcttttgggactcagttagtctctccctgcccctctctgattgatctcgatggtaggccatggttctgactagttggccggtcttcttgttccatatacttggcctgatgatgtcagatgcatcttacgcgaaaggttcattcgttgttctcaaaagctgcagccgcttctctgcttaaggcgggttggatctctcaaagatgattgatttgtaaaaactcaggtcttggcctaattaggagtgtacataggttaccaaaaaccaatcaacctgtttgtcgtgacctagcatgcattttctcgcttcttccagtgttagcgcatttgtcttttttcttccttgtgcgggaaatattatcaaagactgtgtgtattagacaagaaagaacgttcgattttaagataactccattcaatctgtatgatatgatgacaggaggtgttcatcatatcattgttgttattatcattattattatttgagagttctagttctacactatatggtcgttatctatacaacagaaaggcttgaaagaaaaagattcgaagacaaaggccacaaggtcaaccgatcaaggggaagtgatcaaggaggatgaaggaacgccgatccagccacctactcggaggttcacaccgatggcttggcttgatcttggggacaatggagtaggagtgtctgctctggatagttttggtctggtggacctagacatgggtgaggagcgcgagaaggtggaagggatgaactctgtgggcgaggtcaccagcggtgacgtcggttcaatcggacgtctctctctgggcgtcaggtttgccgggcgagctgaaatggaaagaaagaagagggatgagggtgataagtctatgtagacttagataaggatcaagtgagagacagggcagtatagagacttactgagttcgtcctcgctactagatccggaagccgagctggaagtccggcaggagggccgtgtccaacgcttgagtcgtttgggcaacaaggcggcagtggtagtagtggtagtagaggcaagagtagtaaacattgttgtttatgcttggagtatgatcgagcttgtctagttcaaagcttgaagagtgtttacttggatgcgagatgaggatgaaaccaagattatcccaactgaaaggccatcttataagccaaatctcgagcgaacgtaatgtacattgaaaactgcagaccctcggtcatttcgagcaacgagggaaggcgatggttgataatccgcgcccggtcgttcgttggcaagggtaatcgtcagccgagccgagccgggcagaagcagagggcgtggagagaccgcctgtaagcatcggcttagcaagccgggcaggggtagctgacaaagcctatggggagtgcgcatgtgtgggctgaccgggcagagatgaccgagcgggtccgggggccgaggctcggatgacctgtaagctgtgcagaaaggttggcacgtggtgaccgcgcgtcatgcaactttcttttcaattaagtcgcgaacaatcagatattttatcaggaatactcttgtctaagctttttacgtaggccctgacatatcaccttcttctctccttctctgccgtcactcgttcattcctctgctttcgtgaatctctcatccatttgatcttctgcttcgtcttcgtttgcctgctcttatcccagagcactctccttctgttagctgtgggaagccgggaaggaagaatttttaacatctcaaatagtagggatattcaccgttcggaaatgacgatcaacagaaccaacccgtccacgccttcctcggccgcaacgaccttcagccattcatccttgttggcctcgtctcccaactcgacggccgcagaattctccgcctcctcctcacaacctcctcttccgcctgcatctagaccacctctgtcttcccgggcgacatcgactacgctctatccagattcacagtcgtcctcctcgtttcggccgagtgtatctagaatgcgtagcaggtcagtctctaatttgtgcctctctcggacaagcgtttatcttttcctgcaaagtccatccatctctattggctcgctgagcatcactgggctacgtctttgtctctggctctggttttcctcacctcatcttttcttctttttcttctttctgtcccctctcaatgagtgctaatctgtctactcccattctcttttcccacccaacagaggccgttcgatcaccgcgaccgatccgtccctgttgctctccacgtcgtcgccttcacatccctctttcttaccatcccaatcgtcagcctcgactacccaccatcagtctccctctcaaagagcgtctcccttaccctctgttgggcttaacccaagcatatatcctcgttcgagagcacctaccctctccgttcttccgtcgtctaccaggcagtttgaatcaatagaggacgaaccagacaccccaagtagaccgagagacgcggatacctggatcaaacctaagaaccctaatcagcctacccacggtcgaggcaggagtctctcgcttggcgttcagcctctcaaaaatccgcccagttcgaagcgacagagtccagccaatgggcccaggtcgacgaccacctcgacagcccataaacacggacctcccaagcggtccaagccctggggagaaagtctttttggattctctaatgccagtgtaggtaacctgggcatcggcacgaactccagagatcaactttggagatatccagaagagtccgataccgaacattctccaaccgacagactcgaatcttaccatcatcaagacggttctgactcgagtgatatcgactctgatgaagaaaatgcgtctggctcccaggacggctcggaggctagtctccggatcagggtacagcagcacggatccaatcttcatctcccattgatcccgttcaattcgcttccccgcaggcccacactcacatttacttcctcttccaccaccctactttccaacccacccgagacggatcagaacgcttcgagctcgcatcagacatcctacttctacgacgaccagaacgcattccctccgtccctacccactcccgcgctttcatcctcgtcactctctagctacaacttccgtcctgcccattctcgatctagcatcgatctcgttcgcaacggggattccctgaatgaggtcactaccaccgtcagcacggccaggcgagtcaccaccagagaacttcgccagctcgcaaagggtatgattcctactcttatcgccatcgccatcgcctttctatgtagctttgggatcgttatcggcctcctcagaggattgcctatgtaaatattgcaattttcgtttgttactctcttctgtaaagtctctttttccaaatcactcatcgccctttcgcggtacttctattgtttctttcgaatccagcccaccaagttttgagggaaggattccaaagtcctcagccgacatccaacttgtttcttcagccatcaatcgctacatggaacactcgacctcaggttatctgcacaccatgcttgccttgggcttagctggggtttggactcatgcctggagtgtccctggttcggttgtacttgtaagtctagctcaattgtctattcagatattcttgggaaaacaaattccagaattaacaacatctttcttctttattccttctcaccctgaccttttcccacctctcattcatttagaatgtcctcctcggtgctcttctccctgcagttcctgccgtgttctttctcacttgctcgaccacactcggcggtttttgctcctaccttctctctcgacccctctctccgttgatcactctgctgtttcccacccaactcgccgttgttcgggcctcgatcgcctcacctggcttatccaccaatgctggtggtagtaagcaaaccggctttggatcaggcccctggagaaaactgtttgtcatgcgagcgaccgggcttgtcccctggagcgggatgaacgttgcatgtggggtggtgggcgtccggtgggatgtgttctgtggaacgtttgcagcaggcagtctcagttggaacgtatgttcattttctcttttctctcttttccttctcggcgcatgctctgttctattgctgatatcatccacttcgcctcttgcctctgctctttgttttctggccagtatgtgacgtcccaggtgggcgctttgctcatgcagatttctcaaccaactaatccatcctccgacccacaggacccggccccatcggaatcaattacttcccttttgcgggacccgagcatcatcatcaagctcgttgctctctccctactgtctctcgttcccgttcttctcaagcccaagacgacggtaaccgtacaggacggtcggggaccgccgatcgagacatccgcctctgccgggtggtgggcactaccccttttgacgaggatgggtcgtggtcgaggtgcagccggcatgcttggtatccttcaacgatctattggctccatcggcgccatggctagtaaatggatgggagtcgactggatgcgcggaatggaggagggttccactaactctggtcatattcgagaaggtctgatgtctggaactcgttgagagccagtgaaactgctcatcacttttgtatctatacctgccctgtcccctcactctttcggtgaatgcgcttgggagtctcaggtgtgccttcatgactccacccctttcccccaaatatctttcaaacgcatggtttattatccatattgctagatcaacgcataattgttaaacatatcaaactttctgctcactctacttgcggagttatttctttatcatatcttgggtcattctttacttgcatatcttgacctccaccatttgtctcgtacagtcagctctcaaccttcttctctgccctataattgtatcactactccatatagcctctatacagttctatcgaacgcctatcactagtaagcacttgtggccgttactcaaagtatgaggatgttatttctgccgatcgtagccttgtctcgtggaactcacacgggaacgttggggacagatcaaggcggaaagtgcacgtgactgtcgatccttgctgtgctcaacgtgttagggttgacaccatcatgcccgacggcccccgcccgtccggtctaccgatgacgggaacaaactgatctacacttccaacacgcaaacttgagttctacttccccatcaaacctcatccatttctgtttggacctcgacatccattcgtgtaggagtcatcgaccatgtcttacaatcaccatcttccgaagaaacttgagttcaaagtcaagaagcatcatgggttgaccggagccgttatgatcgccgggtttctcctgcctccccttggtacgcgtctcattctcatcccctttccttcccttctgtctatacctcttttttcccccccccttgttcgatacctgacagaaagaccttgatacaccgactgttcactcactgtcggtatactgattgctctctttcggggttaaattcgaacaaaaagccgtcgctcttcgcttcggaatcggcactgatttcttcatcaatgtcttctgtacgatctgtggctgtgagtttcttgtcagctttgatctgcacacattcgttctcttcccgaaagagtgctcatatactgtaaacaactctattctgacatgctttgctttctgtttgtaaaagactttcctggccacggacacaatttgtaagtctacacgtcgtgaattcccgggaaaggagaagtagtcttggcacgactctatactgaaccatacttacaaccatccattttggggggagggggtttctctttcttttcttcttttcgtataaacactgatactgccagctatgttcaaaacattcgaaacaacactaacaagaagcggacccctaaatgggcgttgaaagccggactggtggatgattccgaacagcagaggagaaaagcgaagaacgcgtggtccggaaggtaagcccactttccagtcctcagaacagtagtctcctttctcttccgatgtcttttgttccgactccatccctttgctactatatatgtaactgaacaaaatctttcattactcgattggaatgacgctcagatacgaagagcgaaacgcccattcaactttggaaggccaggattacgaagaaggccagatcgcggacgttttggccaatccgactgatacttccatggccggcggaggaggtgcgagcagaggtcgagaagacaggttatgggacgagaacgaagtcgagttctacaacgaaggcatgttatcaattctctgaatcttcctttccttgtacatcagctggaatgttttggattgatcaaggttctttttaatgttatcgttctgacgatgtcttctcccttttctttaatcatgtttatcaatatgttttctggctacctcgtctctctttatacactctagccgaagctcccaaccaacggcatcatcattacccgatgaacttcgagggcgccggaggctcttcgcgtagccgaccctctcagtatacgttcgacaacacggtggacgaacctaagaaatctaaaaagtcgagcaaaaaggtatccaaaaagcaggtcaactatgataatgatgacgacgtccccgcatggggcgagacttatggagctgtcagtcattcgttatcttcttttgtgttctcgtgcacgacgttcatccgagaaaatatatgctagatttactcaagttcactgacgtgaaacttacactttctcatctgtgtttttgcttctgttctgttttcagcctcgacgaaaccgagccccgtctggctcatctccttccttgatttccaactcgtctggaggtgatcatagcagaggcaacagcacaaggccccgggacgatttggatcatcagttctgagcgaacgcgacgtcttgtttttatgacttctatacgttaactctcctcctttttgccctctgccacttctgtttgtttcccttttcgttcgttctgcaagcccgaccatgtgggtttgcggaaaaaatcaaacccttttcattgctattcgttttctttatcgatcggtaatacccattgaaatatgcccataaaaattgatagaaaaaaaacggaccataatcaattggaaagcctgacttaaatcgtttgatattgcaaaaagtacaaactgcattggtcatagggcccagatatcaacatttacatcgtctcaatcagtcttcccgtgcaccatcgcccacttcagcagtcctttgatttccctccaatttctctcatctaccgtttttctctcctgttccgatcccgaccgcccagcatgctcacaatccaaaatgaactgtttagccccctccttggcttttgataggtcacctcctgagtcaggatatgcttcgaggaggaacggatgcgacaaaagcggaacccattgggttgcattccagaacccatcggcctcaccctcgggctcctgtgagagcgatcctccttcagatcgatgcaggatcgtatgcaagctggaagtcgagatgagacatgagagacaaagacatgccgattgttgtgattagcaaaagcagaagaagaagtagtaaatgaattagtcggaccatcaggcacgacaaacgaaaataagaagaaacaaactaatcgaatatcccttgctcttctttctcgtggtcctggaggatcatatgtggagcgtcccagtcggaattgagaaggtgaagagcgggtaaggcgcagaccggaacatggtcttcatcttcatttcagcagtagaacaattatagacagaaacgaattgccacgtcagccaagttgagagcttagcaacagctgatcgttttgtgactgactagcatcgattaggctaacaagtgaagggtcccaagatgttcctttcgccggattgacgggacctggaggtcggaggagcaacggatggaagcgagcctatgactcagaagaacgggaagcagtctcagctttacatacaatgtgcatcgagaagctcttctgaatttcgtacggggatcttggctagtaaaaagtcttgaagcttgcggtccgtctgttcttggtctgaacctgaagttgaacaagagactgtggacatgagtggctttttcagtcgagcagtggcagacaagtgtttcaaacgcgtatcaggagggtttacactgagaagagaaggatgatacaacaaggaagaaagcgatatgccgttcgaccaggatggctagcaggagctgatcgagaaaatgaagctgaacggtgacgatcgtcataaagaaaaaaagaaggtgaaaaagaaaggtcgcttatagtgtttttgattttcgatcgattcatctatttaaccgccgtcagctaaggctcaagaccaaggcgctcatagcatgttgggtttgcatggttcatattataatcacataaccacctttgtcttctttcccctcttctctgctcctccaggctcttcgttcgccctcttgacctcggccgcatcctctcggagcttgtccaaattgagatcctcctcggcccattcgagcacaagatgtcgaccaagcaaatgggtatgcttgagagcggccatagcggcctcggcttctcgacgagaaaagaagtcgaggaaagcgaaacctcggccctgagcattgaatttcttgggaagtcgaacagacttgacttgagcgtacgcgctggagagaacatatgaaaatgttcaggtaagcgagtcatcgatctcaacgagcaaaagagagaaaatttaaaggacacgaacgtaaagagctctcggatatctttcttggtggcctcgaacggaatattcttgaccaccatcttggtggtcgtctccctccatcccttcttcccaccctccttcttgtcatccgttccttccatgtcgtcatcatctgttccccgtttcgcgaagccaacctcgagcgcatggccctcaagcttgaaaccatgcatagccgccttggccgcttgagcagcttcggctgaaccaaagccaacgaatccgaaacccatgctctgtttctgaccaggccgtttgggatctggtttggtctggacccgtgcgaacgagaaagaagccaagtgggagaatgtgctggttagaagcgcggaagtggtggtaaagttcaaattcttgatgaataacgttgcgttcggtgcagccgtcctagaaacagccgtctcatcgtcgtctttgacgacagtggcatcggacgtgtcagaggccacagctggaacagtcttggccttaggtactccattgaacagtcctttcgggcccttctcgagatacatgatcgaattgcccattcgcttgtacgcaagcgctttgaatgcggctcgagcaccaactgcgtctacaaactcgactatcgccatcgtccccgccggcggaagaagcagccgaacgatctcgccatgagcggcgaacatctctgtgagcatagcatgggtcgtaccgtaagggatgttcttcaccaaaagaatcgtaggagaacgaggtgttgacggcgagagagagtctaaaaggagtccttcctgaagaaattgataaccatggcgaaaccccatcagtaaaaaaaagagaaacagcatttccctaaattagactgacctcttcaaagtactgcttcgtttcctggatgacatgggtctcggccaaagcaagcttcacagctgcattaccagattcggagttgaggatgtcggctttagaaatgttcatcctgtcggcaatagaagaaaccacagcgtcactctgagagaaaacaattcacagtcggggtagttaataaatgaacatggtggtcacattgtatctaaagagtgtgacgtacgttcatgaacaaaaagccccattcaaactctcttccttcacccatagcgtccgccttcttcttttcctttctcttgtctttcaagctcttatcctcactgtccgtcgtgccacccaacggcgctcgaccgggtaggatatgtaacagccgacccataaagctggatccatcaagtctctcccaggcagcaagcgcagctaggttggaatcaaagagaacgtaagcggtacccagtggcttagggggtacagaattggaatgaggaagatggacagaagccagagagccaaaggggctcagtagttgacggagatctagatcggtgcacgagaatggtaaattacggaggaataatcgagaggtcgagaggatcatatcctgaggctatttcataggaagggcagtgaaaaaaggacgggcagtagaggaatagtcagcaatgaacacctctttaccaaagcggagagagagagagagagacggaggaagacaagagagcgagagaaaaaaccaatgaggaacggagagattcttacagtttgttcttcctgacttccgtcaacagctctcccgtcagcatgcacgacctcgaccttcttgagcttgtcttccgcactaagattatcaccctctgtttccacctcgtctttcacctttccactcatcatcttcttcatccattccgagtcgtccatctcggcgtctccatcattcttctgctcctctacttccggaacaggctcaatcttgttgacgcctgagttagcagcatcggtggccgcggcagcggcttcatcggggggcaggtcttcccacgacctccctccaacagccgtgctagctcgtttagaagttgctaactgtataaactcttctttttggttcttatctttggcagatgaagactttttgagccttttggacgtcccaggttgatccacaggctcacgggtggaagcaggaggagacgaaggtcgtttgagtggtcgagattctggtgtaggcaagtgattcggtcgaagtgacgttgaagccttggactaaagacgtttgtaaaaagaaaaaaagcaaaaaagaagagaatagaaggaacaccctcaaggtgtctcagtcctcaaagtccccgatggtagtcaatcaagttgaaagagagagtacgagaagaactcacgtcgtccactaactcggccttcagcctactgccttctaaccaagctccgttccaccaatgaaccgccctttgggcttcatcagacgacctgtagcccacaaaagcgaatcgtcgtctggacagtagtttgagatcagtgatagaagagccaggtggaggcaacggggtggtggaagaagaaggagctgaagccgaggcggatgataggtgggaccgaagcgactcgggagtagtcgtcggtggaagattgaggaggatgatacgagttgacctgatagcgcgtaacaaagttcatcagcttggagaacatacttccgacacggctactgaggacgacaaaggagccttacatgctgctgctgctgatgatgatgttgaaagcgaggtcgcttgctttcggaaaaaatgcaaaatattgaaagagttgaaactttctcgctcttatgcgacgcgcagcaaaaaatcattttggattttattattgttattatcatgattgccattaatgttttcttagtatactcatcagatagatcctgcgatccaacggccaacacagaagaagagtgtggacaggatgtttcatagaaaatcagtgtagcgcatccattcagtagacagcttgtaattttgtcattagagaacatagagaagaagattcatatgcagcttaaaaaattcatcagataatctgtaaagttttgagagagccttgacttgatatcttctcaagaacaagatgggataattgaaggccactgattctggacatgcagaaagtaagcaaagcgaagcccatctgtttggtccaatttcttttagtctgcttttatgaactcgtctttttgggttcggaaccttcagcctcgacctttcgattagccttgagccgatcgaggaggagggtagttccaagcagaagtgaattgcgctctcccacagtcgaatccccacatcctgcccaccggatcttcaagttctcgtccttgacaagacaaatagaggaacggacgacccaacaagattaggcctgtactctcagaacttgatctgacaaggagatttaaaacgtaccaccagatagacgtaaccagccaagttattcacgatccccatcatctcatcctcaagcgagctcttcaggttttgggtcgagatgatgtaattatcatgctggtctttcgggacgatctcacgaagattcgatatgaagaaggtctgcatccaagcctttaccggcaagttttgaagtgatacctattaccgatacattgttcaagattagcaacaattcgagatcatgggataaaccatgctgacatactgagcaaaatatcaaatccttctcatccttgtattcggtccgaacggccttgacaaacgcctcgcattgtctctggttgtaacgatgagtttgggagaagagttgaaataaaagtcaatcggttttgcaaagatgctcacgctatgggacggagagaatagataaaaatgctcaccgcttgaggaattgtgccgaggatggacagtacagtgatcttgccctggcagatgtctgtggtgtgggtcttggtctctggatgggccaaggtcttgccgtaaaggttagggaggtacaaagctttctgtttgccatttgaacagaggcaggatcaagagaagcgtatcagatccagtcatcgagtatcagagtacaaagtctgaaagtagtgccgaacctcttctttgaacagcgtcttcggtgccaaccagccttttccacctcgactcgaggcagcttctttaatgtttctcaggttcgacctaccgaattccgcaagactatccagcgatgaacagacgagagatccgacgaacagaaacaaaagtatatcaactcatttgcctttgagtatatcatgtacatcacgccgactaacattgcctgaagctttgcttttcgaaagtctgagtccaggcttggtaccaaagcctgtaaccaggtgatctccttggcctctggcctctccggtacacccagcgttctggccagtccgggaagagattctgtactggctttcttttgagttggcgaggagacaggcgtagcatcgggtgaaggcgaatggacgaaaggtttgggaggaagttgaggcgaaagctcttggtgaggagcatgatctggaataaagagcccggaagaagagctgacagatgcaggctcaggagcaacgggcggaggtgtcggagggggcgtcggcattgtcggtggtgctggaggaggaaggatagtagccggaggttggtcatgatgcttgtttgctaacggaacggcggaggcaaaaaacctatagggatttgaaggtatggaatgagccggatacctagagaggatccggagagcgaacagaccgctcatgatggattgatgtaatgtggggtcaaaaatgagatgcaacaatggtttgtaagtggtgaaggatgatgatggtggtgatgatgatgtagcgaaaggtgcaagttgtaattcattaggaaatctttcaacaccaaaccataaagctgcttttcgaattctattcaactgtggatctgtcctttttatccatcatctacattaaatcgcgaccatagaaaacacttcatatgtcataagtaaaagaaataggaacgtagatacaacttcgtacgttcatcagacaacgaacgcagcagaggacagttgaggtttctcaagcgttgacattggtcatgtcatggtatcgatctcctttgatctggatatctttcatcagctttcgaatcgcttcatgttcatccttggagatgttgaccgagacggcttgattgttgtcctccaggtctgtggtgagcaggtttaaggaaggatgatggaaaatatgtcagtgcatcaatctcaatatgtccataggttcaacgatgtggcctgacatttgactcgcttagttccaggaatgggaattgctccttggtccatgacccaagccaatgcaagttgattcgcagtgatgttcttcttcgcggcgatctgaacgttgacaaagttaataatccatggagggaaggtttagttggcacttgaatcactggatggcacatattcacatcggaggagcatcttagcgcacctctttgagaccttcgacaagcttcatgttggcatgaaacgcatctccctgaaaccgaggaagggccttccggactaatcctcgtcaacgaccaatcaagttggtttcatgttgagcaagtaggaagatgaagatgatgagatcaataacgggaaagatgttacatacagtcaccctcaggaatctcctcagaagacttccaggtacatccgatgattcctcgtcccagaggcgagtaagcaaccaacttgacgtctaacctatgaatggaatgtttactcatatcaactaaggatacagttaggcgtacagcggtagacgcaaatctagatacgtactccttgcaggcatcgaggactccattcgtctccacatcaggagtgaacaccgagtactcccactaatcatcgggccgacagcacaaacatcgtcaatcttgctttcgagccagagctgagtgggcacaagctgaatgattggcatacctgaacggcatgaatcttggcgatcttgctggcccgtcgaagagtatcggccgaacactcggataggccgatgtatctgatcttaccagccgtctgaagctccttcaacgctctgacagtatcctcaatgggcgtgtttgggtcgactcgatgctgatctatgttacgaagggccccgtcaagaaagctgatatgttggaaggctgagcgatgcaagcaccaagaatatagtactcacagtatagatcaatgacatccactccaagtcttttgagcgaggcctcacaggcacttttgacatattctggatctcctcttaatccggcgaaggaacctcctgggccacggacaattccaaactttgtgcaaataaagatcctgtcccggtcggatttgaggaagggcgcaaggagcttttcgttctcgccgctaaagtcgaattccgaagatgagagacgtcagatgcatggatcacctaggtatttgtggatgaaggatcttttgaagacgctcacctgccatacatatcggctgtgtcaatgaaggagcaacctctgtttgatgacaatatgaatgcgtacatttagtaggatacccatcttagatttgagaacaagaagcataaatggactcactgttcgatgcaggttcgaaccgtcttctgagattcttcctcgttaccagggccgtagaactcggacagtcctgtagtcgacacccaagaggagaagcagagtgccaggaagcgtttttgtcagctctatctgtctattattgtctctatgaacgtaaggatggacaacatatacacaccctatagtaacagaagataattccgtttgtcatgcgaagggtttggatgtattagtgtgacttgatcagtgttatatgtagaagaaaggaaggtttcgaaccatggctccgaacccaatcttggagacctgatgaccgaagaaatcgacagtgggaataaacgattgggtggacatgttgttagtcaaaagtagtgagtatgtatgggtagatggctattctcgaaggagaacctcctaaatctaaacatattgattcggtttctatcattcagatttctcatctcagagatggaagtggaggtttgaaaaggtggaggttcgatgggtccggcccgccaggataggtgaccgggtgatgacgcgtcctttcctttatgttccggtcacctttctatgccgaacttggacgtggacctctccacctaaagtacacttgccatcaacaatgagtggggagatccttaaagttggttggaagcgcacatttttttcacacacatacacatatgaacttcttttgtaccagagaaggaagagcgttgatatacgacataatcttacaaaatgtattcaaaacaacaccatttcattgggatttcattacaactaagcttcagccaactatattatcattattttttatggagagaacatatcagtatattgaaattcttcaagaacgaaaccaaagatgccacgtaagaatgaggcgtagaaaggaaggggcatacctcacggtatcgaccaccctttcgaaggaattgtgtgtgcgtcccagattcaagaatctgcccacagtccatcacgtaaatcacatcggcattgagctgttatcacatggcgaggaagaagatacattatcttatcaaatcagttgggccgataggaaagaggagaatgacaagaaggaattcacaatagtttataattgatgactgtgtattttcgaaagagtgcaaaagagaggaaagaaatgaatcattaaaacagcatatgcctctcaataaacgagaatcattcgaagaccaacgatacattcacgtaatcgtaattgtagtccggttgatgaatgcgcgatctaaagcttgttgaacaaagcgcctcagacttattatccagcgctctatatcggtagaccaagacaggaatgagcgggttgtcatgacgtcttgaggagtgaacgttggcgcagaaattacgtacgaggtagattcatcaagctatttaagcagaggacccgatcggacttgatcgtcagtgattttttcttctgttttggtcaacaaagcacgatagggacacgtacctggagaatttgagcatctcttaacaacgctcttgctatacaaagcctttgcttctgaccaccgctaagattcgatcctttcgtatcgttgggcggatctaacccgagctcaggcgtcgtcacaaattccatcacctgagcatctcgacagacatcaatgatttcttgatccgaaacttttcggctcaagcccaaaactagattgaaccgaatctatacaagacaattggaaaagtatcatacaaaatccacaaagccatcattcagcctaattctaggttcgtcagatagtaagaacttacagttccttcgcgcaagaccgcatcctgtgagacaagcgcaattttgtccaaatgttcgtcaggagtgacgcttcggacatcctcgccatctataaggatcgctcctctactaaaagggaaaacgaagtgagatacagcaacaaatcacgatatggtattaacagccgcacatatagaccacaaatgaaatgcgatcgaccaaccaaggttcatagaaccgggagagcagagctgtaaatgaacttttcccgcttcccgaagcaaccatcagacaaagattcaatacagcatattggatattaatctttcacaacatcaacccacatagccatcaaaaaaaatgtaaggaggaaaaccgatcaaaaagggttacgcactacagaaagcgaccctctgacctgcaggaattcgaagatttagattctcaatcgccagttgttccttccgattagagtattcaagattcacattcatgaactcgatttctgttcctttcaacgctaatttcatcatttctggcaactgccgctctaccatcgaagatgaatgcggagtattgagagcggccccgagaggctctctcctagtctaacaaaaagctaagagcgcatgcacagcccgactgatatcaccaaggaaaacaaacgtctttgagaagaccattgcgcaaaccatggcggcctcgaatgtagagaagagctcagcgacagcgacagatccgtcggcaagttgatatcctccataccaaaagagcagcccgcatacaaacttatcaaatcgaaaagtcggagaaaaaaatggacgaaacaaagaagaggtgaacatacgtcagcggaagttcaagagataaattaagacactaacttacaaggaccacagtttgtgagagcccaaatataagggaattccatgatacagcctgtcgatgctccttgatatcaggttgctgcttcttgttgaacatctccgctacgtgtgtttctcgcccaaatacagctacagtctgagttgaagagttcaaccaatataaggtggtcagacagagtatgaagagaaaagagaatagcgtacaaaccttcatagagttgacgttattcgacgcgcgtgaaatcgccaagtttataggtttgctcagttcttgttcgagcttattcatatgaataaacttgtcataacctgtgggaacaagcaacagagtgggaagagatccgatcagaagaatatcctaacttaaagggcatcaagaggaagagaatgcaaaagcgatgagaatgagttgtacagggggaagaatgaaaaggtaaaactttgtctcgagtctcccctgaatatacgtccaaggatgtatggaccaacaacactgtgtgatcatgatgaaaagagatgatttcaatctctcagctttgcaaaacacgccaaagttatggtatcacttacttaagaacagatatgataatctaatcatcaaccaaaccgagaggcacagcggcatttgaaaaatatgtcgccagatttgaggtcagacaacccgctccgttctcttcaatatcgaaccaagcgactttctgtgtttacatatttagaaagaattgagttttgaacttaatatctgcgcattcggccgaagtcgagcaacgtatctgcttgagaataacctcagcgccttcacgtcgtatccgtctgatgatcctgttcgatgctccatcaaaaaacctgcccagaaccagattgcatagcgactgtacttcctagcaaccatgcggacaaaggccaattcgtgccactgtccagattgtcattgacagacgagagacacaggcgatgcattccacggtcagatagagccgatgtagcttcgctttgagaaaaactggaaatgtggggaaacagccaagtcattcatcagcttgttcgcgttttcaagctaagatccgaggttgacttcggaacgcgctcaaggatgagaagattcgatcgtcggacaagagccctagccacagcaactaagtaagagagaaatttatcagccacgaagaacatgcgccagaaggattccggagaaaagccgagaataagaagatcactcacgccattgacgttgacgttgaccgcccgagagcagcccagtcttcatcccgtttatcatggtgtctaggccttcgggtagctgaaagataaactcccagacttgtgcccttttcaaagcctcactacatgactgtcttaccctggcttcattttttctatcagcagcatattcatctggcgtgcctgttagacagatggcgacgttgtcgagaatgctaccagcaaatagtgcagggtcctgtagaaccgtagccatctgttgacggagaaaagagggctgatagcttgatacggggacaccgttgatgaacacgttgtttgcaagcgaactaggatcaggcacatcatattgacgaagtagccattcaatatacatagtaaagatggctagagaaaatggtgagcaatattggtataccttccggaaatgcccttccgctgattaggtgaaacagataacttactaaagccactagggtaaactttccagagcctgaagctcctacgaatgcggtcacctttccagcggctgcgtcgagagattattccgtccaaactcttctggttcggcttcgaaggaaatgagaaagtaagacctcgaattcgcatactcaattttttcgaaaccttattgtagtggcctctcttgattccgagattgacagacggtagagtcgtaagtcctgcaggattctgatagtcgatttcagatatcctctcgatctcggctctaacttgggcttgggccgcgaacgcttcatggagcatcgtgaggtgcgacaaaatacttatgaccgctgatcatccattaagtgagaaacgtttagattgataagcctcaggatcagatggaacagaaaatatttctgatgacgaaccgaatatggcgctgtaagttgagaagaatgaggtgaagagattgccgcttgataatccgtggtaagcgactctaactccaccgcgatagactggagggaatgaaccaaccaatgccgaaatagtcaagctctaaaacgtggcctctcaccaagaaataagccagatagaggcgatgcaagatcgaagtttgaaaagcaatagtgaagacgatcaaagaaaatcttacagcaaagagcataggccgcaaaaacactaaaacaagcggtcgaaaaagcaaagcctttggagagtacaacgatgtttccgtccttctcgatctttcttagataactgtcatacacgctcacgagcgtatctgaggcttgaaggaccttgacaattctgacggtggagagaacctgctctaaaaacaaagcggcgtggccttccatccgcgagattttggcgaatggtcgagaggaaaactcggttgacagatatggtctacatgagtgcgggtttagagagacaacagaacaagatgcttgagttgagtcaaaagaggaagagacggaggctgaaacaagcgaaaggccttacagtatgccagcgaaaggaaaaataccaaagaggacaccaccgacttgaggagataccttgaacgccataaccactacaaccgttgcaatggaacgaaatagaagttgagataaggttgtcagtcagttgaccaagagataggagaccaataagaaggtacatgagaaacaacgtacgactggagcagatggttccaatactccataatagaaaccctaaaatttctctaatacctatctgaagacatcttatgcccttggcgagtctcgagccgacttcgccagcaccaacactctcgaagcgggccgagtcctgggcggttacagaggagatataggctatcctaattcgggcgcacatcctcgatgaagccagagcgacttcgagatgtatgcgcagggtattaaaggtcagtgacacacttcgaatgtttgaagatagcacaagatataggaacagacagcaaccgaagaacacagaagagaagacccagaagccaagtcctgttgcaagcatgatcagagcggtgaatctagacaccatacgaatctcttctggcgagccggttctgccgttctggacgactgcgcggaggtatcgatgtagacagtgcacaaagaaaaaaccataagatctccgagaacaatctgggtgacacatataggtaaagatggtgagagaataatcgtacgtacggccagatgtccattgtccgtacatatagtctactaagatagttggaagagcgcctgcgggaggaataacaggatgatgcacaatggagaacaagtatgaatctcagttcaccttcagaagtagagatgaagaaagaatttgctgtcagcgtgagaactcgcttacaacaaagactaccgaccaggccaagagcatatagaataagatctgccctggttgcgtatgagagaaagctacgattggtgatgtaggcaagaaatgggaaaacaactcggtataagcatatatgtctctaagagatacttgatccagctcctgactgataaaaatatgaacgcgcaatctctttgatgtcagaagcaaagacaagagagaagacgaagaggaaaacggactacaatactccaggcaatggctcgaactttttcaattccgggacgtttttgatgattgatgcgtactgtcgctgtttgaccagttcgtctgctgcttgtagcgcgtacctgtcttggctctgcgacgacccgatggctggagctgttaccattggcatcaatgtcgagtttacagtataacgtcaacatcgatgagggaagatgaggatgtgtgtagagtaaggagaaagcaaggtacccgactgatctatggtttatagggaaaattgtatagactactctcgggaacacgacataggcaagagggtgggtaagtaggtcatccggataccattaatcaaacatctatacccagtggccagagcaattaatggaagcaaaacaaggtgtttttatcaatgttcggggcaaatggggcataagtcattattggaagcgacactacatgttgtgaatgtatgttcatcaccagctttgtgtaaataaaaatgaactatctctattcttctcaagagctagcactgtgaccgatccgaagctatcgtttaagaaggctgtagtgatcattttggaaagaccggcttggcgtccagaaaagcaacttccctagaaggctgaatgaacggatctagtgcctcagcctctgatcgcgaataagcattcgcgccgtttggggttctactgtttaatcgtacaagtgaatgcattgatttccgatctgcgtctagaaaaccaacttctccatagggctgagtgaacgaaacaagcgcttcagcctccgatcgcggataagcatctgcgccaatcagggatccatcatcactttatataaataagtgtataggcttgcggtttgaatagttctcagatgttagtatcagttaggtcttcactgttgtgggtggacttacaaaaaataaataatcacgatgatacactacagaattctctat

SEQ ID NO: 1487 - DNA, 1376 bp, Xanthophyllomyces dendrorhous
gaattctctattgctctttttctcgacgcgtctttttctgttttgtttttaattcattttattttattttcccgggcggtgatttcttttcctactaacacaacgaccatcaagatacatacacaccgaccagactgacctttctcttcccttctctgtctctcccgtttgccatcagtatggcttctcctaacccctgggcgacttcgttcaggcaacagctacacgatgactcgaaccatttggataacctacaggaagccatcgacaccatcggttacggctggctcaacggctacatggacgccgtattctcccatcggacggaaactgcccgatcgtaggtgcctttcgtttgggtttggtctattgttctgtctcctttactccttgcattcgcaaagagaggacaatctgtctcacacagtcttcttcttttgttattgttgttcttatctacttcacgtgttatccttgacaccgccatcctcgtccatgtttgtctctgattgcagagctatcgcggacctcatcaagacaccttcaggtaaacggaagacaaagactaccactcaggctgaaagaatcgccaaagcagaacggatccgcctggtgaatcttgagatggagaatgaggctcagacgttggccaagaagaaactcaaggttcgtcgatagctttcttatgtcgtgtcatgattgaactcccctactgatacaggatgggcacggctcacctatctatatatctatatcccactcttactccactcgccacatcacacactgttctcttaatagacaaagaagacggataagaaatcgacaaagaagactgtacctgctcctcaacctgaaccagccatgtcagaacgcgaatccacccctgttgccacccctgctccaatctcctcaccaccgcaacctctaaggcggtcgaaacgttcttcagcttcattccaaatctcaatacctgcatccgtcccttcatcacctccgctaccaccttcttccgtccgttccgtagagcctgctcaattaacggaggaagacgtgttgatggtcgaaacagagcaggcttcggttgagacccgctcggtagatgcttctgaggctccgatggccgtccaagagcagaacaaaggagaagccgaagacgagtttgcagatcagggagaagagaaggagaaagcggagatctcggcagaaattgatgagatggaggacgatccacagatcgaagaggccattgaggtagaggatggagaggaagaggaggaagcggaggagggagaacagcttgatgacgaacaagcggaagaggatcatgaagtcatggatgaggagacgcaggataaagagatagagaaggagga

SEQ ID NO: 1488 - DNA, 21613 bp, Xanthophyllomyces dendrorhous
acctagcgcttcaagccgactatctcaagccgcctcatcgtctgtgatcgatagacgcgagagcgccttaccctccgccacaagtcttggcctcagccggatctccggcatcgggggcgtcaggggagtcccttcgtcaaaaaggaagtctggggacacgtttgaaaccgagtctttctctttgatgacggcgaccgagcaaccactcaaccaacccgctccgaccgaagagccggtcgtatctcgtccttcaaagatctcaaaaaccgatgaccaatcttcctccacccttcctatgctttcgaccattagggcttccattgcgggttcatcgagcgctcagaacttaacctctcctgtggctgtctctgtcgatggccgaagtcgtctccagcaaatgatggatgagatgaaggctagggaggaggctaacaaagagaacgcgaggaatcgatgggctggagggtcggtggcttctttaggactcggtacagtaggacggatgagttcggtttcgagtacactacttggctcgactagtagagcgacgatgtctggcgcaaacggattttctctcttgacggtcgaacccccggctcaggaatcgtcccctgtgcctgaaccggcgcctgctatcactcaggagagtaagtcagtcttgatcgaagaagctgtgcccgaacaggaggcacctccagggcctcaagaaccatcttcaccgattagggagcgttcctcatctgttcgagagcgttcatcgtctccccgtaaacgatccatctctccactggaagtcgaggaagagatgatttcttctcgtgaagagactgtcctttcaatcgctccttcgcctgcacgaggaactgttccttctgcgaaagaagcttctcctcctccttctcctcctttcgctcctgctgttcaatcgaaagcttctctccctcgctccgtaccaccttcgcccaaatacccgtctactcgaactgtaccgttcaccacaccacccgcgttctttgacgatgatctaatcattgtcgtcgacgaaacaactacacctgctaatagccctcctgcccccgcccctcgatcacatattgttgctgttactgctgttcctgctcctgctcctgctccctcttctgtatctgctcctcccaccgagcaactcaatgcatccgggtctgcaccagcgagcgtgtatgcgcagggtactaactttgctgcaaaggttctaggaaagaaacccaaggtggacccgccaaagagtgtccagctggctgctgaagctgccaaaaaggtgaagacgctcttctgtatttcgtgtgatggagttaatctgagaatactgatatttgtgtaacattgaatactacaggaacaagacctgaaggatcgtaggaccgctatcagtaaagtccatgagcagactagaatgcgagccgccgctcaaaaagcagctgaagagaaggcaagagaagaggaagagaaactcaagaaggctcaagagactgccgaccggaaggctaggatggctgatgtcgagagaaaacggaaggagagagaggagagagacaagaagacaagagagacaaaggtaagaacgcatccacgcctccattagaaagtagtacactaactagttctctttcttttgcgacccttcaggctcgagctgcggaagaggaggtcaagaaacgcaagctggcggctgagaaggcatcgtccgcctcggcgcccaaatggctcgcttcttccactggtcccaaaagctcggcaaccgctaaccttccgaacaagcccgttggcggtttgacttcttctactaacaagactaaagtaaatccgtccttccggcatctccctccgtcctccggtccgtcttcacagcaattcacgacatcaaaccaatctcaacaacaatctcaaccgtctcaatcacaatccaatgctggtccttctacaatccgggtcatcaacggaattgctagtggtccagttcgcctatcggacatggccaagactcagagcaccagaacatcccaagctcagggtgggcagtctgttcttcaggcacaacgacgtgccctcatccttgctcaatctcagtccaagctgccagcgggtgagcaaaacggagagtccgaagctatcgagttgcctgatattgcgagtgaatactcagactcggaggatgaagatcgagcgcagaagcatgcgcagttcccggtttggacaacatcaccatcgatgaaggccgctctgaaagagcaggagactttcaacccggatgatatctttggaccaatgaagcctcttgccatgggtgcgctttgcttccttttctgatttagacgaacgtgtgtccatagatcactgatgtttctgtgcattgatacgctgtttcattttatcaacagaggaggtcttccgggtcaaagcaagcaagttccggccaagaagtagttcggcaaattggtcaaaagatggtattaccgcccgagaagaggccgagtatgccaaaaagatggggttcaagaagcttcaatagtttttttcattgtccttcagtcttgtttctgttatcattctttcttgctttgtgctgctcccttgatttaccgttcctgtcgcatctatcgctgcgagtttcaatcctgcgcgctctaatttctctgcctacgtgttcccactcagaggacttttatactctctaacttttgtcattatcacatataccagtccgtttttccagacaatggccatcattatcatcatgttactcctttatatatgaatcaatcagtgtctgcattatactatggaaaatgtatcatcatttacattctgttgtaatcctgcttgaaatctatcaaagatccaaccgaatcaacgtatactgctcagaagccgtctcagatcgtgtcagtgcgagtgcgttctgcagacggctcgacttcaactgatttgaattagagaagcattcagagtttactacttaatcaaggagaaaggaccatttacgcggcctaacagagtagattcttatgttatcaatatcaaagcaaatgatgagaggtttgagctggcaaagagagatcagtagtgaaggtctttgttagggttagcggagtttgaaccgggctggcagtgacaagaaaatccggcaaaaattggacgggctacatttcctcgcttgctctaacagcgacccagacactctgtaaagagtagtgtgtactcactcatatccttctcctttggtgaagtcttaacctttgttgttgttgagctcccttcggtatcatggttgcatactatgatgaagttgaaattgaggatttcacttgggatgccatcaagcgggtcttccatttcccctgcccttgtggcgatcgattcgagatttctaaactcgatctgagggacggcgaggagattgctacgtgcccttcttgctcgttgattgttcgagtgatatttgatcctgttcgtgaaattttgtctcagttcttcgaaacttagagtatccataactcagtgttccttgggtttctttcgattacacagcttgactgggaagattatgaagattcagaagatgacgaaggcgaggatgttcccggctcgccagcctcctccacggtctctttccactctgccgcatccgagaccgtcaagcctgcttccgctgaggttgatgccgtggccaagggtcttgagcttgtcggattgaaggacggtgactagttcatttttgtatatgtcttctgtcttttcctacgttggactgtttactaccttgtaagtgccttccctttgttcaatccatcacggctgaggaggacttggtccgtatattgtcaaggatgatagtcataaatgcatagttcaatcagactcctctactagggaactgctgaatatcatcatcgaaattagtctttcacccctatctgaacatccatcgcctgtctgaaacctttttttttgccttacacccatgtgaacaagccaatgctgaccctgtcttttcctcgctttggtaaagtagtgataaaagatttctccataaaaccaccgcctaagagctctacggcttcaatgccatcaggttagtcaaccatccgtttgggccactcttccttcccttcccttgccagggtttcaatgatgaaatacttctcagacctgttccgaatttactgaggacaaaaagccgtcatctcaaacttaactcgacacctctgacgaatccctggcatcccatctttcttccaatcttaacttcgataagttttaccaagtagttgatactgaccgaccttgctctggatttcactacattcctgaacttttagtataggttgaaacttgccgtttcgtttggttgagtttgatcaagagtccttatgctccatacattcgatttacctgcgcacatgtctgtacggagttgagactttgacaggaagcgttgtagttctgtacgtcgttgtaaaccgataggatgtatgctatctttatgtgttcaatgtaacatcaggtcaaagaagaggactatgaaacatgaaaccacgtgttagctgactaagcacacgaatcttgtcaagctcaccgctttcgtgtcaggctgagcgaggattccattctgcaacatttttcgatttctcctcaaacagaccatcaatcaacctataacctctaacctcactctttcaccttgtccaattctgtgctgctgctctcctacgatggatccatttaagcttctcacacagggaactcacttctctaaaaagtctaacaaaaataaccaggttcaagcgctcttcaaatccacacaatcagctacctccgcaaacccaactgccacctcggattcctccgttcctccgacctcccacgctttacctgcggcacttgacttctttaacgtaggtgctgatgccggtactggtcaaaatgaatcagcatccgatgggaagaaaaggaagcgagaggagaaaccgatgagagcggttgctcctcgaattctaccgacacctacacaccgagtgaatctgacaggtagagctgcaccaactccgttggcctcacttgaagaatttgtcgaactacactcgccaccgccatatatcatcagaaacttggctgaaatgggaatcactgagatgagcgaagttggacgaggtgcgggaagtgtgatcatggctgtaagtttttctgcgacattgttcacgttaacttttctcacaaacaggggatttggatccgacgtctctttagctgacgtcgtttctgttttgatcattgctttttcatttgtgaaaaaattatagggacgagaccttaccgctttggctcctaccggatcaggaaaaacgatttcttacctgctgcctcttctcactctgcttcgtcaaccggcgtcgtccctcaagtcagagtctaaagcgtctacgtcttcgtcgtccagttcgacatcgaaatctcctcgcgcacttatcgtgtctcccactcgggagttggctttgcagattcagaacgagtgtgccaagttgactaagggacgaaaatggaggacggtggtgctgagcaaagctaaccaagatactgtggtcaacggagatattggttcgttccggctgtatttatccttgagggccgagatagagagggacagacgtgaaggaaacactcgatgactcattggttgattcttcccatgtcgttgtgtttggcagatatcctaatttgtacgcctcaaagattgatgcaaacgattaaggacaaatctttgtctctggaaaggtgaggtttcaaacctatcacgggtgcgcctaatcctccagaacccgtactaactcccatagtcatcctcaactataacttccgtccccatatagcactactcatctgatcatggatgaagccgatcgattactcgactcgacgttcttgcccatcatggatgaaattctctctcatttgacctcggctgagctaaagcgatatctcttcaccgccactcttcctagtacactcgaggagatcgcccgaggactcggcaagggagacggcatcagattggttgttggaataaagtgagcatctctacatatattgatccatcatagttcatgcatgcatctaacgtcactcttgcgttgctcagggatgcggtgacatccaaaatttcccagaagctaatctacacggctaccgagaacggcaaactgcatgctcttcgatcactcctcaaagcaggatcccttccacctccgtgcttaattttcgtccaatccattcaacgagcgaatgatcttttccacgagctcgtctacgacgggttcgcgcttgatgtcatccactcagagcgaacccccgagcagagggacaaggttgttcgagagttcagggaaggaaaagtctgggttttgatctgcacagagttgatgggtcgaggtatggactttagaggtgtcgaagttgtggtcaactacgatttcccagccggtgttcagagctacgttcatcgaattggtatgtgaagcgggtttcatttctttgtcacgagagaggaaaaaaaagtacggaggtgtaataactcttgcttcttgctgttactcttcaggtcgaacgggacgagcaggtcgagatggtcaggcaattacattcttcaacaatgaggacggcgccaatctcaagatgtaagcttcgtttgccatggattcaccagccctacgatccgtgttgggcctcataagacaaggaaaagctgacactgcatcgagtctactctttgaacctttgatcaggatcgctaatgtgatgcgacaatcaggctgtgaggtcccagaatggatgcttgcgctgaagaatccatcaaagaaggaccgcagaaagcttcagaagaaaccgacggatcgaatggaagtccgaacggccgccggaagtggtctcggccgacagaaggctaccaagagacgggagatggtcgagggaagcaagagacggaagacaaagggggatcaagaaagtggggatgacgagtaggaatctgtcgatggcatttagactcgagctccagaatttgaaatggccataagctgatagagagtaaacgacaagacgtcatgaaacaagctacgcatcatccagtaaagtagaggaaatactagaatatacaactacacttgatataaagaagacctgcactcgcaacaaacctctacctacaaccactcttttccctaacaccgactatcacaggcgattaagaggctgagtctgagacatcacgcactcacaagctcgaccacaccctttttcttttttggttgagaattaaacgatcaagtcgaggagaaagaagccaagcattgccttctttccttgctacaattatctcactcccgctgtcactcttctcttgctaattttctttgacttggaatgatgacatttgaccgggtagcaaacattatgacacaatagacgaagcccaagagtttgagaggagcggagttcttcatcgtcaaaccgaagttgctttgggttgacagatagtagagtgacgatcatgtagcgtcaggcgacaaacactaagattgatacaacatcggatcaaaaaaaggatacaccaaagacaaacgataggcaaattgaaaaatagcgcgagtgtacagacaactttattcatacgagcacctccagaccttccatcgcctcagctgcctcgacaactacatcaaacattccactccatgttctcgacaaacctgcaaacgctgacagatcgaccgttttcaatccaagatgttggcctagtgcccgccgctcttttaaatcggttaggaaattagtgattaatttgagctgggaagcagcattttcctggagagtccaaagaaatgtaagcgccacgctctgttatctgcttccggatgacacgcgaaagattaggtgttaagacaggaaagaaggtactaacaccttgccaggatgggtgcgtgagagaatttggacaggggaacggcgtgctgaggagaaaacttaatcgctcaacactcgttggaagtcttctccaaagtgttggcttcatatgatgcacgttcatcgaaccatatggtctttgttcatcctcagacggtcgtagagaggtcgttggaacgggtattgggattgacatgtttggcgggttgatctgaagttgaaaaatggacacggacaagtgttgataggtcattttaattggacttaacaaagtccgtttgagtgattccgaaggggtaccgtcgagtttgagctcagtcagttcgagatgaattccttccaggtttacccctccttcactgccatctgtaggtacgttctcgagcttctcccgagcggccgatgagcaattgaagaggatatgcaagactctgagtcgccgaaatcttccttgagcgagtctattcagaaactggttccagagcccagattcaaggatctgatcggtaatcctaagatcaaactcaaggacgctcgaccaaccaggtcggccgttcttgagaaaccgttgccaggcatcatatccggctaactttatggatgtatataatttcggcaggatagtgtcatggaagagatggttgacggtgagaagaggaagtattgagcggaagcttgctgggtcagacgaatgattggcacagaggtggttcgaaacaagataaagtagttctgggatatccagtggtgagcgctgagcaaaagcattcatgacgatctcagagcagacaagatgaacctggagagagacgaacgaaggtcaaaagaaggtatcgcaagatttatatggagactggcctatgactttgttgtcctcgaagtctccctcgggcaatcaaaggcccgaccgagattcaaagtcacgtgacttcatggcccgtatccggttggcgccatgctacgcacacactcatcactcggaatcgcttagacagattggtttcttcagagatcctatcacacaggattcgtctgaggaatggcccaatagtttacgtttcacgccccgttcggcagagtcaagtgtccgtcgagcttgagtgagatcagcctcggtcagaccgaaagaatggaggacgtccaatcggatatctctaggaagctcgagtaaggtgggcaagtcgagttcgggaggaaaagcgacgggagctatgtgtttgactggttgaattgtcccgttggaagatgcctttaaagaatctgagaatccgaagagggtctggggaagatcaacaacaagcgatgtagctgccacatttattctatacgttgagtaagaagcaaaaagccgtgaacaaacaagcgttgtcagtggacgagctccaggccaggagttcctctccttatgtagacttacacatatagctcaaactctccgttcgggtttgatcccaaaagtcctcttagcaaagctcctatgacgcctccacctccgacgctcttcgagtctgcgttgcctagcatccgatctacccgttcgccgattgacagtttccagtcatacacgaacactggcataagtgtagattgtgagttcttcagacctgaaggtattggcttcccgaacgatcgccgaacggacagacggagggtttcgtagaaccgaacaaatttgatcggaccatgaacgttatctgaatattttgatgatgaggatgtgcaaagtgaagctgactggaccgaatcatcattcatcagttccccttcaagccgaacgaggagagaatgcagcagtcgcctggtctctttcctaactcggacccaatcaaatcggggatccaatgcaaacgaatcctcgacggacgtttgagcagggtaatcgggtgacggtcggataggctccttatctattccatatagaaggtcccacaacgagtcagcctgttgggtaggatacatcgctcggaactgagcgcgcgagagatgttcaatcgtttgagagacggtcagactcagtggatccaagggggggccatcctcttcggaagagagcggaaaagtacgattgagagtagaagcgcaaaggacattctgaatttgtttctcaatcgagcgcccaaatccaggtaaagatctcagttgatatgcgcccgtaaacgctgttattcgagcctgtatctcgtcacttagaggccagtcctcgagcgttagatcaatcgaagtctgctgggctggcttgtgaaccgaggcgatcagcttggccagaagcttgttgtgagagattccggccgagctggttagtccaacgtctgcaaaaattcgggagcggatataggccgcaaggtgagaagcgagctgatagggcacgcagctgtgtcctactatggattcgggtgtaggactggtggaagcggtgggtgagaggatgagatggccttcccatgtataggggatgtaccagaaccctgcgtccggagttgagtcaagctggaaccaccttcggccgtcttgagactctcgtacgtccgatccggcttccagttgaaagagatgaaggtcgatgagtgatgtcacgtcgataaagagctcgtccattcctagtttctctacttgagtgcctactagggacctgacaagtcgaaagacgagccgggagtgtcttcggtagagcgtgagatcttctccattgacaagaatcaactagaaacagaaccaccaattgcgctcagaatgtcagctctagttggccaaggttacaagtttatgatgatgatgggcaaacctctggacctgtgaacgtacgcgtcggaaatcggacaaacgcgtccagaggggatggacgaaagcgatgaaagtcagctctcgtgacgttgtgtgcatcttcaagcagaacgacttgcaatgtttctttgcttccttgactgacatgagctttcctacacctcttgccctggcctcgtaggagcatgtggcaaggatagccttttgctggatcccgatcggcttgcccaagagggacgggtcccggatccgttcactcgagacatcttgtgaggaaacaaaatccttagcaggctgctttatgacaggcatgtttgaaacaacatcgagcgaaccatcttacagaacgagtccagatcgagcgcgataatgatccttctgcctgtagagcgttcggttgtgtccatggtatgatggtatgtgaggcaagatgggtgtgtaggaagaagagaaagtattgaaaatattgggaacttttgtaatgatcggattagaacttttgtaatacatttcctacgttttttcttcttctcttccttccatcaccaactttcgaccatccggcgaacagcaatatgccttctctctcgaaacttcagcggcttcatccaggaaagagtttaattaggactgtggaatcacttggtcttcgtctggtgagtgtcttatcgagcattctggctgtttgcctcgatcggtccgttccgtattggtctcagggttttttttctttttttttttcttcactctcggtcgtttgcctttcgtgaaacattgtttgatcattatccttctcttatctggtgtggttgatgttccgactatcttttctcgacctgaatctccgtcccttcccactcccgaatctcttgccggtcctggctcgctcaacactcatctgaatgactgttctgacgaaacctacagggtcaagataagattcctccgtcgctaaagaagagcggggtggtagtcccgatctggcgaaagaaaaactcggcagaaccccactggcacaaggctaccgttgttctgccccatgtagagcttgttgacaagcctttcaaggagactaggatcggagcattcatgaatagagagtggagaagaaaggagttgagcgacaagtacaagcaccacgaatgtttgttccttttctttccctttctgggtctcatattcttgcaaataaggatgggtagagaagtccgcgtcgaatggtcatctactgacttgcgatccactaacctttctcttcagtcaatcacatccccgaaggtcaaatccgaaatccgtttattccttggttcaacccagttatccgtcggtttgagagtccaatctacaccacgcgcgagcaacggcggttggtagaggaagctcgaaggttgaacatcaccgacgtccttccttccggtccgaaaacgcctccagagtttgcaaacaccttcatggacgtgtggaaggagacagggaaagaacgaacgcggacggagctcgggcgaatcatctgggccggggtgtacaagaagaagctcaatccttggggagaaggcaggttcactgaagacaggttgagtccggaaaagatcaaggagagagaggtcgtcgaggggcttcctaggtggggaccctacaaaggaagacagatcatgttcaagggctctcttccggaacgacaggcgcctgccaagaaggcggccactcaggctaggttggatacaatggatcagaggatcgccgcttggaagaaggtttgtctttctcttcttcttcttcttctccttctctattctttcttccgttctgacttgtctgaccttgataatccgattattcttcttcaccacaggaaaaggcagccgagaaggagaaggcaaaatccagcttgccttattaattatcaaaatacgaatgaaaatctatcctttctttcgtgtttccttctatcctggacttgtctgtccaggatcaaatatgtcacataaagacacaagtgaatggagaggagaaatactgagaacgaaggcatgtatgattgcataagctctttgtttagtttctatcttttttttttcttcagcatttccttctcttctctttcctatatctagttgttcttctgagcctcttcgtggactggtaaaaaaaagaaagaaaagagtataatcagtctgatggtattcgattatctccgaaattcctttccgccaatgatggaaactcaaagatgattgtaactcacatcgatcgttcaaaccaaatctgtttcgagcaatctcgatagcgaagaactaaccaaacaatgtgaacccaaagattcaaaatcattattgtgtcagtgtgaagaaaggaaggagaaatgaggagagaaagggaatcaggttttctcatacctgagctcgcagaacgagagtagtgttctcctgggcgtaatctccagaagcatcggttctgaccagagttccgaagttgtaatccgggaccaagttctcgtactatcaaacacgcaggcggagctactgtcagtgctcgataggaaagaggcgaagaaagaataagcagggtggaatgagcgaaagaagaacggacctccttgacgtagttcctccaggcttcctttcccttgacactcttcatttcatcctcgttgaggactctgagagcggcatagtcgttctctggcgagaccaacgccgggaagtctcggacgaggtgggcgagcatcatgtcgtccactctacacgtagagagcaagaggaaattttaaatgagaacaagataaggtcagaatgagctgctagaaaagaaatgaaagaaggcgacaaactttgtcagtcggatctttgaaggagggatgctggagatcaatttctcataagcctatattgccgttcgagacagacagttgatatatatatcgatttgaaagctttagttcaagtattttcaaggtagaaacagtcaagtttgaggaagacataagacgaacgatcatatgctcgacgacagcgacagcgaactgcttctcgatctactttcccagagtagagaggaataagtatcaccagaggaaggagaaatggacaaggagagagaagagcggtctcagcattcgatcggttgatgagggcgtttcagaagattcatggaagaggaaggaaacacgaacatcctgaaggttatcagctttctcggcgtcaaatggagcggccatgatgagtgtttgttcgagtgtggttgggtgttggtgttggtgttggtatcaagaacgaaagggagaaaaaaatcggtcgtgacgtcggcggagggagacttggaaaaaagactataaaaaagactacgttttgcttataagcttattacgaaaaaaaaagaacattgcacatttaagagccctcgagatcatttgttcttctatatcactcgggaaaaatcacattggattcgattcttttggaaggagatgtatgcgtgcgtgcgtatatatgtatatggatgtgttcgtacggataagctgatattcacaactttgaccaactcgcgctaggtttgacgccctctccgttagtccccaacccatgaggattcgccaactcaaactctgcaaatccagaggcagcttcaacgacttctaacgatgcgtcgggcacgatatgacctcggtcattccttcgagctctgtgtggtttgttcaggagggataacaaacagttagtaagcacgatctagagacgccatttagtgtccataagagaggaaactcacttgaagaaggtgtagttcaagacaacgtcatcaacatcgtccatcttgggatcactatggggtttgagagagagcggaagagaaagtgagatcagaaaagggatcttcccaaaagcgcataaaaacctcaaagtaaacaagaaagaatggcatactcgagcaggtctcggtcgaggaagaagaagacgggaagatcgacttcttcatttgctcggattctttgttcttcgaaacagaagcattcgaccttcgcgaagtagggcgcaatcttgcccggagtgacctatgaatgaagaacgattaggacgccggccaaaggagcaagatgatagcaaagaggaaaggagagttcaagactcacattataagtactgattccgatgacgtcctgatcggtcagattcttggcggtgtagaatgcgagcgcggtctctccaggtcgaacagtcacctcggactgagcaggtttgaattcccagggaagaatgtctgactttgcggcattaaagtgcactttgatccgtcggtcagaagatgtaggcaagagtcgatcggcctgcatcctagaaggctgggtcattggaataccggcaaaaccggtggctccgcagaatgcacggtagatcggtacggccgcatacgaggctccgatcatgacgataaactagaatcgagatttgaggggaaaaatcagagtgaaatttaagcgagtgggcatacagttagctcaggtataacatcgaaagacagcaaaagggagacagaacgcacgacagctgttccatagagagcaagactcttggatcgacgtgtcttttcttcgtaatacttttcctgggtctgtttgaccatccgagaatgagccgcccggagctcttcctgactcatttctggcaacggctttggccgtatcggcgaggatgaggcataccggactgacgaaggcgaggaagacacgaaagatgcacctcgagaactaaaacatcctgcaagtggagagaacgtctttgtgggcacagtcgatcgaaacgaacgactgaccgacggtcggaacggaggaaacacggatctgaaggaagcagccgtcgatctaggaagcgcattctggtggcggaacaagagagcgaacacgaaggtaagtacggcgagtgacctcgacctgagcaacaccaagcacaactcaccaagcaagcccgaggaacactcatcctgtggaagagagtaaaatagttggtcgtcggtgtggtcgttttggtgcaagagggagccgagcaaaggagaatacggaggaagcttgcacctcaaaagtcacgtgttgcctatgattcaaccctggctctttgcgctcatccacaacgctttgttccaagttctatggaacgatagaaagagtgagatgtgttctgtcattctagtccaaccgaccgaccgactcccatcccattgagcttgccatgaacgaagcaggttgaggacgagagccgatgaagagagtgctggtcgtcccggctgtgccgccacagaacatgttctccagcttcagcactcatcttcaacctcactccaactcccaccatactctgcttgctcatcccgcctttgacctcaggaatggcaggatagatggacctgctgcccacaccgatatcgccgctgtttcctgttctgatctttctcgcgctcatactcactggctatctcgctttcaccggcgtgctcgaactcgtcctcgcctgccgatcactcgcccgtcatctccggaccatgtttggttttctttttggatccacagggaagcctgagcttgagaggccacccagaagaaagagaagaccagagaatgatggcgagtctttctgtttttacgttgctcggttatcaaagctaaacccgtgaacaccgtccaaacagctcggttcgtgatccctatgaccgcaccctctccgggatattacctaggaatcgtcaatatgtccggcacgttttgctttctcaattctgttctccaggtgagtatagatctagagtctgatatactgagaggaatctactgtaacgctgttggttcttcttcctttctttctttcctttcctatcaaggccctctcctcgctcacgccttttctcgaacatctgagcgcactctccgacctggccatccgtacagatacgccaaccccgttattatccacctttcttcccgtactctttcagcttctcacaccatcacccacaaaatatcccaggcctcttcggcccaccgagctggtcgaggcgctccgtcagtcagacaccgtcaagcgatccggcatgtttggcagacttcgcgatcagcaggatgcccaggagctgtgggtcttgttgaacggctgtgtcgaggaagaacgcgttgctatcgagaaaaacgacaagagctccaagcttggtatcaagggtctcttggacggtaggggtggcggtgatgataccgagcgagaatcacgggatagaccgtggcagagtccgtttgagggaagaatggcatttaggagaagttgtcagatgtgtggttattcggagggaatcagactcacaaagttcgacagtcttagtctgcccgttcccagagcagtgggtgtttcctttttttttcttttttttttcttcctctggacagactctttttctcttctcctttctctctgacaaaaaaaaacctctcgtccgttttcgatcaaatcctagcggtcaacgacgttggaatccatgctggaagcctacacctcactcgaaatcctgacagactctcagtgtaggaaatgcagagttctccacacgctccgtcgacttcgagcgcgcttgccggagaacgaacgtgaagtctctgagcaagccgggcagatcaagacgaaatcaatgttggcatcgacgaattcatatattccgttggaagacatccttcggtccaacacggtgatgaacgatcaaggagaagaagaggaggagggaaaggaggggaaccggccgatgacaaactcgaaaaagaagcggctaagagaagcgaggaaagagcttgaaagagagagggaactcatcaggcagatcgagatactcgtcagtgaaaacagatgggaagataatctcgatggtgtcgcttgggatctggtcgacggtggaatcagcacaaggtttgtttctacatttgaaacaagaatccttggtgtcgggagcgagactgagcctggctgaaccgtgtttccttgccttgcaaaaacaacacagacaagacatgttatccctcccacctcggatactgacgcttcatctgaatcggtcatcttttgactatcactatgcgtccaagaacgcttgtcaggtcatctatccagcaaaattagacctcaccccattcagtacgaccggtacactatccctctcgcccagttccccgatctcatcctgtgcaccatctgaacctgtcggtctcctctctggtccgctctcgtacgaactatcatctgcggtgtaccactacgggtcccacacatctggacactatgtgacctatcgtcgggttcccttcacagacagatggctccggatcagtgacgacgacgtggcagagctaccgaacggagtcgccgacgtcagacgggccgccggagaggctttcatgttgttttacgagctccgcgaagggaacgccggatcgaaacagcaagcatgtcagcctgagctgagcgggcaaccacaaacaggccggtcatctgtctcttctttcaatatcctctcggacagagatccgtcacctatgacgaacggacacgttgccgtcgacgacgatgcaaaaatagaagtgacctgttcaacaggctatctgtcagagaaaccgaaaaaagaacaagaagaagagaaaagagtcgatgaccgagagcacgaccgcgggtcgactgaacaagaccggtcgagttcaaaaccgacggacgatcggaagaagaagcggaagaaaaaaaaagatcaaggagggactgtaacggagaatttataaacatgtatcttgactatcccgcattctcacgcgttctatgacccagagggaaccggaagaaagagaaaagccgaaatacaaacaagaacaagaaaggagatcaaccggaatgatcaacagcgctcaaacccaatggacccagccgaccggcacgatacgatgtagaatcctcagtcaacagaattgtctcactttcaactttatcatcaatcttttccttcttttaggaaactcaccttctttcgacattcattctttctttcttcttaccgtcgtctttctttctgcctgttggatcgttgtagcccgtgctccattcccctcctgtgcccgcttcgacttcccactcgcattcgctactcgtgttctcctggagagatgtcatcgtcaaaggccatgttttcaagcgcgctggtcgcgcttctcgccgtttccccactcgtgcaggctcacatccaactcgccagtccttatcccatcaactctgccctcaacccgaacacgccagaggccgagaaggactagtgcgtctgtgttttggctttctcgatcgttgatgtgcatctcatgctgattgcttttgattcccataaacaccatcagctccatgacttctccgttgatctcagatggcccgtacccatgcaaagggttcatcggtcaaggctatgaccagggcaccatcccgacctatactgccggtaaatccatggccatcacgcttgccggaactgccgttcatggcggaggttgtgagtagatctcttctttcttcttcttcttcttcttcttgttttctagggtggcgggttctgccgtgttgttctctgggacgcgtcgagtatgagtgcatgagaaactcgtcaaacgtggctggtctttgttctcgtcgatgttgttgccatcgtcgtcgtcgtcgtcgtcgccagctggcctggatgagaagctccctcgctaacatatcaattatgccttgtaacagcttgtcagctctcgctgtcgtatgacaatggaaccaacttccgggtgattgagtctcgtatcggaggttgcccctcagactcattgacattcgacgtgaacctcccatcagccgctcccgcaggtaagaacgtgttgttctcatggtcctggtccaacaaactcggtaaccgagagttctatcagaactgtgcgatcatcaacatcgactcggccgccaccgcacccttgacgggaccgacgatccatgtatctaacgctgacgtcaactcgtgtactacaatcgagggcacccctgtggtatacccgtaccccggagatttcgtcacctacggaggtgaatacgccgggctgtccatcggaaatgggttgacctctggagcaggtatctctgacacagactgttttgctcccggaagtgacggtgctggaacgtcttcgggtggtgccagctccactaccgttgcttccacttcctctgtcgccatcgctacctccacgcctgcagcgtcttctactgccgtcgctcaggcttcttcgaccactacttcggctgccgtgaccgcttcgatcgagccctcaagtgtccaagctgtggcctcctcgaccgtatctgccatttccgagacttctgctcctacttcttcctctgccgtggccgacgttgcctcaagctcggtcgtttcttccgtcccggcggaggcttcatcaacgagcgctgtcgagtcatccgctactcccacttctaacgtgggagctttcgtgtactcgtcctctgacgtctcttcccctacttcaacggtcgtttcttcatcaccatcaagctctgtgatcgcttccacctctgcccccgcatcttcatatgcaccacctacttccacttccgcttctgctgccgcttccaccgccgaaaccgcctgcacttctggtgaatggcgatgccaaggctctgtgctacagacctgttcctggggtgcatttgtcagcatgaaagactgctcaactcaggctggaacggtttgcaatcctgtggatcctgtcggttgtgtttggcccgatcaagtagttgctgccaccgctgccaccactgccgccgtcaccacgacatcaaatgtgctcactacgtctgtttcaagcacgacggcgaccagtgcggtcacggtcaacaacgcggtcgtcaccaacaccaatgctgctcaacccactacaacctcggtgaagtctgtggtttccacgcctgctacgagctctgccaccacctcgacttatcccgcttccaacgccgcgaccacatcgaccacatgtgcggcaggttcttgggcttgcaacggatcagtcctccaacaatgcgtgaacggtcgtctgatgaacctcacggattgtgctctccaggcaggcacagtttgcaactcggccacaccggtgggttgtgtgtggccctggcaggcgacgagcgctcgcaagcgggatgccgtcggccgtgttcccagaggacacggaggcgacagaagagtggttcatggcaagaggagggcaagaactcactaatgttgaagtggtccttgcctttttttccttctgtttcttttctttctcttttctttcgcatgcattcaaattgagggaaagggagaatggacgatataaaggagcagaaagggaacctaacgagcaatgttttcttccttagttactctcaatgtcccctcatcgtttttgctgtccttttcctcaaatctacctttacgtccagtccagcctctgctgatagtcggaatcagaaatcgagcggaacaagagaatactcaccgacttgaagagcaggttctctataaactccagcggttccattctccttcttcctcttcttctcttgttacctttatactttgtctctttggcattttgaatcatatagcattacttttgctcttttattatcgttatttttatcacctcttatccaattcggcctcaggacatatcgcatatcacccctactcactctattcaatgacggaacgtgtttatctctctcatctctctctctctctctctctc

SEQ ID NO: 1489 - DNA, 4933 bp, Xanthophyllomyces dendrorhous
tctctctctctctctctctctttcttctcgtccagctttgaatcgtgttgatgccaatgagggacgatgatacgacatggtacgatctgaatatgaatatgcatttgtgtattgattttactgagcgcgcaaccgagtcaagtcaagcacgattcctccagactattgaaacaaaaaatcaacacgtcagcgagggaaaaggcaaagagagcagaggcacgaaagtaaagaacccacagtgctcgaagtgatatccttgtaattgatcaagggtctggggagacaaccgacccgcaaaccgtcagacgaagagaattcgatcagtctctcatcctcattagaaagtatgtcggccacccatggtgtatccagggttatcagaacactggatgaaccgggaactcacatgctgaacttgatggctgtcgagacgactctttgaatttcttccgtcctgtgaaagccatgaccgatgtagagatccaagatggttgatcagggtcagggtgagtacaaacctgaatgagatgagcaacgaatgtcgaagacgaacctgagagctcggacgacgacagtagggtttttatatcctaacatttcccaaccgccaaagattaagcctctgtgttctctcatccacacaaaagggaagaaccgaggagaaagcaaacgaaccgggtccagcaggctgaacgaccacatcatcctcccttcccagtgtcctgaagaatgatctcagttcttctatcccttttgtcaacccatctggctcgatcaggtgtcctcctgctgcctgctcggctgctcgcttcttcaaagccgcatacggcgaagccggagccgaacttgccgcccctgtggaatagggtgaagaggtcgctccatcatcagcggtaggaggacgaggggccttgcttccgataaggattccggttgagaatccaagaagagtgagtccaaacatgatcgtctttatgctcaacggggtcgcccgaagaatgtccagtcgattttttgtctcgtttgatgatggcagggggacatgaggcacagatcgagatgtcggcggatgggcgtaagatctacgtgcgacagctcccaggcgacttgagtggagaggaagagctcgagagagaacgttcatcgtttggccgagattggtgatggaaggtgatgatgatgatgatgaagagagaagccagacggaagaaggccaggtaaaggaggatgtgtgtagtcacgtgacctcacgatgggatcttgctcacttggctttctcgtcgtgttcagagtcagtggcaaggcatgttcggcctagagttgagccaagcaaaggaggaaggattatagaatggataaaagagacatgttcatcgttcaacggccaaagagaccctttccaactttttccacacaccgcagcgtcagactgatccgtttcatccgcttgaccccgctggagtgatcaccctcggtcgtttccggtttgaacgcttgctgaacgtcccacgagccttcatccggtgcatctagcccgacgagatgtctgatggattgaccaccgaggagatgcttgttggcgaggatcggggcgaccgccttgaaatcatccgtgtatgcatgggagatcgagtgcttccactcagtgtatggcgcgtgttggagaatgagaagtgagcggggttcaagcagaatcgggattgcaggacgcgtcaaggtagctacttctgaagcgagcgagctggccgaagaagagggagtggacggaaccagaggagtggacggaaccagaggagtggagggcgggtgaagccagaggatacacggccagagtagagatatcgtcgtggtagtcgggtagctagatggaaaagtattggtgtgagctcggtgcgatcgaaaagatggagaatcaaacttggcgctcactatgctggtccatcggtgtgaggctgaaaagaaaggaagatgaacagagactcagcactgggcaagtcttctcatcaatgagatcaggaataatgaatcgtacgtcgataccctgtccgggaagatactcgttgacgagtacttggttaggctttccaatctttgcaccttcaaaggcgcctgtagatttgaccttggagatcaaatcggggctacaaagcgaaagagcaaaagggttcagtcggaagatcagacatcgggatgaaagagagcggagagaagcctcacaactgagtgaaaaacggagggagtggctccggaatgagtgtgtttgactttgtgagaatgccgcctagaaagagagttgaaaacagatcagtctgagtggacatgtatctgaggagcgagtgagatctttgatagcatacgaaccccagtgctgtagcctttagatcctgggtgagaagattgatgggggaacgagtaagtccatctgcgcgatcgaacgtaacgggtgtggcagacatgctgaccttcgacctgtgggcaccgtcttccacttcggcaaagcactctgatcgatctgaaggtagcatcgattggaaagactctcactcgtcagcatggagatcgagcgagaactcggatagcgagagacagaccttgttgaccagatgatcttcttcagccggggtgatgaattctggaatatagtacactgcatctgggaacgcatccagcctgtttgcctgtatgtcctccatggtatgtgtatgtgtatgtgtatgtgtgtatgtgcgtacgcgtgctgctgatgatggaggtggtggttggtggtggaagagagtgagtctcgctggatggcatggaaaacccaaagagttcaatctttcttctttcagctgtactctccagcctttctcctcatcgaccgtcacatgtagtagcaacctcagcgaggactctgttgtatacgcttggtctcttgtgttgaatgtctgagcgccgtacgatctgactctcggtgttcatcagaggactcgtgcccacacatgctgctctttcccgcccgatcgtgtagttagccatcgagaaacaaacacccaatgatgatcgcatcctccacatacccactctcctcctcctgctccttctcctaggcgacgagcgatgcacgctgccttgcagtatcagagccatcgtcaaagcgcaggtggtggccaaaaaaattcgccgcttacgcgcttacttctttccgtccgctcagttttcatctttttctaccaacgacgatcatcaacagaacagagagacagagtctttcctcgatcgttcttccttggctctacatcactttccacagaccatgttgatcaccgcgagatcctccttcagatcagtcgtgccgagagctctgcgacagacgaggccagcctctttgctcacgacaaccatccagaatgctcttcccgaaggcctgaaaccgtccggcctgccgaaactggagtcccctctgtccctcctccagacagagctatcgtctctccagtcgaacatctctcatctgctaggctctggtcatccttcgcttgacagcgtcgcaaagtattacttccaggcagagggcaagaacgtccggccaaagatcgttctcctcatggcccaagccacgaatgggctcggctcaaactggcaagaggtcgcttcgaaggatccgaacgaggttgaccgatggctcactcagcgggatgacgtcctgaacgattacaatcctggcatgccagagtccacacggagcttccagaacgttttcatcccttcgtcttcatcgtcaccccgagcgggccttcattcgtcacttaactctccgcttcgtcgctcgccttcgtctcccgcccactccgtccacctgccgtccggcccgttggcttcgttagctctagcagacccgacaatacttcttcccacccagaaacgactggcagagatcacagagatgattcatgtggcttccctcctacacgatgatgtgattgatgtttctcccaccaggcgaggagcaccttcagcacccaatcttttcggcaacaaggtctccatcctaggtggtgatttcttgctcggtagagcctcagccgcgctagccagattgggctcgcccgaggtagtcgagttgctctcgaccgtgatcgcgaatctggtggaaggtgagatgatgcaactcaaggcgacacaagaacctgagaggtcgccgaccgccgagggtttcgacaagtacatgcaaaagacctatctcaaaacggccagtctgatggccaagagcgccagagccagtgtcattcttggtggagccgaatgtgatgaagagcttaaggatgtcgcatatgcctacgggcgaaacctcggaatcgctttccaggtaagcagtcggaaattcgttttttctttcttcttctttgtctcctcacgctctttctatcgtcccaatcgagattagacaaaccaacacaagggcttctctgatccgatcttgcctcttatgcttttgtttattcatttttgtatattcattcgaatgtacatctatcgtcctccacccacagcttgtagacgatctcttggatttcacacccaccccgtcaaccacgatgggaaaaccgtcatccggatttgatctctcgctcggcctagctaccgctcctctcctttatgcctgggagtccaacccgtcgttgacgccgttgatcagacgaggattctccgagccgggtgatgtccctaccgccagagatctcgtcctcgcttcggatggaatggaccgaacgagaaagttggcgcgagagtacgcggaaggagcgagggatttgatcagggatagattgccagagagtgaggccagagccggtctggaggatttgaccgagcaagttttgaagagatgcaaatagatctttagagtttttcttttccttccctcattctttccattctttccctcctcccc

SEQ ID NO: 1490 - DNA, 8298 bp, Xanthophyllomyces dendrorhous
atggaacgagaagaaaaaggaataacacaagagagaaaagaaaagaaaaaccaagaaaagagcatcatatcgttacaaacataggagacggccattgccagtcggaaaatgtatcaatccccagggatcaagaacgctgaatgtcttctgaaggtctgctcgttgatccttcccgcaccaagagcgaatcgtcctctgtctcgccctggtcgttctgaactttctgtccgggtcctgttttcgatacctgttctaccggtggcatagtcacagtccccgaaggattcaccagtgtcccccgcggtagttgaggcgacacaggttgcgaccttggtgacgatacttgagagagcccaccgatcgtgggtgtagtcccaccgcttctaccccgtgttcgcgctcgtggccgcgtaaccatcggtggtggcgctggtggaagcaaatgatatttatactgttttcgtagagcggtgagcggtgcgcttcagtgtcaggagagggttatgtgtgcgttcaaaaaggaaagagcgagatagaaggaacaagacgaacagatttgtatgttgtgtagagaaacgcgatggacgaaatgatctatattgaataaataaaaaacatgacagggcgtccagtcagtcgtctataaagagaacgaggaagagaaaggggagagtgagaaggcgaaaccagatacatagacgaaccgcaaagacaagaccactccaatggataaacatgatgccctcttgattctcaaaaatcgcccataggacatatgtctttttgattcgttcgtccaaatcaacccgttgatcgattgacgtcagtctcatttgtaacagttagaacacacaggcaggtgttgacatatgagaagagaaacgacaacgaacaagaacagcgcaaccggcaaggtcacccgcttcagaggcaaacgcataacctattgaggtgagcgtcaagaataatctaatccccgctcatctgacgatcagtctcactctgttctacatcatttcctcggggacaaagaatgaggaaaagggcaagagaagactcacagagctaaccagacaaatactctggtccatgcacccgcgtgttctttgtgtacatcctttccaaatgcctggaagaacgtgagtaccatgaggactatactccatgcatgctgtcatttcctccccccacaaggcaagcgtgaagcaccatccagaaagcatcagcctcgtccgtcactcgggagttaggacaaagaaaacaaaggggccagagaaaagagagtaaccacaaacatatagagagaacggaagaagtatcgtcacttcgagcagcttgatttcgaactttgtcggttcaggtacgatccgttttctggttcggatgaggtagaatatcgaagacactaggagccagtacagcaaaagaaggcatagagaacgtaacctttcaagtttaaagagcaagtcccagcgtttacctcgaaattcgaatacaggagtatatacataccagtggagagcaaggccaccgagaggaggaatgcaaggatataccactttctgatttgaaagtacagatacgcctgtgacattcgttcaaaacaacatgccaaagagaaacaaaaaggttctcaggtctatctctcatgtccgagcagcatagagcaaatccgagggtcagaaagaacgaaagttcacttacagcactgatcacaccgaccgagacgaatctccatcggatgctatccacaaccaacgactgtgccctcgggaagaactggacgacggtataacctatgagaagtatatggatcactggcctgtatccataacaagttttcagaaaacaagaatattgagaaacttggtttaatcagatctgcagaacggaagaactcagagctcatcgagtccttgtttatctggcggagacctccgaaggtcaagacggcccaacgtctcccaaggaaagcagaaagaaggataaaagagaacgtaccagacccagaacgcgtatttcccaggcgtaagataagtctccttcggtggatattccggtttgtacgaaaactagcaaagtcgagatcagacggccatcagtgacgcgtccgaatcctgccgtgtagatacaagagagaaagagagaaggaaacagagcgggaaggaaaaggaggaagcaaccgacagagttccagatgtgaaatacgacaagcgaccaatatacgatcgagtttgacagcttcaggggaagctgatagcgaagatctgcgagttccatccgctttagatgtatgatcgaacgggatgaggtggttggtgagtggttagatggatggacgatcgttgaaacgagctgatgatgtttgatcttagatcagataaaaatacaaacgtttcttcttgtcgtcaagcctttattttaacttttatttccgtttctctatcgtctttcttctttcgtatctctcttgccatgtttgggtttgctccctgcgtgcatgtccacaaaggaccgtgttttgagtttgaaagtacatgtgtgacatctagaattcattctaataattactggtcagactacatctcttgccactcaaactctcctaccagtgctgttttacttggcagtcgacccatatttgggctcaagatggtaaaccgttttcgagggatatcaatgtttgttctgcaaaagagatcagaaggaagtaaatggagaacaacagacaatgacacatcgaacagacatcagtcaatccatccaacgaaagaattagacgagagaaaagtacatacacgacgacatagccgatgatttcactcttcgcgagctcctctcccatgtcaccttcgacgaccgtttcagctgctaccgtgccctcctcatcctcctccttcacttttgcagattcattgttggcgacagctgtggacgcggatccgttctgcacgatcgacgctggcggcttgatgagcgcgaggacgacattcagcaggtgagactctttagcaggcaatgtggggtcgactttcaccagctgagtctcggagatcgaccgggtcgaaccaataggcaaagccgaagagggagcgatgtattcttcaccgacacgccagatggagaggtcctcaaatttgacggttgtactatgcggacttagaccaagcggattcatcgctgtagcgcctggcagagcaaggagggaaggtgttgagggagggtcgccatagaagtaggattttatttgaagggcttgtgatcggactcgatgggatctatccaggtcaacaacctagaacgaggtaaaagtgagaaagagagagacgggatgaaccatggaaaagaaatagaacatatgaatatatctagctttggctgaaagaagatacgaataaacatacaccggccgattttgaaagtttgacgatcttgatgcgcgagtttgggccaccgaacatgcgttgcatttccatatgtagcttttcatgcccgatgacaaggaggatgttgactgagttagagaagcagaacaagaaagatggtcttaggatgtcaactgaggaggcgtggtttgagagctctaaggaatcttacttttgaacgcgtcaacagcctccctgacgaacgtgtacttttcttttttgtcgccgtcttcggtctttcccaaattggcatcgacaaatttcccgttggtgtcgacgattaaacctgcgctcgccagcggcttgtttccttttcttcgggtctcccatttctcacccatgtcttgaaccagttgttgccacagcctggatctgcctggttgaccgggggtctgatagccgtaccaccaggataaaggcagcagagtagaggaaagagacggtggtggacctgttggtagaggagaaccgaatgtttgagctggggtcgaggttggaagtggatgggctatcggtgtgagagatagtgcgcctggcggagagtgggggccctttttatgttgtttcggatgattgacagaggacggaggagaaaagatggaagaaatcaggatgtaagtagaatgatagaggttgagcaaacacactgattgaacccacctctgagggatccaggttgacaaataacgggctggattctctgcctgcacgaacggtccagttgatcaacgtcttacagaccgtggtcttgccacttccttccggcccgagaaccatcaatctcggactgtcctctagttccggatccatccattcggatgcttctgcctctgctcgttctgcaggtgaggcctgcttgagcgttctcgcccggttggtctgatatctgtgcgctcgaagtcgttggccttcgagagcgaggtgtaggttggagagagcggggaaggttgtctcgtgggagacgtactctgtcgagggagtgcctgctatgtaaaagatccgaatttccatcgatggaacagcatgtcagcctgagatgatacaaaggcctgtttgcgaaaggagagtgactcatctccagttgacaaccttcccaggtgaagacagctgctttgcactcggccatgaaatggtaccatctgtttggtgcgatttccgctccaaatatctccgcctgtccttgagtgagctatttatgagcaaaaaggaggtgagagatcagtacttgtgagtacagacgggtgtgtacacatgggtatatgcgggtgtaagtgtcacagacaggatggacagaacggaggtacaaagcgacggccatcatctgacgaaactctgccaatccggactcacttggatagcgatgaattcggcctgttctaattcaaacctatattctgactggggttctaatgtccatgtctgtgaggacggagcattggccaagatgttcatccagaggtttgactgatggtgatgatgatggtggtggtggtagtcgtggtgacgggtggaggtgacagggaaaactgaatagacaagatttgtagtcgggcattagagaaagcatgtagatttttgtaatgtgctgaaacactacaaacttcgggcggcttcattagggaatttctgtaatcttaatacggaatcgcaaatcgtcattctcactacgaacctttgtaatgctgcactacgaaaggccgcctaatggaacaataggaaatagtctgtagctcctcactacaaacgagccgtgttttttctaatgcgactttccatctgtcttctcatcaacaacggcaaacaagaacatcacgacaacgacgacgacgacgacgatagcaacaacaacgaccaacacaatccacttccgttctcttccatctcttcttcgttctcccaagtcacaggaaagaagaagaggtcactctcagggagcgttccttccgagtcttcagtcttgaatctcccataaaggatagagatagaccatgacacatgcgttactgtaagcccacacgctttctctcagcgatcccagggctgagaacgggttggttgacatatcaaatcgctgatcctgcttccctgtcgtgtctcgggctgtcaaactttaggcttcgactgtttctctctccgttcttcagcgtgcatgttgcaattcaatacctcaagtcctatccgggcaacatcgggatcactcattaccttacttccagactccgccagatgcattcccgagatgtcgagttttattggccccaactctggcaagtgtttatcagcatcttagaaagacattagcatagacagttttcctctgttctggctcccctttgggagatccttcagtgaaccatctgcatcatgtttatcgtttgaaagctaacctcgtcctctccctcttgctcttctctccgtcgcccttcctcctcttgtcttgggaccatctcatcagtcacctgttggtaacacaaccaactgattcagttgccttggaatgtttcattctcgaacgagccgaggaaagtactcattcggccatgctggtaagttgagcttcgtttctccgtctctcttactcctacgcgcttctgacttccggcgcgtcgtcctttcttccccatctatagaccttttggttcatgcaggcagcactgtgtgattttgcattgaccagaacgacaaatcctacctcgttcaacatctgccaacgggtccttctcagatgccatgacattattttcggcgatcctcccttgccaatcctgccatcgacctcgtccgacccctcctcgtcctcttttggcaaacgatcaccttacagcaacgaccgctcatctagagttagcagtaaacattcctctaagccatcgcgttcagaaaccatcctagaaaagtcaacaaacgcgttcaacgtcctgctcggcaagatcggaccgcctaataaactcattcccgggcacatcggagcggccgtcgtcggcatgggtatcattgcggcttcttccccaggtgtgggcacgctaggtcttgtcgagagcgtagggagagttgttatctcccaaggacgagtggactaccagcgtgattctggagtcaaacccaagtttgaagtcctcgatcccaacgccgaccgagacgatagcgagtctgacaatcttgatgcgaaagacaacggaacaggtcaaagctctgagttgcatgcagcgtatataaacaaagagcgagaaagcaactcgagtgatgaagagctctggtctggcggacagacttcaaaaacttctggaccgtccacgccttctgccgcttcggctacgaccccttcgctaccgatcgcgcccttccttctcagacaaaacacggtcgacccgctcgaccaactctctagcccatccccctcgtcttcctcttccaccagcacagtgactccggccattttcgcaaaaggcagatctccctttgctccctcagagtcctcgttgccaacttctatgagaggacagaacagacatcttaacccttctcattcgtctccctcgctatcctcctcaaatagaaatcaatttctctctacatccagtcatccgactggcaggctttccactgatgtccttcattcccactcctccttcgcagcatctcgtctctcattggacccagcattcgtcctaagtactctgccgaaagacgaccaaaccaagcttctcagatctcactactgtcgatccgaagtcaggtttctgttgacactagaagaaatctgcaacaggctgttggtcgttcccaagttggccagagtaagtgcgttgagagcagaactgacgagtttgaaccatctgttgccggccgaggtttgtatcacgacatttttttcctcaattcattcagtcttcatatgccattgaaactgatcccttcgttctttttggctctatctaggtgtgcatgccaacgtggtgcgaggcggaccacgcgcacgaacaaggtggggagacctcgtccggaaacgatcactccgcccgtcaagacagtgctcccaaaccgaaagcgcatcatcgagtcgtccggatatcgccaggcgactcggttgtcctgaactctgcagaaaaagcaccctatcttatccatgtcgaggtccttgtcggtgatcttgatttcgatccagagaaagtcaagaacagagatctgttgaaacggatcgtaggggaaagaatcaagaaccaggagtctgcatgctcctctggacctggcggcatagatatgacgacaaagaagaaagaaggacctcaatcaagtctagggtttggaggcgccaggttggaccctctggtcggaatccattctgggctcgacagaggaaacggtccgatccaatcgctcgcttcctccattcctagttcagaatctcccatcttgaacaccaacttgtacgatgcttcaactgaagccgaagacgaatctgacatcgcaggcggattctcttcacgtcctccacttaacccaaccgagcttgaccggcctatggacgagatggatcttgtcgaacagatctacggaaccgagctttccgcgaaagacatcgatccgtatctagaggaaagaatgccggcggatctaaatccgagaaacaaggcaatcgatttagccgtctggtctggattgcccaccgatccaaaactgatgcgcagaagtggatctgatttgacgcctggaacaaattcgccttctttagcgtcaacgctcgaaacaggggacccattctctactgcctctcatctgcccaccaggcgaaatctcaccttggacgattattcggatagaatgcgcacagcagccatcatgctcgcccagcttaacgctaactctaccagag

SEQ ID NO: 1491 - DNA, 28197 bp, Xanthophyllomyces dendrorhous
accgccaccgccgcccccaacagcatcatcatcaattgacctttcactaagcagacagaacacaaactcgagcacaagcacaggaggtagaaactggttgccgggagctagatggattgcttcgaatttccctacaccaaatctttcatctgtcgctccaaccggcacggcgtcttctggatcaggtgtgggaaggcagagctcaccaccacctgcgggtgtaccaatagaacagccaaggaagaggttacctccggccgaggcggaagccatcagagaaagaatcatggcagagatgttggcgctagaggaagaaagggtggacaggatgacagagaaagcagtgggcagtggaggatcgaatggcgttggctcagtcagccagacatctgtaggagggaagatggaggatgaagggatattaaaagccgttttagagaaagctgatccgtccggtgagtatcagcttcttttctcattcggtcgtaggcgggacataacttcaacacgctcatcatatctctcggcttgtctaaacagcggcggtatttagtgaatcctgggcggcgaagaaagcaagaataagagcttcttctccttggggtcatttggcatcatgggatgttagtcttctttcgtatctcattcttgagaagagtctctatgactgaacaatgccttctttttcgactggtctctcaggtattgtctgtgattgtcaaaacaggggcagatcttagacaggaacagttggcgactcagttgatcgaacgattcatgggcatctggaaggaggagaagtcttcgtgttgggttcgttagtaagtcgataatctcttaagttttcaagcccacgttctctcttttttcctttctctctctctcttcttcgctgcttagatgagccttccagacgtcaagccaaatacagatctttggactgatgcatcctttccatcgacggctgattgaatagctttcggatcctcatcactggtgacacgtcaggtctggtagagactataacggactcggtgtctgtacattcgattaagaaagcggagtatggaagacgagttgctagaggaagtactatcaatcatgttagcttgctggatcatttcgtaaacgtcagtccgagcccatttctgtccaaaacactttacatatacttctggatcatgccgtggtttcattgagtttactgactcgtggtaaatcatgtgtatgtttcaggtttatggagacccgtcttcagcgtcgttcgctagagcacaacgcaatttcatcaaatctgttgctggtaaatacttgactctctttgtttctttccttcctgaacaccgttcccgattgacagatgctgagcggtgtttgcatcattccgctgtctatatctgccaacaataggagcatcggtcgtcacgtatctcctccaaattaaagatcgacataacggaaatatcctgatcgatagagacggccactgcatccatatcgacttcggtttcatgttgtctaatagtcctggaaatatgggcttcgaagctgctcctttcaagtttactacggttcgtgttctttgtaatctcacctgttaccttgtcgagggtactttggtcctgatcacatacctcaactcttctcgcattcaggaatacctggacatcatgggaggtatcggaagtcctgggtttgctctcttcaaaaaactcttcaaagaagggttcgaggctgctcggaaacactcagacgagattatcagttcgttctccatctcaacaaaaacgttcactatatgaacacagaatttgtatcctgacgctcactcgcttgtcaattgttttcgaacgataaacagctattgttgagttgatgcaatataagtcgaaacttccttgctttgaagcgttcggcgatcaaactgctcagcatcttcgagaaaggttccagttaggactgactcaacaagcggtggacgatcatctggagaaattgatcgtcagttcgattgggtcgtattatactaggttgtatgattcggtaagcatcttctttctctttcgagacagttttcgagtagcaaagatggtctctaataagggtcttatctgatcgtatattgtgtttgctttgcggtttttagttccaatggctcagtcaatccgtattccaatgattcctctcctgccctctcttgctgctctcaacttccggtagtgctgccaatgtttacatcagctttgattatagattttttgttcacctgtattttcttcaccacaagtttgttttattcaagttttacttttttgcatgataaccatgttctctctcattctcgtatatctcacatcttttcatactattcatttcggatcgccatacggttgaactatcatgacgatgatacaaacggatctgtgttctcccttttctctccactggctcaatcgaagtgaatatcttttcctcagctaggtctaagtttacaaatcatttaaatcaacatgggtatcgtcgaatccattctcgaagatgagaagagaagttcttgatggaaaacagatagaacaaaattagaaacaaagagcgaagtgagatatgcattgagggtagatatagtgcattctggaaacgaaaaaaaagaaacagggaagagatatagcatcatctatctgcctaaaaccgccaactctagcttcttcagtgaagccttcaaactcttcccatccttgttgcatttctccgtcagatactgcgacatctccagtctgatagcagctagttcatcgacaataggtaacgtcgggttgaacgatttgggattgagcagaagatcgaacaaccttgtccagatatccgtttgccagtactacagtagcacgcggagaggaggaaagaggcgataacatggatgagaacaggttatgaaatcagaagagaagatatatagaaggactcactcgtttcagaggagtcgaaatcttgtatcgcttttccaccgtacttgtagagattaaggtggtttctatatatttgcctgtacaacagaaagtccagatacacaagagcgtggatgaaagagcatgaggacaagaaagatcagtcagaatacagcaaaacctatttcagagaagggatgtctctgcaagggaaagggacgactgaccaaagagcatgcagtagaacacgctggccaaaccgtggtaatctgtttggaacgtccacggtctagcctctctcatctccgcacaatctctctgatcaacctgccattcagccatgaacgtttggtctttttggaacaagcgcctgtcaattgctcttccaaagtcaatcaatctgacgcccttggaagaccatccgtcaaccccgtcaggatcgtactgactggaccaagcattcggtccaccgggcacatcgtctaaccgcagcatgcaattatcgattttaagatctccgtgaatgatgtcgactcgatgcagagcttcgacaagcttgagaagctcgacagcaaagaagatcgcaagaagctcatccaacccggcaggaccgcccgatgtagcaggagcgacgccaaaagcagcggcgttgttgacggtgtcgagcaaggtgccttgagaggagtagtcaagcacgaggtaagattcatctcgatagacgtacagacctcgtgtagaaataacagatgggtgcagactagaaggaagtcgagtccgaatgcgatcgaggacgagaccttcccagatcgaggctggtttctcgacctttagcgcaaccatcatctgctctccttcgtcttcgttcaaagaaaagatgtccaatggtttgttggtcaaagccaagaagaccgacccaaacccaccttctccaattttgtctcggacgtcgaaagtctcgtccccaagaacgactgaaccaaacaccgcaccatccttatcagcgccactcttgttgctgccgacactggctcttctgacgcgctgcttggctgtcttttgtagttgatctagtcgatccatcacaattgtcgatagatcgtggaatccgggtagagaactcaacgggggttcaatcgacctcagaaagctagcgataatttcttcgtctagagggttgcatgggttctggaagttttccgagccggggattccaaaaaccggctcagcgggaggcgtatctgattggagggacaatccgaacatatcatcctccataaagtttgtcttgggccttgattcttctagcagcggtggttgaagagataaacccaataaatccccctcgaccccttgaggttcgtcaatcgattgactaccagggattaacgcgtgcgccatcgtttcctcctcttcctcctccgcaatatcgaataagaggccctgagcagggataggcgagaacgattcatagtcaggttcggggaccaacatgatcggaggttcctcgtccgaattatcatcctcgtcatcatctgaatcatcatcctcgtcactgatgttgccggcattgaacatggacatgacatcgtccatggcagctttagtgttgattgtaggtgatggccgattaggacgaatcttggcaggaggcggaggtggaggggtcgatggggccagtgaaaccgataaaggcgatgaggctgatggggcagccaaagtcgtagctgaagtttcaaatataggtggagcagaagtatcaaacacaggagaagcaggagcagctgacttcacaggtagatcggcaggagagttaaattccactgaaggttcagcctcatcttcagatgtagtgtcaaataccgtcctcatctctggttcggcgaccagcatactttcaggtgcggattctgtttcaggttctgggttaagatttggtaccatctctactgaaggctcgacctcttgctcctgtgtttgaatctgaagttcgaacatcggtggggtctcttcatgccgagaatcaaccggagaagtagtgcgcggtggggtaggcgcagaaattacaggggatggagaaacgggaacatcatcgtaagcgttagctggctgaggtgttgtagaagtggaagttgagggagcagaagtaggagtcaaaaccgagccgagttcaatcacaggtagcggcgaggaagatggaagaggagttggtgaagatgggagctgagcctgttctacaaaaaattcgggttctggttctgattttggttctggttctaatcttggctctgtcacagagcttgacttgttaggagtagacggtggtgtctcgtctcggaagatagttaaacgcttggacgacgtctgaggtaccggcgatgacggctgagcagcggtctcaacgatcggctctggagcgggttctgagactggttctggggctggttctggaggacattcgccttgaactgaagagggcacgatatgttgaacaaaatgggagaatatcaatagtgaagacacaacaataatacacccgatgccactacggaccttgcttaacccaatagtccctccccaaacctagaagtcccattcgtctggctcgtatctcctcaaatgtccactcttttccatccctgtaaacttcgtcccaacagaattttctactctctggcttgcctgccttattcaacggggcggtcctgtctgggacttcccacttagtgaatcgagagagatagccagtcgacgaccccaccacggtttttaacgatggctttcgagattgcgttgtagatggcatcgtggatggaattgatactggagcagggaccggagcaggcgcaggcgcagagggaccaacggcgtaacgagagctcgacggtgccggggttgaccgcatgtttcgaagaggatctcttgaaagagccttccattcaggaagagcatctgaccggggatgaagagagaacacatcgtcagaggcttggtgagtgtttgatgtggcgggcgcgctggtatcctgctacccggaaaatttgatgaatgagtacagaaaaatattaggttttgctattctttgacgatcaaaaatttgttcgaactaaaggaaagaggtcgtttgcgcacctcgtctctgaagatttcgatcccaccaaaccctctttccatcttcttccccaagacaggtagcgcacccgctcggttccaaggcacactttctctttcattttcctttctgcctacatccctcgtaccgagctctccgttccatcctgacctgtcatcctcagccggttcatccccaccgtctacaaagattgccattgcatttttcttcccgttttctttagaagaactacccattgcccctccggcagatgctgatagtgtcccgagggcagttcgactcgtagtggacgacgacgatgaagcagaggtcgtggaaggatcgccagtaggcagccgggattgatagtccttgtttcgaactttgaaagcctcgtaccgattttttatgtgtaagagtggtttggctcttctagcgattccaagttgaagagttgactctgcttgggagtatctgtagtcggttgagacacaaagaggaaagcaatggtgagaaaaagcagcgcaattatggatgagagagaggatggactgtgaactttgacagaaacgccattgacaaactgaccttcccatggcctccaagacttctgcgtagatctcgtaaagtctggcccaatcagtcccaatttctctgtcgagcataaattcgaaaacgtcctgctgtctctcgactagagaagcgtagcagatccatagatctagataacgtttttcctgatgaaacatgtcgtcggagagtagggaggatgtgcatcgttcaagaagaggaacaagaatcgacgcgttgtttcgaccggatggatcaagagttcgaagccgagcaatatacctgggagttttttggccgatgggatgcttgtttctcgtcaaactctgcaagatatcagagcgatcttaacagaagataaagtagcacgaaccgttcatagacactcaacggatcagccgacatggaatctaatgggtttcccaaaccatcgacttcctcaccctccgcttccttcctcctcctctcctcgacctctgccaactcagtctcgaaagcctctttggcctctttgagctctgcttctacctgctttctcttggtaccaaactgtgtggccatagcatgtgcggatctaccgatggataatggttgaatgttttctttttgagcttcgatcgctgtaaaatcagtgacgggcgtggcagccggatgatcttgtgcttgggattgcccagatcccctagcaggcgtcacatctacctgcatggtttttagttgatcgttcgggttttagccttaacggattagagtatcgtttgtggttgtgattgcaagagagaggtggaagcgtttcgttcgttcgctcgctcggttgctcctggaatgttttgttttgctctctcggtcaccagaaaatcagtcgcgtcttacgtaatctgacggaaagacatgacttattatacaaacaacatcatagtacacccaaaacttgtacaggagagaagcgaacaacatggttgtacaacatgatggaacaaaatcaagatcgggctatggtataggaagtgaacgacggagggcaagttgtgcagaagatcaagcatctccggcttgtgcaccgatcgggtttccctcgacgtcgaccttccggcgcttctgaagataaatgttgataaccacggctatagccgccgtggtgatgactataaaagttaagcaagatgtcaatcagtcatctcaagctattttgtaagagaagaattcagtgtggaagatgggaagaaacaaagaactaacaagcggtggtgcatccaaacccgatgggatactgaggcccattagtactaggccaaatgtacgatccgtaaattgacgcgctattacccagcccattaatcaatgcaattgagatctagtacatccacggacgcaaaaatttgagaggacaaagaggagtcaagtcagattagcacatgtgtcttgaagagaacaaactgagaagaattgaacgaacagctcgactctctctatcggggaagttctgcagagcgtaggataggaacaatgggcaagcactccacactccactggctccaaggataactgttttgccaaaaccccagtcagctggttagttttgtacttcaatcttcctttgccaatgttcgatagaggaaaccagatgagaactgactgaaagcgtatcggactgcagacgtcttgaccacggccaccacgatgaaacacatcgctgcccacatgcagcaccccatgatactgttcacattcaagacaaaccgggaaatagtttagcaaagccatattttcgcatgtatttatattttgtaagaggatagaaagatagaacacactggaaaggcttctcgttgaacttgtctgcgctgaatccgacagtgatagaacaaaccaagacgacggagtaaatagggactgtgtaataattcgcctaatcatcatgatcgagaaattgagagagagagaggtgagtaatgttcttgctaatgagcgagaaaggggcccaaagatcataccatgactccggtatgtccaagagtcgtcatcagcgtggggactttaatgtccaaacgaacacaggtcaacttcagtctcaaaggaacttggacgcatggtatggaagacaactcacagaagtaactgattgttccagcgcccataatgcccctgtattgatcgattacaagaacaaaaaaacgggttagttaatatttaaagaggttcgacgagattgggtgatgatttccaattgatgagacttgcatgtatccctgttgatatacgcgcaaacttcagctgagaatacaatagggattgccaagcaggcccagaacgtaaaaacttgaacgtaccaaggcgagcaaccaagttttgtaactcttgactgccttaaggaaagcttgcatgtgggatagcgacggggcatcggattcttctgtcttgagtctctccacggcgagttgtctttcttcctcgttaaggaacggtgtgttgtgtgggaagtcgggtaaaacgaagaacgcaatcaaggatacaacaactgtaaagttgacaaattcgaagggttgaggaacggaccaaatttggtgagagaaagagaaagaagaagaggtatacatggacgaaccagtagctaagccttcaactccaaagagccatttccaaccggcaattccggcggtgccgtccatatttccggtaatagcacccgcaaggagacctccgaacgctccggacatcatggcggctgatccattgagaaccaagagatgagaattgtgtgtgatatctgggtcacaaatgagaaagagaaccgaccagagtaaaaaagagctagacgcttcgagatctcgtatggcttgtaccagcctggatcgtgttgtcaagacagaagaaggaaagggtcagcagggagtactagcccagaagaggtagagggcggacagactgacaagacatcaagaaaattactcccggactggtaatccagatgaaaacaaccaagttgatatgataagaattccgttttccgcacatgaaatgaacggagtcgaacagaagaagatatagaagaacgaacaagaaaccagcctcgatgataccgaggcagaatcggagagcgaccaaacctgagtatgagttgatacccatggctgagacagtcatccctccccagataaacatgattcctggtaagaagatcgatggccttgaccgggaaaggatcatgttggatgggacctctgatttgaagtgaggaactatcaggattatgatctgtgagaagaggcgaaagatgactgaggatacataccagcgacgagataaccaacaaactgcgacacaaaaggatccaggataatagtcaacactcataccggtagcagacaaacagaaagacagaaataagattcacaaagatactgagcgctgtggcatacatcgttgtagacaatttcaggtccgttgacattccggcaacctttgcgttcccgatatttgttcgactgagagacaatcccgcatattaaaaaagacatttgaacagtcaggtgaagatgatctaaaaacatctcaagggaagagaaaaagaggaagagggactcactcgatataattcaaaacatacatcacccagaacatcggcatcaaccgtttatcgatctggcagactcgcgcaaacgaacaccatttattcagctctatcggaccagggcgcaaattgaaaagatggacagagaaaatcgaaagcacaactcaccttcctgaccagtctcttctcctcctccgacctttcgaggagaaccgactgtcgatcgacagaggcgatatcagaatctgcataatctctctccggatccttctttggatcgctttctagatgctcgatatggaatgtctcttgtttggttttctcgtccatctgtatggtatggatacgggtgtactgtattctgagtgtgtgagagaggggggaacgagtgagtgtgtgcgctgtgtgtatgtgaaaaaggatgagaggggaaaatggaccggatgaagggaaccaaatgaaccagatataagcaagagatgtggacgattaatgattgagcagaacccgatagacgggttgtttccggaggtccaatcagccgatatggaactctcacgagccagccaggtctcaagatcaaactcggatactctccccactgtcggttgtgaggaccggacaagatactagaagagcatcaaaccgaagattaatgacgacgacgacgacgacagcggagaagccattacaattgaccgtctgtagccgacgaataggtgtatgtatgtctatctccgatgtgtgctaaagcatagaaaagaagatcaaggctaacttagggtcgacaagattatcggcctaatgatttgccgattttgccggccgcctgttggcaccgacatgctcagccaaccccatcacacccggtctgggctgtcgcttgttgaagagatgctggatttccgcttcccggcccggtctatagacaaaggtgccaagattgattctgttcaagagatgagaactcactcttgtccatcttctgttaaccgatcatggccgaaaccggatcgatatccagataatgttggttttatccgagaccgcgactggaaagtatgattggacagatatacagaacaaccctacatttaattcatgataagaagtgtctacaaagttccaataatcaagtaacagatgagaacgatatacaagcatacacacacacacacattccatgcaaagaaggtgatgaatccatagcaagcagcttctcgagaacaacccagttcttggatctattcctcggcctcgtcttgactaaactcgtcatcgtctgatgaaccgtccaacagctgtctctccctcaaaagcttaatatcctgagaaagcgagattgaagcatccaatgcgatccttatttcctctttgtttgtttcgcgtggtaattatgaaaaggaaaaaagatgaagacatcagtactttaaggcttcagttgaaaagggaagacttcatcaagagggatttgactcaccacacgtgtgagcgatgccatcccaatactcgccatacttttctaacccactcaacagaaccctcacattggtccagatgctctccaattctcgttccaccttggccgggttaaactcgttagccgtctggacggccaaagagagcagaaggaagcagtagatcgaagtcgtcagaccgcacgcacaaagaggaagcgccttgggaaagcttcctgtaagcgctatcgatgccgcccgatggaggacctgtaaaggaacagaaagccccgagttgtcagtccaatgtcgtgcactaggtcattttctcagaaacaacagaggaaaaacaaaacacacctcaagtcggacgaccgaatgagcagccatcgatattctctccaaactcaacccgggaggaaggacgatgccagctctgtcgaccggaatatccatcgactggccatccgtcgccttgatttcagacaaccgagacaccggcttcaacttttcgttcactccccatggtctgaccttgccaactcttgcacctgtgcctaactctccagctggcgtcttccagcccattatcgatgatgacgacggcgacgacgatgacgacatcatcggtggaccgagcaagacggacggtgtcctgttgttcaaacgcatgcttccggctactgggtttagagacgacgaaggcgaagacagatgggcagggaccaaaacgtccgagtttgtcatcgagttcgagcatgtatgcgattgtgagtatgtctgagagctctgagaggttggcgtgtgggaaggggatgcactggagtcggtccgcaatgtcgaaggcgacgattggcgaccgtaaaaaccgtatggtccagactggtctgccataggttgatatatgatctgttgctgttgctgctgatgatcgaaatgactcgggaatgctgcctccaattgatgttgttgtagctgcgatggatacacctccggctgagctaggtggtgttgttgatgagacatatcaagatgataaaggccctgcccatatgtgtttttcgcttgatacggttcttcttcttcttgaaactgaaatccgggggattcgaacgttttttgcatcgactcaaccggatcagacaacttggagtcgatcaatccgacttcatgtgggccgctgacacctaagactccgtctccgttgttgggtcctccttcatttagaagtcgagaccacatctggctggactgccagaagtcatactcattctggtacactgcaggcggctgaacgagcgcagcggcgatcgagccgttggcgaaccacggcaatgatccatcaacgacgtagcctacattgattacctcggacgattgctcgtatgggaaaacttgagattgatcgttggacgggtattcagattgttgtcgttgataatgatcattatgtagttgcggttgttgttgttgcattaatggcggcgatattaaggactgcgactgttgctgctggtgacgctgctccggaaactgtgatgactgttgtggcaacgtctgctgctgaatgaaactattctcttccgactggacgaacctattcggtgacgtcttctcactggccaacgatgacgatgacttggttgattgtcgatcacttttcgtgctccccgtactccgactactagaaggcttgagcatggtcaacaaagctccgggtcgttgagcgaccgtatttgtcaacgcgctcgatctgtccagactcggaagaccacacattctgagatgatgggacaagcaggccttgggtgattgacctcttgagaataaaacacatgcgcagattgaggagtatgacataccgtttcgagaagaatgcgacttctggtagagcgtttcgacgatgaaggttgatctctgtactacacaactacaaatatataaaaagaaagaattgttcaaaagggtaacagtgagccactctaccgcctctaagccagatgaagttgtgaaaaaaaagaaaagatggagagaagattgactaacgagcatgaccgagttgatctggaacgttcgtaccatatcggcctccggtccctttcctccttttttgagatctccgacgacttttctctcctgctctcttagaataccgagcaccgtgacatccatctcttgcatctctcgttcaagttcttcccgtttggctggagtcaaagtgttttcttgatcgatcggcttgccagcgcgggtcagggtgatctcataagccctgcaaacccgacgaagcgcgtcaaattggttggcccagatctattgaataacaaagagaagaagagaggatgtcaaatcaatactctacgagagcagtatggataagaaggcagattggtcagaagacgaacgtctttgcccaaaggagaaaccgggtaggccaatttgatccgggggtcgaacggactgatcggaatttgcgtagcggccatgacggaagatgtatacatctgaccgaaacatacccagaatgtttgtcggttcatcgctcgatgccattcttgatctgggggaaactctttgtctttatcagactcgttgaggcctacgagagacaagagggagaaaggaggcgtatatgtcagttcatgctcaatcaaatcgcgccggtctacgcgcactatagaagaagaagaaggaaaaggtgagggaaactgccaacctatatcaagcatcaattgaagagttgtattttgtcttaatctcatcatagtgacgttaccctgtgacataagtggacggttaatacagagaaatagaaatcgcaagaaatcaaccaacagaacgatcacatcggcttttttttcattgagcccatgaaaagacaaagaaaaaggacaaaaacgaataggtctactaaccttgtgagcgaattcatacacggtcaacgcgatcaacgcctggatcacctccaacgggacgtcctcatcggtcctgccggcttgttcgatcgcgcgttcggcattcttcaaacatatttctgcccactgctcacagttaccccttcgcatggccttacttcgcttggagagtggatatggatcggctggatgaggccataatgctaagagacagaggcagccgaacaagaaagagctacccgttcgagaagcgggacttatattggatgagggcgattgtcgaagacctttcggtgtcaagtctatcggtccaaagtgggccgccagggttgagaccgagacggtccccggcgggggcaacacaggaaggaagcagtatatatggtcatagtaggcgttgagtctatgagaatacatgacaggggagcttgagtgtgggaaaactattaaagagatgcgtcgctgggaacatgaacgtacacatcctcggtattgcgatagatgagtacgatgttctcgacgggagtatcaacaccatcatcgtcaccggaatcgtcagaaataggttgggcacttgggagacggaaagactgtgaggggaaaaaaagtaaaaggaaagataaagaaaagaggataaggaaagataagccatcgagagtttcagaaatgtaagacctgtcgcttgtcttgctaaataatataatagcccagacaaaacgcgtttacccactttaacgttctcgagtttttccagaaacaccttgagcgggtctggctcctgatctgatttgcgggaagcgcaagagtagacgagccatacgagaagggtcagaaagtcgggtcatgatgaagatcaggttcatagggatcgtagcttgatccgtcagaattgcttactagatggtcgttttctagatccgccgcgtttagatttaacgtattcgcacaatatgttcctcttaacgcactttcaagagaagacgacaagcacggatcacaagtcagggcaaagtagagtggcctagttgtcatacgagaagtatggcggaggtagaaacagatggacctaccccatcgcaaactggctgtttcccatcgcatttggcttttcttcctctacacgccaggcaagctaatagagtttttgagaaacgaagacgaacgttcagtctgcttagttggtctgaaagaggggtcggagtgaataagacagaatatcatggactcgtacagacctgctttgacgggctgcaccctggatctgatggccgatcgaccgtccacagatgataaatcatgagaggtgaaacttgcggtcgagtacggatgggatctatctagcgggtgtgtcatggttgtgtccacacgaacaaagctgactgaacggaagaatatatgtgtgtgtctgaatgtgagagtgtatgtgtgagtgtgtgtttgtatgtagggaacggagagaagggttggatatgcactcgtgagagatctgttgagaagaattaggatgggatgtcttgagtctcaacctggtcgagtgttcataagaatcgttacgttaccgggatggtgagcgagagattgaggggttttcttgtgagaagaggaacagagagctgggtaaacgagtggagggtagaagagagacagcagagagatgagcgcagcatggcctccgaggcacctgcccgccaggatagaacccgcagcgtgaggtgacacaagctttaggattgtccctggcgtttaatgagccctcgtctgaaattgtgccctgtcgatccttgacgaatctccaccattggctgccgggcaaaagtgacgctcacctcttctcccgccggccagccgcagggcgtgtcgaggttgaccgcatggaccgtgcagttccccgaggctagactcggagttgattaagctatcatggttcctgaaccggccccatcgctcgcctgattctccttcgcgctctcatgcctccagttcaatcaccttttcgacctcgtccgtctaccggacggacgaccgaccgaccggagcagtttcggtccgacaggtctgatccgacaaacaatccggcttggttcgaccaggcttgtccgtcgagtcgaccatggcccatttgtatcagttgtggccatcatatgttcacgaaagaattttgaggtgttgtatacccttgagttgagctgaagaattgttgattcaataaggttttacagtacatgatgggacgtgatataagagcaagagccccagacggtcgagtccaactcatgtagggtgagcagaccctgtgggaaagataaagagatccatgaggagaaggaagagaatagcaagcatcggttaagaatatagggtacaacaaaagtctaatctcgtcggtcaacataacgcccttcatagctcgaccctctgcatcgtcctcatcggacgatgtgtccactcgccattcgaccccgacatggtcccttcgttaccttcgacttctcccgactcgtttagctcatcctctccatcagatgacattgcctctcccgatcgcttacgtggacgtgagtcagtcggagacgatgctgacagtgaatgaacacttgctcggtagattggttcatattcctatcaatcagaggtcaacgatcagaataggttgttgcgtccgtatactcccatacacctttgctctagaacgaccgacctttagttgattcaaaaatccctacacacgacataatttgaaacatgttcaaaaccagaatcagccacactatgtatcgtcgtatgcatatatccacgattggctacaaaaagaagagagaggaaagacacggctagaacttacctggttgagactcatacaatatcgcctactctgcacccacctgacagcatcctcgtaactcaactgcttggctaccatcacataccctaccaccacgctcggcgcgagtgagattcccccgttacaatggacaaataccgtccctccacgagagattgcatcgtcaatgaatcgggtcgtctgagggaatatacgtatcaaattttgatcctatactccagaaagccagatgtagtttatcgtggtttgtcagcacagtgggggtaaaggaacctccaaaagagtatcaaaaggcctaacctcatgatcagagatgtccaacgtcaagtaggtgaacctatctggaaatctcggtttcaccagcagagcctccttcttgtccctgatgcacacactgccaagtttccgttcgttcatttagtcgcagagtcaagccaatgtcaacatcaagccgtgtgtatatctggctcaaattagctctacgcttccggaacttctactcacatgtgagttacaccatatcctaaaagcacatctagctgtttggaagtctggaacggtccgaggtatagctgaggtagaatcagttgggcttctcgtcgcatctcgtacctagaccaattgaattatccaccagaaccattcaaaaggtaaggttcaataagaatcagtgaaccaagtttcaatatgtaggatgaaaaaagtgaacaagcaaggggatcttacttccaggtatctatcggttgtccaacagctacgtccggaagaacaggaaacgaagtgttgtaaagtttgtttgtatcggaagaaaccaccgtctgataagaattagctgtcgaggtgctggcccggccgtcgtccatcaggaaatccatgattctattgaatgcagatctgggttacgaagctgcaatgtcacgatttaaagttgctcagatgacgaaagaaaaagactaatgcacaaacgagagacacggaagcgacggatgggatggatggttgtaagtttggatgatggatgtttcaggttttcttatttcttattttcttaccccgaaggcaaaatccatttatctttcatctcacaaagatcgtccgtcgttctgttcttctatcaggggtctctcgcttcgtctcccatgcaagccgctactcaaagacgacgagctcagaagctagcgtccgcgtccgacagactcctcagaccgacatcgacaaacactcctccaccaccgccctcgtctctccgttccggacctctccgatcggctcggctccggctgatttcatccgctttcgtcatcgttgtcgtcgtccttgcatccagactgaaatcctcaacgagcaagattgagagatatgatctaggaataggtcaaggagaatgggttgtcggtcggttcgacgaatcttacgcgctttgtggaggaaaaggcatttggacaggggtcgaggaggagaatgaggagtgcatggtcgttgataagaagatggttgtggatgtggggacctatggtattcaccttccttcctctcctctcaatgcaccaaacacggttattgttctgatgacaccatctaaaatctcggtttttggataatctcataccgaacagatcacgtacgaaggcactggggagatcaggagtcgttaggtccaccgttgagcccttcaagtcaggctcctctatctgttcgaaagcaagggataaaggtctacaagctacctaagggttcatctataactgtatgtctcgccattttcatctcaactctcgatggagagagaaagctgacggttggttctgttcatctgcggacaatagccgggtgagcttcatcttcacatgagatgatcagtctcatacatcgaagtgtgctgtctcatggtcagattgtgcttaatcaacaataaatttcctctttcaaggtttggttgattctcacggtcatatcacagaatacggtgtacgtgtatccattcttctgctccttcctctggatcatatatatatatacatactgatcgtctcaattcggaaaaacataaagtattggaagagcgcggtcgatcttataggagcaacctcgatccatggtgagccttttttgacgataccctgatgtcattcatcatattgacgcgcgatgtgcttcttctccgtttatttaacagacgttgtacataggttgagagaagcactttcaaaagactctactagtaggtttgttttctatcgctcgatcattcatcttatttcttactgacctcgtttatgttggtgaccttagaatcttccgatgacccaacgcgatggatagaagggatgggatggaatcagaatctgtggaaagaagctacgttccccaacgcttcagatttggacgctgacgacgctcgttcgtgcttgattgctttcaaccccttttgtctctcatccactctttgtcaagttctactataaactaaagcgttcttctcctcttttgatctctctaacgaagtcaaaggccggttcatcgtattgaaacgaattgatgcgcatggtgtctgggtatcaaaaggtttgtactttatcacatcagacctccctgtaatacatgcgcatcttgctcatccgttgcttttctttgtccttctgtctaaatagctgtgcttgatctgatgagccctctccctgacgatgttgaaggaggagaaataattcgtgattcgtttggaaaccccacaggaatttttctggtttgtgtcttttctctttctgttgttcgagagcattggtgctactggtcatctgatcattggtcactatatcgattgatgaatttatggtcatgttcgataggacaatgcgatgaaactcgttggtttgttctttgtaatcaacttgcttctttttgacctcatggtttgtcaatgtttagcattcaggactgattttgaactttcactttaaaagacaatattcggccaccgcgaactgaacatgaaacaatctcttacatccgtagaaccatcctggatggcctgagactcggtttggtaggaatccacgacgctgtccgtatctcgtctttcttctttaatgattcaatctggaggcgcaacatctgctgacgtttatttctcacagggaaccccacttgctgaagtggaaacgtacaagaagtgagtcgacttcctagtttcgagtgacggatacggtctctgatctctcatcaatcatttgccccgaaggctagctgcttccaacaaccttccgctcagggtatactctatgctaacttgtccagatagatcgaaatgtacgttcaatctcaagtcggatttgcgtcctggttgaattctattcacttgacgtattctgcgcatcagactgtggaaaagggcagaagagggttgattggaaggaatatgatggccgtttcgtcttgcgatccgtcaagttggtttcagatggtgctcttggcaggtttgtcttctctctctttcctttcttttcatcttgcgcccggacctgtgcctttcaaaccgatgaccaatggatgtaaacctggaacgaccattatgacaaaccagttggggtgcggctatgcatgagccatactctgaccgaactgacggatggcggggaattatgcttcagcctgaagaaagtttcaaaccacttgtcgctgagtgggttaatgcaggctggcaagtcgttagtctctcttatctttctttatctttttttatatttcttgaacatgtttctcctttctcctctttattcgaagcggagcgaaatagactgactgtttgtgaatcacttagaatatccatgcgatcggagaccgagcgaacacagccgtgatagacgcattcgaaaatgttttagagaatcagaccataagaggagagaacgcattccgcttaaggatagagcattctcaaatcttgacagagagggatgtaaagagagtcgtcgatttaggaggtatgtggttcaaacccccattcaaccggtatcaaacaatacattaactaacaatgcgaactctcgtgggacttgggggaaatgatcttagtgatcgcaagttatcaaacaactcacgccactgtacgttgacgaccctttatgtcttgtcacgtacctacaattcactccatcgccaaattctacctgtgttattgatttttctagtctgatatggcttatgcagaagagaagattggactagaacggatgaagggcgcatatgcctggcaaaccatcctctcttccggcggtcgaattagttggtgctcttcttttcgagcgcccttctccttctatttttgactgacaccttctccccgtttgcgccaattagctctaggttcagattttcctattgagtctctcgacccgttgaaaggattctattctggtgtgactagattaaatgaaacaggggatagtcctcatgggaaggatgggtggttcccgaaggaaaagttgacgagggcgcaagctatgaaagggatgactattgatggttcgttttctttcttctcttcagtttccactgttttgccctttcttcattcctatgttattttgtagatctatggtcgagtcagatcgagcatgtaagctgaccatctcgttaactgacgcatattaattatcagcgaattacgcatccttttccgaaaacatcagtgttcgtctgccaattttcctttgcaatttcacagtcctctcttcccctcttcatctttttttcttggccttcctaaaattttctttgtttttttataataataaaaattaatgtgaactaaccgatacagggaacgctccgccctggcttcagggcagattatgtcatttggtcggacgatctcatgtctgtcgaaccaggattcatcaaaaacctcaaaccacttgttacagttcgtgccttccctttgtttttctcggttttttttgtcctttttgtagcttaccccgtctgggctcgatatggtcttgcgtgctaatgattcgaacttggtctgggcaatgagaaaaggcgatcgatggtcaacccgtttgggggtctctttaagcgctgtctttctctctgtctaaactgatgttgatgtcggcactagattcaaccgtcagtacgtggatataatgaatgaactaaattttgaaattcacttggacgaaagagttaaccctaactgaagtatctaacattcatctggttgacgaaccttgatctctgctatcaatctatcctttgtatctttatatatccagtttttcttttctcttcttacctacgcaaccccactttcagcctcatcttggatgatgcaagaaacagactgaaagagaagaggagatggaaaggttcgagaagggaacggtttgtgatcaccttccatacgggatccaaccaagtagagaatcagaaaatcaatcaaataaggacaagaaagattttcccaaagagaagaaaagggcagagggaggagaaataagaacaggggatagaaggcagaggaaaggtggaaagaaataagtgggaatcaagtggaaggaatttcaaggagaaaggaagagattaagaagttcgtacaacgcttcaacgatcgctaaaagcgtgaaccagaaaaagatgatgatgacttgagagaggaaacatgcaatgctgcccaaaggagttttgatgggcaaatttggttggtgagacagacagatcaaggattgggttcagatctttgagtttttctaaatgaaagaaaaaattgaagaattctgaacggaaatggggatgggatactttatgaagagacgagaaagaggaataaaacacgtcaagagaaagaagagagaaggaaggaaggtaaaaaatgacaaaagaggaagaaaaaaaggtcgggatagaataaaaccaatcgactgaggcaagcggaaagagagattaagcatttgaaagtacttcctttcttcatacagtagcctgcttgatagcctccttggtccatttggcagtgtttcttgtctcgctgctcattcccttccctcgtccggtcttgatggcgacggtgatccattcttggaggagaagatccttgatctgtccattggggaatgtgctggccaaatcaccgatcaagccaagcgcccctctagtgatgggctcacttcggtcgtcgtcctctaacgctcgctgggcgaaagccaagatattctgcacgtgtggcaagagaagacctacggtgtgtagagaaatttcaagttaattcaaatctagtcggttatcacgcctctaaacacaaacaacacacataccttgatcctcggttctcaaggcagaggcaactccaacgtaggcctcaacaataccctccctgagcaaggttacatactcgatcaggtcgaacgagttcggatcgggctgcatctggccggcctgctccaacacggccatagtggtctcgacgtacggcctgaatgccggtccgatagctagagcgatatccccgaagcatgacaaaatcggcggcttgacagatcggtggagagactgggactgcaggtttttcaacaaggccatcatgaactggtcgcagtacggaacggactgagagccgagcgctcggcaaatatcaccgatcagaccaacggcgattgagcaaagctggtactcttcggtagcatcaagcgcggtagcaaggtaggggaggaaggcagtaatgtagggtgcgaagtcctgatccaatgcagaggtcatagctccaatggagagcaaggcgtcctcaaacacggtggcctgctttccggcggtatcacacaaggagagcaacacagtcatgattcgatccgaaagcggtcgaatctctggtccaagctttcggatgattgaggtgatcacactgcacaagtttccctgaagctcgttccagttgttcctgtcgtccgttccgacgagctggttttgcatactaaggagggtctccattcgggacaatacctcgagcgtcacctgggagacaatcgagagggtatcggtggcactttgggtgacaaaggtggagatggcctcgtaggcggacgttcgagcgttggactcatttgccggggcgtacttctgagagacccgcatgagcgcaccgacaacatgctcgtagtaaggtgagaggggggtggtcgacggcaacggatcgtcatccaatccagttccaagctgttcagccaggttcatcagcgaccaacagcagtttccgacaattcgactgctgtcttccaaaccaacaactagcgattggataaggtttgggagatgaacgtcggtctggatgcagtcgatcaagacgtctgagattcgaccgagtgtccaggcggcggtgtccttgacatgcacatttgggtcctgcatcatctcgatcaaagttggcaaagcctgtgcgacaagtccggcgaggaccttggggtccggtccatcgaggatggaaccgaaggccatgacggcggcctctcgctggtgccaaccctcgggggagtgatccttgatgttagcctcaacgaaaggaataacaggggcgacgatgtcgtctccaacggcctgagcaagaagtgagagacaggtcgaagctgccatcgaaacgttccactcgtcgtcatcggcatcttcctcctgctgggtcaacaactggagaaggacaggcagaatttgaggaagagcaatctttgcaaagttcttgctctctcgctcgggagcctcgttgtactcggcggcctgaaggatgaggggtgttgtagaatcatcagtacacaaacttgatactgaaaagaagtgaaaacagatgagtctttacctcagcggcctcaagaccaagctcgacttcctcgtcacacactgtcgaccagaattcaatagcctgcaaagcgaccttctcctccgggttcctcattcctaaaacggtaagctatacatgaagaaaaaagaagaacgataataaaatcagtcactgcctatctgaaagggaaacccgttgacagattgaagacgtacgccaaacaaggcctgctccatgtagaaagccatcttgtcatagtagagttgcataatcttgacaagacactcgaaggctccgactaccaccgggatcgaggcgttctgggtggcctcgcagacgacctgcatgatgtagtttcgctcgccctgattatgaacaaaagaaaagcagagtttagggatttgggttccattctttttgtcatggtatttgcgttcaactcgagagaaagattcgattaactaacgtctcgctcaaagttgcttcggatgaattcgagagagttgaagagggcgttaatggcagcgttctgaacttcggggcttggctcctcttttctagctccctgaacgacggtggtgaggatctcgttagactggctctcaagaatctcgggtttctgattatgtgacccaaagggtgatacgtgaagacatttaagatgagcaagcaggtcgcataggcaattcaagagagaaagagaagcagacggtcacttaccacagcctcgcagatgaaaccgatagtctggagggtagaaattcggagtccggtgtttgcctggtcacccatgaactggaggagaaggccaatcaactcgggccactcgttgtgaggaagctcaaccgctccgatagcagagacaacttgggcggcaaaggaaccagctcggacgatgggagagccaagcgttcgaaggccctgctccttgacctgagctttgacctgaggagagagcgaacgccatcggtaggtgaactgggcttgacgcgagggatcctgtgatgataagagccgagagaacagttcgtgataagagaacgatgagagaagagagttgagttgaagtgtggacgtcgactaagatgtccataagaaaagaatccactcacccttgctgacaaagcgttcttgatggccaaaccggcggcatttctcacgcttagttcggccgactcgcttgagagttgctccgtcaaggtgatcatgtagccatcctgatagagaagaagaggaagtgtagataggaaggaaaaaaaaacggtcgatcggatgacattcagtcaaaatgatcaaattgataaaggagaatcgaggaagaaagagaagacgacagagaacatgccgaagagcagatcaagatgggaaggaagaatattgcaaggagaaaagggttctcacaaagttctcgttagcgaccttttcgagctgctcagttgcctgttgtcgagtgtgggcatctggaaggaaggagagaaatcatacatgaaccatcgtcttgtcagcgttctgctttcttctttgcttgtcagttctttgggttgcagtaagagcgagagagatacaataaagagccgcaaatgagatgacttgcctggtgagagcgagtgagctagtaattgagcggcgtccatgtttttctcagagatcaagaggagagtgtatgtgtttgtgtggatggataaaaacgcaaggactgaaagatctgtttgagcgggtgaaacaatacgggtgttgggagtgagagagagcgaggggagttgtctgactataccagacgatggcagaccacagagagagacagagaaagagagggaaagaaagagaaggagctgagaggatggaagtctgggattggggttgggatcgttgctgatgggcaaaatctaggaacagaaccaggaacaggaacagagggaaaaaaaatcaattcaaaaaaagatttcatctatctagtttgtattttgtttgttcgcgtcgactatatattctctacagtcctctatcaagaagcgcgtagagaccttaatgaccttagacaagactcgtcaggaacgcttccatcgtcaagtcacacaattcaggagatctagtcgtccttggtgatcgtcagtttccgagagtgtgggtgtgtgggtatgtatgttgcagaactagaggaaaggaagaggaaaggagagacgatgatctttagagcgcgcagatttacccatgtacccatgcacacatgccccatcgtacaacaagtcatcaagcttgatagttagcagtcgagacagacagttgaaggtgatcatagtggttagtgtaccttgtgaacgtcatgttttgtaaacgtgaagggatagcaagagagccagatagagtgaaagtgtaagagtttttataaacttatacatgttcaatgctctgattaggcttctcatagatcgttcgaagcgttgcgcttgttgtgtttatcccatgtggccatgcactctttctgaatcacaagagtccgtagatcgaagcagctcataattcaattgactacggtttctgtttcattctctcctcatgtccgttgcagagaactctgtgatggccacacagaggtgaaacacagctgtatctgagcatctacgttcttgaccttgtacattgcttgctcgttcgtaggctttatatctatatactcagccgtatcttctcgttcacctcattcgttgaatcccttactgttcttcccatgcaacagagtgatctctatcatatcttctgcttgatcagttgtgggtaagatgatgtccattgtatacttacgggcgttgtatggccggtggtcacacatctgctgctggttatgcctctcacccgtaaccaatcctcacgttccatcccctctggttctttccatcttgtttcctaaagcctttgaccgtcactacacgcttaagcacatacacacacacacacacacacacaca

SEQ ID NO: 1492 - DNA, 9739 bp, Xanthophyllomyces dendrorhous
acacacacacatacacacacacatatatatatacattatgtctgatagagtaacaccccatccgctttggtttccttgatgacctacgattccgttgtcctaaccgttcatctcgacttgatttcattgtatagggccgtggtgcaccaagaggcagaggaggcccatcatctcgaggaggaagaggagggaaccagaatgcaggaggtggtggaccttcgggagagaaaccaaagagggaggctatccttgacatgggaaagtatgtcgacaagaagattagagtcaagttcaccggtggtcgggaaggtgtgttcttgattctttcgaagaatcaactcttcctcattcctcctcttttggttcttgccctcttgttcttcattggaaaattcattgatcagatttcaaccatcctcattctctctcagttgtcggaaccttgaaaggctatgatcaactactaaaccttgtcttggacgacgtggaagaagaagtccttcgtatgttatccttctctctcatttcgcgtcaatcttgaacctctcaaacctcgtcatcgtactcattcctgataaatggacctgctcatcacataaacggtttctatcccagttcctacgccgcatacgagatctcttggacttgtcgtcctgagaggcccgacgattgtcctcctaagccctatggatgggtcagaaggctcgtccgctttcctctcttgtatctgaatttcagacacatattgactaacttttgagaaggaaaacgattccctcgtatgatcaccctctgcttttttgataaacagaaatcgaaaacccgttcttggcccctgagtcgtaggcgcttcgatccgatgattaggacaaaaaaagagtggtatagacgttagagaaggagagaagaaaggcacggcacatttggtcgcctttctcggtagaggaggaatatgtggtcatcgaacggagagcatagacaaatctggttggacttggtgatgaaaccgaacaagaagaaaaatacaaggtcatctatggaatctggagtatgatcaaaagacaagaagagaaatcctatagcaatcttgcttcttgctcgcgaataagaaaaccggaatgtcaaacgaacagaacaggacgaataatctgaaagactcacacgaggaagcaatgattgaagttagaacttctgttttgggcggtcgtcagtcgatgatcaacgatctatcaacaacggctagactcaaggtctttgaggcaatctgcaaagtctgctgcgtccattgatttcaaagtatctagacgcgatagaaaagatgatagggaaatcgtatagacattcttagttgtggagagcttctcgtgagggacggagaggtacaaggtagtaaattgtgaatcaaactatcatatcatttatgtgatcaggccagaccagacaatttccaggacaaaaaagcaagggccaaacaagcaaaacatgaggtgaattcagatagatgatcgttcgcgtgacatgatttcctcttggatgaaacagaagagaaagaagagaagagatatgcacaagaagcctgaaccatgcgataaaagacggtatgcagatgtaattctttggtaagtgaagtctctcgtgccttttttgaagaaaaaaatacagtacaaagtttctttttgtttctttttattgttctttgtcttcggtggtgtacaaacagacatggaggagatttgaagatgtgaatgatgtaagatgggggctaaaagaaaaggagagaagagcaaaggaaagaatgagaagaacaacaacagggcttcaacggccccctccttttttctcttcacctgaatcgacctttctccgcaccgcttccacccccagccgaactgcctaatgtagtcaagtcggtagcagaagcagaagcatgcaactccaacttgcttagagcggtcgaaatatcgaaatgatgagccagcctactagcagccgtcggcgtatgtgatgtcgtggccaccatccccattcctctatagtcatcacctgctgctattgatcctccacctaaactcgctcctagactggaacgtggtcgggagcttgatcgggagagtgaagacgacctaggaacagtgaatccatgttgaaatcgatgataactggctgtagatccgccagatgaacctataggtggtgtggacgttccgttgacaccacccccaccggaagtaccggagacaccctcaccaatagcaccagcgttgttcaacgccgcgttgatcttttccaacggtaacggttgactgacggattcaggtgagagcaacaacgatggactcagataagccggctcgttcgacgaatcacctcctacaaccggtcggtagtgtaaccgaggggatgtgttggcagaagcggaaaccgatgcggtcgcgctcgaactaaaaggcccaagaggtccagcagatcctcctaccgtagccgccgaaggaaacgtaggtgaagagaacacgctggtactactattgctgtggttatggttgtggccgaggttgttgacatgatgactactactactattgctgctaccacctccatttgctccaccaacaccgaccaaggaaccaggtgccccggctggattgcctaccgagctgtttccaaatccaggtcgggctggtaatccatgagaacttccagggatcgacggcattgttgttgttgacgacgaagatcccgtcgacatcgaggatggggcatctgagggtaaaaatccagccggaccgagtccatcctggtaaaatctatcattacctgacgagctgccagctccgttcagatagattgactccacatttgccgatgacagtccgaatgttgagccaggtggtggagtagagattgctctcctagctgctgaactggctggcgaagttgatcgaataggagagtaagccccggtcaatatctgttgtcctgctccagatccaacggcaggtgaaggagagagaccggatcccagtttgatgttgttgattcgatttccagttcgacctctaacatgagtcgaacctggcacagtaaccgattgtctgtccagactagtaccgccagttcccctgttgaatgcatcggagaaaggaacagacatatccactggtgggattgaattagcatacattccgtactgagacccagtcgatcctgctgatgcagcagcagctacagccgcagccgacatctcgggtcggcctctatcctgaacttggaatgtgggtgacgtcgagagatcttgtttaggcatatgttgagaaccacttcggctactgatagggatcccatttgatgaatatccaccagaaccaccaccggatgtacctctgggtcctaggtccatacctaagccccttccacctgtattactgctgccaggacgagaaacacccatcccactcaattgggcagacctacctctgggcgagccagctggggagtgcacaggggagaacggactggatacgataggcgtatatggttgacgggatgtagcagaggcagagaccgatcgataaaggtttccatttgattgatgatactcggcagctgacaaatgtggagatatcgttgatgatgctgggaacgggaggtactgttttggaggtgatagtctatcaacgtgctttaagacaatggtaacacgatagaataaatttgtgagcatgtcacccaatggagctatcaagagaaggatggaaagaccaactcggtagccgcttccaaatgcatatggactccgactccctcctgcaggtgatctagatctgggtgcgcgcataagctcctcgtctctctctacggtcgttttgtcatcgatgagggtcttgtaagcactctggttggacaagatagaacgaccgaagagaacaaaggcaaaccttcgcataattgagctaaagcggtcaccgctctgcctggtcgagatgtcagaattcttgatgctctcatgaactctcctcgtatcgtatacaaaccatcctttgtcaccgttctggccacattctggttgaatcgaatcagagaacaaacgagattgtcagccaattaaattcctaaccaggaacgcgactttcgatatcgattctttaaaggaagagaggaaaaagatcgtcctcacataggatgtctcgaatggatcttcgatacaaagtctattcctgtctcgactcatctcgttcagactacccacatcgctatctgtggtccacatcttgctctccttcgttaacaagccagctcggatagagaccacgtcggtgttgaaagcaaaattttgacagtaaaatttaaagaagtcgatcaaaagttcaccaacggactggaagtttgcggacgaccattctttacgcaacagctacagggatgaagacatatgttgtattcgcaggttctataagtaaaacgagaataacaaagaagaaggatcgcaggggaatcagatctgcttacctcagtatcatcaaagaaccttagagtatcaacaagaaaggcttgttagactcagattcgagggcatgcatgtgttgattgcaagagacagcagatgaaagatctttcccaccaaatattatgaccatctagctcgagctcttcttttgttttgggtaccagcggtggaatttgctgaagatttggtaacaccggtgggttttgtacgtgaataaggaagaagaggacgagaagggtaaacccgtaggatgagagtgtccctcgatagggtgagttgatccgtcgtcgtttcgaccagactttgatgaaaagcaccattgttcgaactcgagcaggatcaatcgtactgatatcgagagtcaagagggtacgaacaaggaacgatcagactcatgtgtgacaagagtttcacgatctcggatgattggcaatgactcacgcgtatgtcagtaataaccgagtattttcaagagcaagtcggttctcgaagccgatatcgcactatggagaagatgagcagagcgaaggtacaaacatgatgagctatcgacagcatcgaggagcgcgtgaacagataaagtgaaaacaagaaagaaaaaggaggcatgtcgactgacagcaataccgaacggtaggccaggggacggggataatgtgagtttaataatctaaagatgatacaaatagaaacaagcttgtcagcacgtcgtcaacatttcttttctgctcatactcggaagtaggatattgcaataagaagaggacgaaacacgtactggaacataagccttgggcagggccttgacagcaaagtttgtttctatagaagtcgaaagcgtaacaaggcaagagagtagagagaaaggaggggaacacgtgcgattagaatcatcgaatattggcatatcaggactagtagcaagtactcgccttgttctagaaggtggccgatgatgttgacgagatcgcttgccggaggtgctgatttggcttcgtctgaagatctgtctaagagcacgcagaggtccatgtctgtgaggtatgcaggtaagcgagtgtaaggtataagatatcatgaaaagatagacgaagtaaccaaccgctatttcttagagagaacccattagcctgataggatcgcagaaggaagaggaagaaaagtgaggaaagtacgtttagcaggtatattgattggcatacgaaacaagttgtgagaggatgttttaagagagaaaaaaagaaggacaaaaaagagctcacagtgctaccaaaggccagtagcctggctcccggctcgacggtacgtataagcttttcgatgaggacccggacttgctgctttgtgttgagctcttcaggcgtggggaggagtgggagaatgactagagagtgagtaaggtgatcgttcgacggaatggtccagtcattatagaggacagcagaggggacaggagcgaaacgagaaacagaatcgaaacgagatatatgtgagtgatttgagactcgtgataagatactagagaaacaaatagagaagttccaaggcgagagaagacaacggtaacagtggaagcgaacgagagagtccggtcgagaggtatatacccaaagtaatacgcacagtggaagagagaggtcgaaagctcatcgagatagcgctgtttggcttgatggacctgcatatggaaagagcagagcagggaagaagagcctttggtgtggtcttcccaatgaataggagatggtggtagtagagcaggagagaaagaatcaacaaaggtagaatcaacgatgctcgagaggtgtggcaaagaggagaaaggcagtcgagattgaaggtgacgagaaattagagggcgtgttttgttacttggtcgttactactttgggtgagctcctcttgtacagacaataccacagtgtgataccatctttcatctatcaagtctctgccatagtgtcagtcagactcttggagaaacatacctatagacttgtaccaaagtatgagagctatagaacgacgggaaatgcttgatgtataagatttaagtgttccgtcctcaagcgcaagctaacagccacgtacaaagtatcatcctatccaaccttctatcttattgtcccattcggcatggtctctcaacacgaaggccggagagcgaatcgtattcaaggcggacaaattctatatgtcattttgtgactgttatttatatggtttggaacgtgtgcatctatccaactcgaataccttgattctagtgcctcaatggcatgttcgcaagcaacggcgccttctgactgttcaggcactcattcaaaacaagagatcgaagaggtccgttgggtgcagaatacatcagcgcatccatcccgatcaacccttacaacattctcgtcagagaaattagcgatctaattgatggtgagcagaatacaacaccaactgggtttatcttatcccattcgcagcaaacaggatagcttctcgttttaatgactccctactctacactatcttcttatgagctaaaccggtgcttcggtttattgttcttctcaatgggcatctagcttgcgatcttctagttttcagtagctgcttcctctccgttcagctctattcctcttacttctgccatcgcgacagtatttgcttatgagtacgcgcacaattgcattctgttcctcaatatacgtttgatatggacctccacaaactttttgtagcgcttcatagtttccgagctggaatcatgtcgtgtgtgtcatcttttccaaagataattatcatcatctcccaggcgacagatacaggtgttagaacactcgctttgcgcgctcgaacattcaagaaccattgttcgctggtttgaaagctatatgagttcaagatagagaataaggtcgtagacctctatatatctgtggtaaggatgactgacggtctctgaagcatgtgtactataccgttatctccggtgttctctttctttaggagtgtgtctgcaaactacagccctttgtagtttggatcagagatctctggtttgaaagtatctagaagattttcatctgtccgtcgtgtatgccaccctgaagtctaggtctgcgagcgacacccctatatgacatggctcattgactctctatgccatgttaattccggtgggatcaatcatggcatgatgaagtgccccggatctgttccgacggctttcaacgcacttttctcttctctgctgttctcctctctctaccgtactcccctctctcttcctctcaacggcacctggattgctatgagctgttggacatatcacacgagcaggccccaggtgagacacttttacgtaatctgactgtaaacccagttacaaagggttacaaccctctgacagcgccttttcccatcatctttacgttcttcgttttttcctttaactctcatctttctcctccaacatcgtccttcgtcttctttcgtcttgcccacatctagatcatccgaacgcatacatcccagggcatcgtcaaataggtctaactcttctcctatacctgtcgtatccgtctccgtttttcttgtcttttggttttttctccatctccacccatccaagacacaatgccatcccgtcttcagtctgaacatctctcgaccctcaaggccatctttcctgattgggcagacgatgacttgttgctcgtgctcgaagagtccaagggtagcatagagagtgccgtaggaaagatttctgaaggtgcgtactgaccgtgtacttggtgtctcagatctcgttctttttgtctcttgtccttttttttcccttgttccttttctatcaccttcgcttcctttttatctctcgttatcctgttctttattgattcttggcacttctttgatctctaactgacccaactggctgccttttttcaactttcattggctgttacctcgctcgctccttcgttctaatacaggacaagcttctcagtttaccactgccacatctcgaaagactaacaagaaggcaacgcccaccgcttcatctactggttcctcatctaaccccggtcacaagccggatcagtccgcctcctccagccgaggaggcttcgagggtggcttccggggaggtttccgaggcggtcgaggtggagctcgaggtggtggtcagtcttttttagactctttttccatgtctcatcttcaactctcagcctttctccttacttttctcatctctaatcttttgttctccatttatttgatcattcccagccggatttgctcaggctagccgaggtggctttgctggccgaggggccttccgaggtggagctgggcgaggaggatacacaaactcgacccgagcagccccttcgactcctaacggaacgtcaactgctgctcctgtggcccctgtcgaagaaaccccggccgcccctgctgtgatcgctccccaactacaaggtgtatgggctaagccaaagcctgctccggcagctgctcctgctccggcccctgctccggcccctgctccggcccctgctccggccgctcctgccaagaacgaggttccagcgaaagaagatgcaacagcagaggctgatggggccgctctgagcgagaccgtcaaggaagcaacccatgaagagagccccaagtcggaagagagtgagaagaaggatgaagaacctgctggacctacagcggccgccaagggcaaggcagtggttggaaggacaatccctaagggaacaaagatgtcgtgggcccagattgcaaagtgagttctgtttaaacgaaaagtaaccaattcttagttatcggcgctaaacaggagacgcgatcgatctaaaaattaggcctcaggaaaagcccaagccgactcctccccctgctcctactcctgctcctgcgcctgcgcctgctcctgtctccgcccctgcccctgttcaatctacccccgccgttgaagaaactatctccgcgcctgtccaggagtcatcatctgccacgtctcccttggttgaggacgagccggaagagtccgcttcggcggttcctggtgatgacacctggcctgctgccacatctagcgaagagactgccgaggaggcctcacctgaagagatcaaggaagagactgatgtggttgatgctcctctgcctgaggtcgacaacttgagccccccagccgaaaccggtgctgctattgag

SEQ ID NO: 1493 - DNA, 8823 bp, Xanthophyllomyces dendrorhous
tgaggacactgagatatctgcccctgccgctgccgagcctgtctctgaggccccccccgcttctgctcagactttcctcaacccccctcctggatttgagcccttgcctacgtcatctgaagtcgccaaggcaagctctcctgccgccgcttctcctgcacctgcttccagagcagtaaaccgaaacaactctaagcttcgacagtttggagacgaagccgttgtcatgcccggtaaggccactggtggtttcggaggaattggcatgcagtttggtagcttgagcctaggtggtgatggtgagctccacagcgaggagtcgtgagtcttgtttcccttctctctctagtcaagctgagctgattttctggtacaatactgatatcgtgttaatttgtccaaatacttggatacagtcgacctgagccggcctttgctgctgagcctacacccgcccctatccctcaacccgagcctattcctgcaccggtcgctgcaccggtcccggaacctgtccagcaacacgctccccaaacgatcgagcctattcaaccccagcagccgatcacgactccccaccagtattcccagacgaactctagcatgaacttcttccaacagcccacacatacgcctatcaccagtgccgctaccgttgcccctgttgctccctcgcctcagcttcaggctcagcagtacggacagcatcagcaacaccaccaacagcagcaccaacagcagggacttgatcagcagtcgacctactcgcacgctcctcctggtggattgacgaaccagaatttctacagacaggatactctgacgccctcgccctactacaacagccagcagcactctcagacgggatcgctttcccaacagcagcagcagttgggtgccccacccgcgttgagccagcagtctcaggatcactcccagcagtacggagccagtccgtttggaatgggcgccggaagtggacttggaggttatcagggttaccctgactcgtacggagcgatggatcgaagtttctacgacccatactctacattcactcctcagcgagtcgaggccgagcctactaaggcggcttccgctcagtcccagagtgctcagatcgcttctcagtcgagccaaccgcctgtgcacagccagcatcaggccgctgcttctgccggtggttactacaacaacatgcctccttacaacccatactgggctaacaacaaccgtgagctcttgggttggactccttctttttttttcctaagtgtcgttcgtggttaattgactattcttccttcatccttctatcaatcagcctatggttactacggtcagacccccgcttgggctcagcagcaacagtgggctcggccataccctcagcagcctcctgcgccggctcctaccgggagcgcatccggtgtaaagcctcctagccaagcgcctagcagtggtccgtacggacacttttcgtcttcgtatgaggatcagcagcagcagccgtcttctctcggcggatactctagctcgaacctcggtcaaggtgggctgtcctcccagtatggaggaatccattccttcctaggcggttcgcccgcccctcaggtggcttctgttcagtctaccggtgtcaacaactctcgacagggtcagtcttctccggagacgacctacaagagctaccagcaggcccaggagaagcaggcttcccagagtgcgagtggtggtgctggacagggacagcagcctggccaagtgcaatcccagggtcaggcgcaagctccccagcaacaggccggacagcaaggtcaacaacagcaggccggacagggtggtcaacagcaacagcagcaaccccagcagggttctgtccagggcggagccatccagggtggtagccgaggtggtggaatccaccagccaaactcttactcttcctacggaggaaatgtttccggttcggccggtgctcggggaggagctggtggtggataccccggacagagcgtcgttagcggagtaggtgctcaggtcggacagggcttgccgcctaacgcctaccaaggtcaacagcagcaggagtacaacggatactattcccagcgacaatactggcagtaaggggtaggaagcgctctggataagatgagagacgaataagaagaacaagaagaaaaaccaatattttttgggaaaaaacaacctctactccactctttgcctttttttctcattttctcattttttgtgttctctgatttttatctttatatctggatttgtccgaaatatcatctgttcttcgtttccatatcaatctctctcttgctccttactccaaccaaatttttctcccttctctcttctttatcccatcatgtgctctcttcttttgttactactttttcttctcgttcggcttttctttcaactttaactcgtctgtaacaaaggtcacggtttcgaacgtctcttttcttctcccctctacaaaaaaaatacatctccgctttcctttccccttatccatccttttgaagaaagaagagaagagaaaagaaacgaaaagaaaataaagagcggaagaagagagagggagaaatgattgtttgaaggaaaaataagcacttcggatcatgtttcctatttagaagagtatgcgccggatgtaggatgtagagtctgagttgacatcggaccgagaaaaggaagacggtggtagacatcgacgttgatttgtatacgaacatcagatctcaaacaaggagttgaaaacacgctaaatgagcataggaaaagatggagagacagacaacagagacgggcaagggagatgaaacttatcaagatgatcatgaggattgatgatttcattgactgaatgactggaaggacagatgaaacaatagaatataacacgaggacgggactaatatctttctatctttccttaccttaaccttctttccttatgtcatcctccgtttatccgtcttgctccgtcttgctccgtcttgctccgtcttgctccgtcttgctgtctctccatgttctggttctgccgacgcaggaagacgaaacgaggagaacggatggggttgacatctgggtatcttcttttacagtatataccttatgaactatcatgcaaacagcggcaaatagaaataataagcacagaaaagaagacaaaagggccaagaggcattgaaagcgattgccgatcattcaggacgcttctcacgtgcaatcgtggcttgccccatgcagtgggtgggcaggacggggcttactttacacaagttaattatatcttattctatcttgttatattacattattgtcaatttgaattttttatctatctatccattcacatatttgcctaataatctgtctgaccatccgtctatctacgtatttatttatttgtttacctaccaacatggtttcttatctgtttgtttatcttttgtccttttaccccgttcgtcatgatcttcccttgcgattcggttcgatcacaaaagaggaagggatagcagcgacagaaagaaggtaattgattgactctgtatgtaatgcaactgaccgttcagatgagagtggcggttggagacgctctaccctttctactcctctctctttctggctaaaggacgctgcttccctcctttttttctccgttttttttttacgagtagctcagtttcctgcggaattctattcgatcagattgctctctctatactcttcatttcatttttcaaatggcctaggtctatccaacttgaattcaatacgttttatctttattccttctccgtctcctgttgatcggatcggctttgagctcttcggtctttttttctcctccgcgtgtctacggaggtgtgcaaggctgggggtgagaggcgtgtgtgtgtttatgttcagaggtggacgtcggtccttacgctctcaggtaccatctctcccccttccctttcgacctcgaacggaccactcgtgcctgaaggcgtgagggaagtgagtgaatatgtgtgtgtgtgtgtgtgtgtgtgtgtgtgtgtgccccttaatgttctcttctctcctctctgccctcgccctcgctctgttccttgttcctatcacaattttacatccccacccccttgcccttgcccctcttcatctctgctcgctacccgccgaaagtgcgtcggtctggtttcctgtcagcattctcttcgcttataaagatgaacccgtccgtctgagattgttttttcttcttcttctccttccttctcttctcatatatccatctcctgtccacaaatatactcacccactcacccagccactcatcatatgctcgcttacccaccgttaactaaccatctcgatcgaaatcaagcgcatacacctacccatactcagccggcagccatccgaggagatattgacagctttctatcatctcgctccagagtcgttcacatctcgggcctgccaccggcttcagtcaccggcacattcgacagctcgggcgaaaaattcatcagcagagaggcactcgtcgactggatctctcagaacaatgctcgtgtcattcaggtctggggggagagacccaagacaggcgatctgttgatgagctggtgggtcgtctttgaaagtcatcaacaggtcagtcgccccagtgatttccgacgttccatcatctcttctgtttttgctcattctctgtcgcatctacctccctttctctccaggcccggaatgtccttcggttcaatcaaaccatcgccttcaactgtcgagtctctgtcctacccgcatcagaatcggatcttcggccgttcgagaagttagtcagaatgcccgcccgaggtgactatcgagatagtgtgagcaactcattcgttcttgatgtcgccatcaccaccaaaaactttaccgctcacacacacacacactctctctcttctcgccctggcagactaatttgacttcgtccggcctgccatgtccactaaaccccacactatcatctccaccaggacctactttgccatctccgccaaagcatattctgccggaccttgctccgtcgagctcattcgaacgaaccccctcgctctcatcttccatctcgtccggctcgtcattgatgaaccactcttttactaatagaggcgcccctccattcactcctcgcccgccttgggaaaccccagaccttgttcggtcgtctccagaacagatagaatcaatctggccagaaactctatcagacgctcttccatcatcgtcgtcctcacctggtgcagtcgtaagtatgaagtcttctctttcttttcttatgtgcgctcacacccgccgttctgataccaacttgtcttgtttaccacctatcagcagtggagatctggagactggatcgtaagctcagtccgtacgtttgtcagcctgttcttggttcgcatactaacgtatacttcaatgtcgatttctagtgcccttccgatacctgctgtacgtacccgtgagaactatgtgcccgatggccagatgcctgaacattcgactgacagaattctgtcctgtgtttaccacttacccaaaaaaaaagccttccacaacttttctagaaacgatcgttgcattgtgtaagtaagcgtttagacgtatcaagacacgaccctcacaccgctcatccttctttgctcctttcactttagctgccactgtgctaaaccgacagctatctccaccagaactcaaagtatcaatcatcccatagcttcctacaaccaagcacaaccggaatcgatctcgccagctcgaccaaacttacagaagacctatccttctacctcagtcccaccatcaccaatgtttcccggaatggaagcctttagtccgctcatgggctcctcattccgtccgcttcacctctcctcatctgcccccgactttgaaacgtgccttcgtgtgaacgccccgacgttcagcccttctctctcctcaaagattcgcccggtctcgactggtggcaacgtgtccggccagtcagtccttggtcagccgtttctcccctacgtcggcggtcttaatcttcaaaacattcaaactattccgacgaatgaatctctctcagacagaagggactttgctctcggctcgaccgaaggaacaaaccctaacattatgaaaagacgcagtctccctcgcggcttggagttgacaggtctaggagagattccagggagtgcttacggacggttcgaccgggcacgcaaatctatacaaaacatggacactggcgagaaactacagccagtgcgttctgagtgttttgttccgctggtgttgtacgacctgcccagctgaagactcgcgttctcgtttctctgtggttgatttagatcctgaatactggaaataccggtccgatggtttttcagccagggtaagtcgtctgagttctgtctgctcgtttcgtttctttcttatcctttttcagtagagacgatcttaatcgctctactttgggttcgtatacttctgttatccagcgactgggcctgtggtgaatgcggtttcgtcaattggcgaaggagagatcactgtcttcggtgtttccctgctgccaaaggcaacgaggtggccgggattgctatcgccacgtgagtactgctgtatcctctcgtatgttgtgctcatcccatctcacaactggtcgatccattttattttactttccctttctttttctctacagatcggtcatgatggccaaccagttggcacaggacactcctcctatccatcgaccgaccccaacgcttggttcgatggtttcatcacccacatcgatcacacctcaacctggactttttacaaatgctaccttttctggaccaaaacacgctcgagaagaaagcttggacatgacccaaaagacagcctcattcgacgctttcggaagaaaggtgtcctcccctcgaccactatcgctcgactcttatagctctgccggtctccagcaggcacaacaccgcaagcatggcttatgcaacagcctctccaacatcttgtcatcggcctctgttgttgatgaactttctaattttggtcagctttctctcggcggattccattgaaaaattttgtacatattttcttcccttcttatcagatcggattacacctacacagatacggtttggaaaatcaaaacctacaaataaactcaactctgggtctcttcatcgcgttctctcctatcccacttacattgataagaaaaaacttattggcacatgtcgcaacattcctctcgtgtattctagatatggtccatcacatcatccacatggttctcctttgactctggtccttgcttatacgcgtctgtaacactgttcactgaagatattttcttttctattctttcttaccctctctgcctcgcacacatacacgcaaacattcctctacaactttagtctctgacgttctccaattttccattgctactttctcacgtcgtccatgtttccccttggttctgggttttttagaataatgtccaaactcaaccagctctcgaattttgtatgctttccctacctttacctctctatctctctctcgccgtacactcgtacctagtaggtgcaaggtaggcccatggtatgatgaatcggatgtccatctcggatgatccgttcggcgaacgatgcaatgtatcatactttctcatcaatttcgagtctattttcctgacccctttcctggtcaattctgtgcgaaccagtctgtgagttctggccccaaaggggcacatccaatacgatactgatatagacaagagaaggaaactctagatagatgaaaagacatgctcctcgacgtaggacgtgggaatcacttgctctgtagacccttcgagtacacatatacttggacttgcgaacgattgaaccaaggcgcttatagtgttgatcaaatgattcatttgggttctcacaacctgataatctcggcattgatgtgatatgatgtgacatgccgatgagatatcaagaaagaatcagaaattctccaaacgtgtagatgtttatggaaatgtttatatatgaagtgtagattgcttgtacttatgtctatgccaatgcgaacaggagtgtaggtataatgtacagagtgaacagtgacgagatggtttgcccctagggtttaagaaaagaaagaaagaaagaaaatagaaggctgggaaataagaatatactcatccggtgacagccaagatcttctttcaatcctgtttcccctttctctttctctcttccttcaacgagggacaaaatggacatgagtacaagacgggtgagagagtgaataagggattgatatgtttatttctttctatcatcgaaaaagaatcgggataaagagcacagtggtcgaggtggggttgcattatatcaggttcaacaagagagaaagagttctaaatcgaaacccccacccccccgaacaggaaagatgagcatcgaccttgcttccttctcaatgagccgattttttccagaacgataactttcgtcctagattgctaccttccttctcgtgctgtctttgcgagccgttcgaccccaaccctgaacccgaaccggtcgggtgaccaacgccgagtgagcccaattttcgagcgatctctctttcctgagatagaggagtcggtagccttctatgttgtccgaatgcctctctcccatctccctgttcaccatagacaggtccagaggaaggcagcac

SEQ ID NO: 1494 - DNA, 10997 bp, Xanthophyllomyces dendrorhous
aggtggaggatgttgagaggcgacagcagcgacatccacctcggcggcggagaacgcgctggaaccaaacccgttgcgttgtagagccaacaaagcgtccttctgacgttgagcctcgagcatcttctttcgatcttcggcagcatcgtagacgtatctgacaggcttgggaggtgtccagcctggttgaagttcttcatcgtccgaggaggaaagtgaatgattcaccgttaaagccttctgagtcgtcggatcgttgaccttgtagatatcatctgggtcaaaagcgtctacatattcggtaatttttcatagtcaattcaataaacaaacaagaaaaataaaagatgaacactaaattttaggtctactaaagacaacccgtcttgacgataacatagaaaaacacgtaccgtccgcttcgtaagcatcaatgatcctcctcttccctaacgctttcgcgctaggcctcgtgggcggcgctgattcttcgtcatcactatcatccgttctcatttggtagggctggctatcgttcggattttttttgccgtgcccatgtccactagcgtctgaactgatcggggtcggggccaaggccgtgcccggaatcggtaacggcctgtactttggcgagttggagctcacgttagggtcgttcggtcctctaggtgggctcatcggagccttattagacccatcaatcattttcgactgtcgatgcaatggagaactagcccgaggaagtgaggaactcagatggctggttttcgggtaacttgacgataagagagacgtcgctgagggagctttgggaagtttcgattcttctatgaagcccagtcggttgggtgaaggagatcgagagccaccagcttgagggactcctagatgaccatccgattcatagaccggttgctgtcagggcacatgcgtatacgaacgtagatgtttccgtcagtcgtaaattatgttccgtcgaagtgttttgtacgaaatacaataaaatgaggattacttacagatcgatcatgccgggtctctttcctacttcgttcagaaaccatccgaatatcttcttcctcctgcaaatcacgttcgtactctgcaaagtcttccaaagcctgagggtgtgcatagctgactagttagtcagtcgttagactcggataggagaataccaaacatgagcgacgcacctcagaaacctgttctgtgacttcgaccaatgtcctcaaaaccgtctgtgctttggtttccccagtctcgtttccaatgctcaaactgtctgttgcgttcggaccttcggtcgagaccacacgagcagcttcaatagaagatctgcctcgattgagcagggaatccctcgccatagattccgcccagggaagatgattgacgagttcggtttggatatgaaagcatgtttggtagctcgactaagaaagcatcgcaagatttaaaaaaagatcggtcagaccgaatttgctctttgtccaacaagaaaccctgagtagtagaaaaactaactctcaactgttttcccagctcgccttcgaccgcccctggattgcctctggcttccctgagaaaggcgacgagcgtgtcctttgtctttctcgctctttcacattcgtcctccaacctattcaagtcattccccatattaggcagggaagtctgttgctgatgtctgaagacatcatatccaggcgaaagcgggcccgtttgagaggtccattgctggatatgcggataaggggccgtcccgagatcgtctccaagtccgtaggcacgtgcgttagcgaagtgttcttgctgctcatgtgccgccaccgtgggtgcatgtggatgaggttgaaacaagaaaccaggagcaggcgattgagaaagtccttcacttcgaccggtctcgtagactttgccaaagtacttgatcagatcttcagatccttcaatccctctgaatcgttggtaagcatcttctagggcatgatacatatcagatttcggcggacaaaacgggagtttcttcatggctgcttcgatcaaggaaagcgtcttggagtttgtgagagattctggatagagagcgaaggaaaaacaacaggtcagtgatgtcgcttgaacaatctttctcgcgtgaacaacgaccgaagtacaagacggaaaacatactcgtcaatttagcatcattcaaatacatcaacagccaccaccatacctccgggaccgaagtcaaacccgggccgtttccattccgcgctttctcaacctctttcggtagtcccttgatctctgctctgataaccttagcgactcgttcggcgagtgtatagtcgttctgagaagcagcgatcgagagttctctcgacaagtcgtgtgcgtacattcggaaggcttccgtttccgagctcgaacgaatatcatacggaggtagatgagtcagaatcagaacggtttgttcgacccaatcttcctttgttttcgagttcgcatgttgctgttgactggattcgatgtcttctcgccatttacgcaagagtgacttggactcgaatgattctcgcggtggggagacgtttccctctaaggcagtcgaaagtcgctgatgatatgactgagcgtgttctccgtctggtccttcagacatgctttccctgcccttctcacgttctttctctttggagtttgctccgctaaagaacccaaacttcttctttggctctctctccttttccttgtccttctcttttctggagcccgcccctgaagttcccttatgaacgaacggtgaagaggctccacttgaggcagattcttctctagagagcgccacccaactcggtgccggttgaccaggcgatggtgagtaggtttgaaatatattgtgggaatggtcgaccgactgggaatgtcgatccggggcacgacctgaaggaggatgagacgaggttggtggtattggaccggtcggtgcggctagcgttagattggagagcgagtttggcatcatatagggagcttgatccatcggtcggggaaacgtattttccgatatagaagattgatagaacgggttgtttggggacagaggagcaggcgcatggaacggaggttgttgtggaaaaggctgtggctgtgggtgagacggttgtgtcgagaggatcgaagggggatgctggcctatcgaggtccggcgagggtgggagagacgagtgtttgagagatccgcgggggactgtgagactggatggtatacctgttctgtgatagggttgatagtagtagtggtggagggtgaaggtggttgaagcccgattatcggattcaaagattgttgtccggccggttgtcctgatgagacggaagtgtagatttgggtcggcggagacaacggcgcatgttgagctctggacggcctcggggctgccaagggaacggaagccgagtggtgatggtgagtatgatgaccgcctgcgagagagttcgtgtgtgaccgggcagattcttgttcccattcttgctcgcttgctggtcgaaaattgggcgtcccattaggggcgaacggtgcaaaggggatgcttgaatgagacccgccggaggaggatgtgcgaggtcgagggtaggtcggtgcttcgaatgatgcgctgtcccaggcgttcggttgagagggtggtgtggggaaatgcgtgttcggtatgtcgtaccgctgtgaagagggaggaggaaggaaaagtaaaagccgagcataccgagagtttgtacaaccgaacagtaatcaacaatatcagccaaaggtacaagaacatgacctgaagtagaagaggacgaaacgtatgttgcatgcactacgaaaacagaagacgatcttgcttaccggtgacggaacatgatctctacctaacgagatatttatcttttgagcattgtcatcaaaaccggtaggaccggcggattctctaggcgcatagcctagtcctccgggcgccgcagtgtttggcggttgctgccaggtggccggatagggtacaatcccgttctttggaggatttggcggttttgatgaaggtaacctggacgacgactgagagaactgatggcttgcatgctgttgagatacggaaggaagagcttcaatggtcgagtcgcccaacggctggaacagagatggggtaacaggcagaggagccttcttcttagaaaacaggcccatctagagggagatccggctgattgccaagagatattctcgagaaaatttgggaagaaagatcagagaaagacagaaagcagactctttgtgtgtttggcagtagtccagcccaagcagcacacacacaactaaggagacgaccgggtgagtgagggtgagtgagagatggagggagagaaggatgagatgacggcttggacgaggaaaaacagagtgggagggcgagggaaccgaaccagggggcggattgtcacgtaactggtggttacaaactggattaggtaagacagtttataggacctcaaatcacgtgacttgacttggtgtggccataccacccaatagctgtactgcctgctctttctgcttatgcctcttcgtttactctgcatcatcatcttgctcggcactcgtccgtgcttcgcttgctcttctattcttatggccttgagccatattggtttccatgtatttcatctcttctcatgttttatgcgcgggaagtatcgatgcagaacaggccgatctcactctttcttggacaaggattctccgagctggaatctttgtgagaatgcgctatcgaagttccttattcaattcgttgtctgcgcctagcattgtacgctcttgcagaggttctccttttttccggtgaaatgtaagttgagcaacaatgatagaggatcttaagtcttctcccactcccagtcaagcagaggctcaagggctataaccttctacgttacctactagcgcacaacccctagaacggtgttaatcaagggtcaccaaacgacacgtgaccaagtaggttagggttacactccatcccggctccctctttctaccaacacactgagaaacgttcagagctgaggacaagagaacgagatagaacaacagacagagataaagaaggagatatttcgaatcctctgatttgatgtgggtgatcttggtagccctatccatagcatttctgacccagacatctccaaacacatccaacacatcgttgtctaaatcgcattggacttggctggctgtctcttctcctgctctcttttgtcaatcaccagggtcgataatctcgttctgatggcttctctctttgtcgcgaccgttattattgcatgtgtatgtctctccttgtttctcctcctcgctttctctcgcgcatcttgttctcttctctggtcaaagagcggtctgcttctctggttggtaacttagatactcatctagccacgtatatatgaatattatctgaaatcccgacgcgtctcgtccgcctgctgtttttttatcttattttatttctctcgtcattcaacatcgaacttgactctcccctcttcttcctttcataagcaccccccatccagagccatgtccgaagtcatctatactggatctctcaaatctaaacgaaaaaatgagtacgtgttgatgattggttatcttttccttatctcggtggaacgtcgctttagagggaagcagctccatctgccttcaaaatctagtgttaactcctgagctttttttcccttcttctcttctttctatctaatctctcccctttcctatccatccatccattgcaatttctttcgatcacgatgataggctacaagaaatagctcgagccatgggactctccgtggatgtatctgtcaagatctctgagctcgttgcccagatccaacacgagatggagactcgtagagaggtgcgaaccggccttcttccttttcttctccttctctgcgcgtccctcctatcattacttacacccatcccttccctccgtctatcccatcttactcgtgatgcgtgacaattcgcaaaaacctccctctacaggagctcatcttacaccctcagttcaaacgactcttccgaccggcccgcgcttcagcgtctcaaaagaatgacatcaaagtctcctcttccaccctaaactctggctcggacactcactcgcattctgactctgagcctcactcggatgattcaaccgtccagatcgaagcttcgtctggctcacgatccaagactgctaccggagacaaccacctcggcgtgacggaagggaatgatgaagaatcaaacaaatcaaagcttgctaccaaccaggccgacgcgtcttctgatgtcgacgactcttccgattcgggatctgacgacgaatcagaagaaaaccaagagccaaatgctgaatccagaccgtccgtgttgactgaaagtctggcttacgtgcttacgtcgcctttcaagtcacttcccgcatcgtcgcccaaacagaaaaagacgccagccaagacgtcctcctcctcttcccctgttgctggctctcctcgaggtccatcgagcgcgagaaagactccttcttcgaatcaaaagtctcagcagcagccgggcacgcctatgtccacgctcattccctcgccgatcaagtcagccgttcagtcgacgattcagtccttgacacctgctccagattctccactccaaaaagcggtctcgagtgtattcggttctccctcgatttccaagctatcaaacgcgatccctcaagcggcagctcagatcgcttcggtcgcgaccggcacgccttcaaagttgagacaacaaattctaccggtgacagaatccccggcggccactgctgccgcagaggcagcatcggccatcgtcgatgccgctggacagacattcggtcaggtcgaggatgcattgatcgatgcgggcaaggtcgtcgtcgagaaagttagcgaagtcgatggacaggccattgagggtttcttcaacgaggctgctagggagagtgacctggttatgaacaagatgaaccgtgctctcaaagggactcactcggtatgtggtttctttttgtacactcttcttacaaccccaagtgacgctaaattctctcctatgtttcctctctgatcagatcctctctactcccacgtcccagacaatttcactcttgattctcgaagcggcctacctatttagcaatgtcttgaccttcaagaccaccacgttcactctccctccaaagtcattgacttctctgtcaactctcgacccatcaactccttggattagtttggcgctgaaagtagtcgactgggagaccatcaaaggatcaaagattgatgtgtttggtcctttagccgtctggctagttggactcgtcctccttcctttgttcttggccggtttgatggcctcctcttcttcgaccgccgccttgtcctcatcggcttctccgtcagaagaacacgcctcatctgacgtacctgtacatacgtacaatacccgtcaacagaccaagcgtcggtcgatccttcctcatccatcccagacgactgatagctcttcgtcttcggacgtgtcatcgccaagaccgacgtcaaacccgttgatctttacgatcctccggttcggaatcttcttaatcgctcagacccagctggaggagtttgggaaagacggactatttttaggacagttgaaacagaccgggttggtcagtactgagaggattgggttgggcgtcgttttgagtggcgtcgggattttattgggctttgctcagaaaaagatctgaggaccctcgtttggtctttctttcttcttctctttttctcctctctttcgatccttgtcttctcttctttgtttgtctgtttctttttctttctttcatgtctgtttcagtttctcgccttgttcaacaaagagagggatcaatcgtcacctagttgggatcccttccgataccctgtacataaatcttctttcccctttttcctcttcgatttggttctggttcttttcatgtacccttctcttatcgtaaccctctgttcttgcattctctctctctctctctctttcttttcccgttcgcttcgtgtcttgtgtctcatcgtttctgtgccctctctttcttgaactctcttcgctctgcgcttttgcggtcttctttctctttatcagtgatcgaccgattatctcacatcaattggaacgtgtttattttccctcccatgaaagatgaacagaaaaagtagaaaaaaaaaaacaagaaaggagaaggagaacggccgtgtggttttgttggttcgtctttccaagttaaacggacttgaccaactgactttatccgtttgttaatcacgtgaccacactgaacggttagggttacgatctttcaattggagcgtaattaaatggattaccccaaacaaccgacagatgtacagatatacgcacacaccagagacatatcagacagacagacagacagatagatggaaagttgccgaaatctataaaaccttgctcgagatccgagattgatcgattgactcagacacacggacactgaagcagagacagagatcaagagatagaggaagcaaagcagttcacagatgtatacacacgcatctcttgatcttgtccaagagtctccagttagtatgatcccccgctcaaccgccatccatatcctgttctttcccaggatttgaattcccagacgttcaggcagacaggaccaactctcgaaggataaggaccagagtcggaaacgaggacttgcagaaaataacgatacgataaacatgggatcttgaacttcaagatatctgagataccagcccgtccaaacacagggagaagcaatgcaagatcaaaaactcctggaaaaggtcttttcttaatgaggcgatcatcctttctttgtctttgacggaaagagatggccagtgtttcttcttttagcttctttcttcagttctttcggatctgattcggtcagcggcataccgagaaagaaaaagacggaaataaagatcacacaatcttgcccatcgttcgctcgcgatttgtagtttgtaatctgtgaccgagtttacaagaaagaacgtccaacaagccatgtgatataatcggaaagaaacagggaggggacaccaattatcggttggacttggcaactcgctcgagctcgctgttaaaaaggaaaggatgacaaaaatgagacggtcagatgaggacaatttaacacaaacacatctaaggacgaaaaaagaaaaagaaacaagactaactccttcttcttgatggcgaaagagttggaagatcccttagcggcgttgatgagctcatcggcgaggcactcggaaacggacttgacgtttcggaaggcagactctcgggttccgatggtgaggagagagacggcctggttgactcgtcggaggggggacacatcgacggcctgtcgtcggacagttccggcggatccgattcgggtggaatcctctcggggtccggtgttgacgatggcgtcgacgagaacctggatggggttctggtcggtaagaaggtggacgatctcgaacgcgtgggcgacgattcggacggccatgagcttctttccgttgtttcgtcccttcatcatgagggcgttaacgagcctctcgacgatgggcattcgtcccttggcgaactgcttcttggcgtatcgcccagcggtgtggggaacgtagacagcgtgtcggacctggatgtaatcagtcaaggagatatccctgacctcgatgctgtttgaacgaggagaaaaaaaaggaatatcccgtcagtctggctaagttctgagggtgcactagaaaagctcacgatctccttcccctctccctccgctcgctcgaaagtggatatcctctctatccgagtgttgttttatatgtatgttttcttcaaaagaaacaatccaacccggataccagtattctgcccagagtcccttcagaagttatgtccatccctacgccagcctttccaccggctggtttccattctgtgccaaattcttctttcctcttttgacgtggttcttccactgatcgcttggtctttcttttcaccttctccatctcctttcccggactctggcaaacactggttttcggggctgatcgaaaagaggaagaaaaaaaaggacgaagagagggacgacggagcgaacgacggaaggagaaaggacgacggaacgagtgaagcggaaagagggagagtccatggcgaggataggtatactcactcgttggtctcccactttccaaagagcttgacctgaccatcggagttggccttgacgacgtcctgggggagcgcaagaagggtagctgaaggggccatggtggattgtcgaacggggtggaaaggggaaaaaaggggaggcgaagattctttccaaggctactgtcgattttccaaagggcaagccgcgcacaggcctcgtctgggtgagcccaggcacccagcgcccacagggaggggcgaggggcgagcgtgctgcgcgggaatcactcccagcgccacattctccgtttagcacagcattagcacactctcttcacgcggcgtgtttgattttctcttcccacttttgcaaaagtcagatggactggaggtgtcttgatattttgtagttttttctagtctcttgtagtgtcttgtagtctgaattgtagtgtcgcttgactagttcagcctggctcattctgtagtgtttgcgtagtgtagtttatgctggcttctgtagtgttgtgcagtatcgcacctcgctgtatcatgttggattacatcctccaatgtctactgcctaattcatagtccctattccctattccctattccctattccctattccctattccctattccctattccctattccctattcccta

SEQ ID NO: 1495 - DNA, 1544 bp, Xanthophyllomyces dendrorhous
tccctattccctattccctaatacctaatacctaatacctaatacctaatacctaatacctaatacacatcgtccatacattcattcgtctcactcccttacagctctcgatctatgacgggatcccacagtcatcacatctgtatgtttctatgcagcagctgctggatgctccatctcttgctactgtagtctccgtcacctcgttgttctctctgtcgtcccctctgttatcctcttcatcgttccctatgcctcctctctcacactggcttatctcgtcctgaacattcactcactcacttactcacccccccttcccttctcgcgcagcccggcgtatcttatctattcagaagtaaacgttgatcgaccgatctacttactcatccgccgcggaaaggtgcatcgacccatccttgcatacctcctattccctttgcgtctctcttctgtttccgaagctttctccttcttcgtgcatgccttgttctccccacctgatagacacactcgtacgtacatacaaacactgacccatgctatttcacccgacaaagcacaagagagagaaaacaaacacgattaacaaaaacaaaaacagggtgacatctacatgacacatgcatccattcataattaagtccatcggtcctatatctcttagtctttacacctctcggctcacccgtttccttggcactaacacaaaacagggctgattgcgcactccgctcacgttctccgtactcatcttgtttggttcatgcgcgtttgatagataggattacacaaaagagatcagaccttggtccttctctcttttatttttctcctcatgctcttcaggtctcgtccttctcttgtctttctccctctcttgtcttgccttcgttcaggatgatcttgcctgatcgcataccgttcaatccaccggcgtctctgttcaacatttcttacctctccccaatatccttaccttctttttcaactccgtcttccactgctttttggacgatcaagaaatgcgtcgcctcttcagacttgaatcctatcggaaaaagaaaccaaactccaaagaacaagaccgtccttctgatctctcaaccggcagtagtccaaccacaccgtctacctcccagcagcagcccattcaccaatccttctcggcctccccacctctgcactcaaccttgcctcgcctttctctgtctcagattaaaggcccaaacaaggccaaaaatcagactgaaaaccagcagccaggtttgaacaaactctcaaacttatctttcaaaacagtacttgacttctcaacccctctgtcggtacattctcactcgaggcctttgaccttctcgtttgaaacaggatcacaaattcaatccccagcacagtcagaccccctcagatggacgggcgaagactgggatcccgcgctggatgattattggggcgaaagagggagagaacttggaaggctcgttgtagctatcgatctaggtatgtgtgtttcctgcgtatatgtgcctgtgcctgtgcct

SEQ ID NO: 1496 - DNA, 8783 bp, Xanthophyllomyces dendrorhous
tgtgcctgtgcctgtgcctgtgcctatgtctgtgtccatatgcgcattcgctatgtgccggaagagagaccttcatggagtaacagactcacagaagaaccgcctttttgttctcctctcttctccttccctcctcttcccttccttaccacgattctctcttgcgctctttgatggacaacacaggaacaacgttcagtggcgtggttagctaaagattttcatcaactcgtgccaagaaagaaagacttaaattagaacaacaacgcctgacaatatctctctgtcttcttaccctcatgcgcatgatccggaactcaggcttacggctcatctcggatccagtccggagaaaacaaacagattgttcattggcgtagatcccttcatcccagcatcctggttttgcctgaagcgcaacgaaatagactaacgatataggcactgatgttttctcttgggttttatctgttcaccttcctatagctggatctcaggggacattcagaaagattccaacttgtttgtccaccttgttttctcatctctgtgtccttcctgtatctctatgttctgctcaccgaatcgtccgattcgatgccattccctcgtttgctctcaatcttcctattttccgttgtctaaaaaggcattgtttactcaccctcaggtcaagtaatcgcctggggcgtcgaagccgaagctctgggggtcttgcctgcaggatacgtcaaatgcgaacgattcatatcatccctacagcctactgctatgaagatcggaccggaagagagggaggtagaaagaatcgacctgaggctacctgatctaccagtgcgctctatcgttttctttcttcagactaccccgtctttccaaaattcatccgtatacgattccaccttttcaaaccgtcgttcattttatcttgacacgacataaaaaagccaaacaagacggtctcccaggtgatgatagactatctgacccatctatggacgtatgctagagaccggatcaccaaagacattggttctcttggcgatcttgacaccgcctggatctttctgagtgtgcctgccgcttggaatgacacagggcatgaagtgatgaagtcggccgcgatagatgccggcctggtcaaggtgtttactctccttagtctcgtgttctgtctctgctaccgttctcgatcttgttttctctctatctttgcttacctattctcaccatttgtagaggtcggatcctagggataccgcttggagagaccggttaaaggtcatcacagagtctgatgcagctgctgtctattgtgcaggttggtacctctatctctgttctttgtcaatcgaaaggttcgtaaagaaggcatatgaatgtcctgtgtggtctttttctttgtatgtcgattacttggcgtgttgatgggaaatcgaccaaacgtagctctgacggaacttcaccggtccaaaatcttacgaaactttatcgtctttgacggaggaggtgtgggctgtgtgagtgctactcactcttctctctagcgtcttgtttaaattcttactgagactcgacagttccggttggactccgttcgataggatttgacgacatacaagctcctaggtaacccatcccgtttggacgtcacgcaagtttgcccaagatcaagcgcgaattgcggtagcctgtttctcgatttcggattcatagacttggtcaagtgtcgattgaaagatcatcctatccatgtacgctttccctcccccttttcttccttttctcctttttgtccatgtcagccgaagccttcgtctacttgactcttgactcaatcttcttgttatactctctccatgaatgatacaaacaagctcaacggcccctcaattgaaaactaccttcatgcgttcaccgaaacggacaaggtcatctatagaggagaacaagacgacgagaccacgttcctgttcacgacattcaacccggaagaaccggatgatccagctatcgggttgatcaacggagaactctccataaaaggcgaagtcttggtgggtcccttttctttgtgttctcatcattgaattagcgcgcctattgacaaacaatcccactctcttcttccttttcaaatacagagaagagaagtgtttgatccaatcatcgaccaggtactagagcttatcgaatctcacctaagtcagaacactatcaggatcgacgctttattcatggtcggtgggttctccgaatcagaatatcgttcgttctctttcattcaaccggttgcgtccgacctggtattcagtctgaacgtacgtttgcttctcattatcttcgttttgttcttcaaagtgttcgccagggtcgaacgtcagtttcaaaaccggattgatttgatcgccagacccggtgattgtgatgtggctaccgtacagggagccgttcggtacggactttcaaaactggcctcgatatcgagtgccagccgtccggaagtttcacatcgtccgtcctattcccttgctttcccagtcacgtgagcccttctcccctacacaagagatgaaaaggttactaggatctatctgcgtgtaacaaatacagctgggtgagagcccgtctgccggctgaagtgtacccaggttgaacaaagggggtgggacctaaaatccttgttctgcgataaccggttgtagtatttttcttatctttgtggtacaggtctttttttagttatgtgcttgatcttatcacgttcaaagcgctgacatctttctctcgtttcggtcgttatcgaatgggacaaagatgaattgaaagagagctatcattcggaggggccgaactgcaaggtttctcttgccttgtcttgcagtctgtgatacctggttatcaaatgcacgaccctttctttatatttttctctgtttaccaacgggctagacaatgtgagttgacctgccttcaattcaacggtttgcgcgcgtttgcaggtaagagagagagagagagagcctggctcaccgactgtactcaatcagtccctctctaaaaattcgacgaagcattgctttgtaccgacgatctatgagtctgatcctaatcgtccgaaaccgcatgacgatgaggatggaccataggaactatatgaactctgtcaatgtgtgtgtctcttgtgttggtagatggttcttccatatgtatagccaagactgtcgattgatggattggaagaagccggctggtcctcttacacatacttggtatcgaccaagaatctggccaatcgactttgttgtgcagtccagatagtggagacgagagatgcaagatacctaaaggtgttgaaagggacttgatctcatgcggacatttttggcttctattgacttggtcgttgagacaagcgatccttttgcgctcgggaaagaaacaggtacaaagatggtttccattcggaatattgtacagcagctcatttcgtttatctaggcatactagatcaccctctccttttttattctccttctactcatccatacgcgtccttcattcagtgtttctctctttcgtgtgagcaaacagttttacatgtgtaacatcgatgatgatcgacagttcaattgatgtttaaccacatattcatcagataaacgcagagatagcaacatgccgaaagaaaaggaggggaaaggaataagaatgtgatgtctctcctaagcataaacaatcgtccagtaagaaagagatttcttggagaaatcctccgtggggattgcaataaaaggagaggtttgtaggatgttctggccccctcaatgatgatcccaacgaaacccagaccttgtctgtttagagaccctaaaggagggactggacaacgtatttgggaccttcgagagggcgataggaatgggatcgttctgatagatcggatgatgtcaaaagaggaatgaaaggaagggaaaaaacaagataacgaggcagaaataagatcgagaaatacacaaagaggacaacatgctggtgaggcgatgcatatcctgttcaaatgggtggtcagctgcacgtccatctcccgtcatgtcatggcttgagagcctgatggagagaaggtggatggttggttagagagaaggagtaaaggaagatacgataaaataaaatggaataaaaagaactttagagctgtgctgtgccagcagaatcacgtgacttgaacatatcccgcctctgctccccatctctatagtgcgccgctagaagaatcccaacagaacatcagagcacatttcaagacatccaagaaagtcgcgcacaagtatcactcacagagcatcctctaggaagagagaaaactagaaaggatgaaggagaacgagcagatctggccacacacacacaggcaccaccggagggccgaagaaagccgtgcttacctaagccatctaaaggtagggaaatctcccccatcccgtttttacagtctgccttctctcctctctcaacactctccgtccaaccttccctctccgttcgttctctcgctcttgtgattctctttgaaacatgatctctctttgccgtgctcctttcgtaagtcttgctgatggtctacttcgatttgttgtggaagagaaacgatgcttgttgactgagatttttccctttctttcggcacttctcaacgcccattcttttttcttttttctttcttctttctctccccaccatgctatcgtccttcatctacatctgttccttctttgtttccaacttgacgtaacctgattcatacagtccgccaacctcctccgaccgttggcttctcctttggctgcccacaacgtccgagctggatctcttcgaatcgtcgatgtccgacgatcgatggctacccagtccaaggaggagtacgatctcgtcgtcctcggtgccggttcgttttattttcattcttcttctttcttccttctccaaagatagcagacgatggtcatagaaccattttctgcttgaaaggaaacctcaaaccggctggcgcttattgggtatctttacaatatatgcgtttgtgcgtgtgtacgtgtatgcttgatgtgggatggcgatgggaataggacctggaggttacgttgctgccgtcaaggcctcccagttgggcatgaagactctctgcatcgacaagcgaggaccccctggtggaacctgcttgaacgtcggatgcattccctccaaggcgctgtatgtgtcgtccttctctggttttatctgttgtctttgatttgtcgcctaatgacgtcgatctcccctctcttacgttcttctctacttccacctccaccttcctctttccttctctaccacttcttcccttcctcagtttggactcttctcacttgtaccacgtggccaagcacgatttcgccaagaagggaatcgaggctgatgtcaagctcaacctccccaagatgctcgccaacaaggatgctgctgtggccgcattgactggtggagtcgagaagtacttgttcacaaagtaccctgtcacctacctcaagggaactggttccttcatctcgcccactgagctcaaggtggccatgcccgatggatcggagcagaccgtcggtgccaagaacgtgttgatcgcgaccggatccgaggtcactcctttccccggtatggagatcgatgagaagactatcgtcagctcaaccggagctttgaaccttcaggaggttcctaagaaggttcgttaaatttccgtttaagaagagcatgagaggcgagcaggactggagctagacgagtgattgaggaagggggttcaggaaagagccaaacaaagtagtatgctaactcgaagatcctgtgtgatgttgttagatgatcgtcatcggaggaggtgtcattggtttggagttgggatccgtctggtctcgattgggagccgaggtcaccgttgttgagttcatgagcgccatcggagctggtatggacggtgaggttgcgtaagtggtcacttcttttctttcccgtcgcatgttgctttgaaatcacaggcgaggcttatcgtgtaattcaactttcattctgcagcaagaccttccagaagatcttaaccaagcagggtttcaagttcaagcttgatactaaggtcatctctgctcagaaggaggatagcggcaaggtcactctcaacgtcgagggagccaaagacggcaagaaggagtctgtgcgttcgcgttttttttgtcttgttgtttcgtcattactcgtccattttaaaagattggtttcactgacaacatcatcctatgtccggctactagcttgaggctgacgtcgtccttgtcgctatcggtcgacgacctgtcaccgccggcttgaacctcgaggctatcggcgtcgagcttgacaacaagggccgaatcgtcatcgacgaccagtacaacacctctgtcaagggagtcaagtgcatcggagatgtcacctttggccccatgttggctcacaaggccgaggaagagggtatgtctctaatctctcctccttcccccccttttttctgcttcttctttcttagtcttctaacacttcaacctcttatcaaacaggtatcgccgccgtcgagatcatcaagcacggtcacggacacgtcaattacgacaccatcccctccgttgtgtacacccaccctgaggtcgcttgggttggaaagaacgagcaggagcttaaggccgctggtgtcgactacaaggtcggaaagttccccttcgctgccaactctagggcaaagaccgtgaacgataccgagggtttcgtcaagatcatgattgagaaggagaccggtcgaatcttgggatccgccatcatcggccccaacgctggagagatgattgccgaggccaccctcgctatggagtacaaggcttctgccgaggatgtcgcccgaacgtgccatgctcaccccactctttccgaggctttcaaggaggcctgcttggactctttcgacaagtgcgtacccttctttctttttctttccaatctccgtcatgacaccaaacgtccacctttcctaacatgccctttttcgatttgcgcgtggataatcctcttaggcctgtcaacttctaaactcatcccccttttccttcgtcctcttatgatttccttctttacccccggtcatcatcgcatagttccctttctcaaaccctttcaaggttctatataatcccctttctgcttttctacccttgggtgtctttttctttctttctctggtcaatttcttagaagaaagggggggatcctctccagatcatgctatctctccccccctcctcgcctcagtttcttcgttgacgtgtgggtgcgacccaagtgaacattagcgacattatcatatctattgcaaagccaaagagacgaatacaactacaagtgaagatggaagtaagagtggatgacccttggatcttgatcctacccttaccatccatcgttagcccccgacttttcggccttcatcaacctgctcttcccctcgttcctcttctttgtaccctttttatttccgagtttaccaggggcagccttggcgtgatgtttagcttgagcacgagctcggtccctattaagatcagactgaacggtagatcgaacatcgtccaatttaggaggaggagcatgcggatgggttttacgcgtctgagttcgaggctggtctgtttcggacccagattcttcttcagcttcagagccggattcggtttccgggtcgaaggtggctgtggcggcggtggtggtggagagcgttgtggaagaaagcgtgtcggccaggttggaaactaatgcaggagcctgttcggaatcttcttcgtctgcttctctcattaacctctcgatctcttcctctttcgtctcctttccgtcttcttcttcctcctcttcgtcttcatcttcgtcctcctcctcttcctcctcttctgaatctgagtcctcttcttcggacccttcttctccctttagttcagccatataaccatccaacttggcagcctcgttctttccaaagccagaggcagccacctcgacgtctagagtgaacgactcgaccgagtcatccgagagtgctttcctgaaccgggggtagatctttgactcatagttgaaccgtcttcggaagaacgttcggatacaggctacatctcggttgaagtacctttttgtcatttgatggaataaacagatggattttaagtgagtatgaacgtcccggtccccttaagatagcaaatgaagtacaacgtcatagtaaaaggaggaaaaaagaaggaagagaagagaagagaagagaagagaagagaagagaagagaaggacgaaccactcggcatccttgtggttagtggaaaccaattgagggaaatcgatgacgacgggttctccatcttcatccctgatcaagatgttgaactcattgaaatctccatggatcagacccgccctggcaaacctgacgaggagggacataagttgagaatacaaccttccgggattaggatgttcggctacttgtcggagggcgtaaccgtcgacgagagacatgatgatgcagtgtcttgattgatcgatcggcgtgggtacagggaaaccattggcatgcaggacctaggtttggattcgttcagaaggaggaatggagaacaaagggcggagcaggagaagtaagtgaccgcagatgtacagaagcttgctgaggga

SEQ ID NO: 1497 - DNA, 33111 bp, Xanthophyllomyces dendrorhous
  misc_feature (15618)..(15627): n is a, c, g, or t
agaggctatatgtggagaggcaaaccttcatgaaagcccattccttttgagcggccaaccgggacatgtacatccaagtagccgactttcgtttgcccatgtaatcccgcttctctttaatcgcacggaacgaaattcgacccagtctagaatggaaagcagaaagaaagagtgtacgtatgtttgaacggaggttattagtaacttcaagtgctgtcaccgagtctgcggcttcacattcagagagaggaaagtggaaagaacaaaccgatgcatcttcatacaaagcttgttgccctctttatcagcgacaacgtagatgtcagactctttacccactccgatttgagatccaacagaatagagactgtccctctttgccatagctcggatggccaaatagtcgtatcctccgtaagtgagtcgatatccgtcgtctaaagatttcgtcccggcccagaaagaaaagaagcatcctggttagacattattgtcgatcgaagggatgcacgtccgaggataataccggacggaaccatagaactagtcaagattaagaagaattaatacaaacacttgatgttctgaactctagcaatcaagtttcgtttagctagttgacccatcaacttgtttcccgctcctgatcgaacaccagagatctgcgcgatcaacgatgcaggaacaacctcatggttcttactccccatctcggtctgatccgttcgaaatatgcaacattaagagaggaaccgacgacgggtcatcagttggtatgctctgaaacatcactcgacttgaccgatacccggttcggcaagtcaagaaatcatggaagaatcacggttgtacatacagctgtgaggatcctaaactcatctgcggtgagatatctgatatcggtagcgtctagcttcatggcgtaggagtgtaggcgagcgcttgtggaagagtaccagccagggaaagaagaaggtgagaaacccaaagtcaatgaattccaaaaatgcacctgacaaataattgaatagatgaatttcttatcgctacgataagtgctggggtaaatacgtagattacatacctctccgaaagcatcgatgaggagttatctacccgtggaaatgcatacgaccatcatcccctggccatcgtcactagccagagctggaccacacgtcctgattttcttcaccttctagtcccagcagctggatccagggactaacctccgagatagacttattatcaacaccctggaagagcagataacgtcatcgaatcttcgaacagagtcaagggagagtaacaaaaggatacagaacgaggttgccaatccggaggtgaaagcattcaatttcccgggccggatcgaaccgattagaggctggccctggcccgtgctacgaggcgtctttacgacttgatcaactctctatgtatagggctactcacctcctatgtgttctcggtctcaaactaatccttcctagaatctgtggcttgatcgaattagaatgtgtgtgtgcatacgtacggagtctagactaattctgttccggatggcccgatgggacgatgactttattcactatcacaggcaaagctgggcgatcaccacgtttgttgcactcatgactgaagcctatctctcacgctcatccggttcttctaacgcatcgtcgagtcgtttaagattttgaatctgacgggtatacatgatgtttaagctccccgaggtgttcactccgtagctcacagtcactcactctatccttctactactgatcatcgctgggcggtaggactcgttcggtctgaacaggcaactcatccctgcaaatttatatacaccgaatcttactctgtcccgctcgtcggataatcttaatcacatccatccatcagctttccgaatcagccagtatccatatattttcccgattttattcctattggattgtatggatggccaaggaacctcgtctgtatgtatagcgaggtacatgattttagggtcggcgtgtggttaaatcaatgttcacgtactcacacccacactcgcattcaatcaaaccgttccttcctcgctctctcctctctattttgcccgacgggcttgacccgctccgatgagcaggacaaggcgtctttgttcccgttgtggatagtctcttctctatcaccctctaatcgtatccaaccctttttttttcttgacttttctcaaggtttgatataaaaagaacgggtcgatgagaggaaaccggagtcttgctttcttcctttcttcgaccactctactttccatctttccttctgcttgctgctttttcatttgctctagctactcttcgctaattcttcgccgtgatgcttttctcggcatccgctcttctctctaccttactgatcgtcgcctcctcgccgctcaccttggccgtgcccaccaaggttgaggagccacgggatcttcgtgcaagaacctccgcgccagtgtgtaattgtaagttctgtacacatggaatcattcatccacaccctttgccgacgcaccggactgaccgatcttgttattgaacctttcttttgatcgtctcttccaatttgttcatttgagctaatagtcgtttgccagtcagcgagtggttacacggtggtaggctcttcaaccgggaattctggcggttaccaatgtatttatacatcaacatctgtgtttgggtatgtgtcgatctatatttgtttttctggtctccttgatctacccacgcagtcttttgtagttgacttttgatcgatctatcattacgtcttgctctgccggatcatggatgccaggaacaataaagttacatgcacctacaactcaagcggtagtataaacggtttcgcctatccgccttgcaaatcaagcgtgggcacctgctcgtcctcgaagcgctcgttcacagaagcgcagagcgagttggcggacaagatccaaaagagacagtggaagcgtacgaatgcaaaggatggtgtcgctcagaaacggagatgattgcgaatctcttgagtatatatggacccaagaccggggcttgctgccccatggacatttccctcctatatcgctgcttaccttctctatcgctcattcgtttgcttgatctttgttcggtccattatatcttcgctctcgtaactatcttcgctttctatctccgtttctgcttgaggctttctcctcctccccctctatctttctttgttccaagctttagttccggttctcttattccgttctttttcctcttcacctgtaaataaagttcttgttcgcctgtctgcttatctgctttcatcctaggtgcgtatctcatcgcccgcccccatggcagacctacacgtctatagtctatcctatgagcgatcgatacagaacattctgcatctgatcttcctcctctacgagaaccgctacactcggcccgacggatgatgggcatgtttgatgacgctgccgatgacgcgtctgtagccagaaaacgttaccatggttacagacaaacgttagcgggtctccctcctcccggcctttttttttccggtagtcacagacaatcatctttcaacccaaccaacacatcgaaagctttcgttcagtcaccactcgcatccatcatgttcgctgctactgccatccggtccacctctcgagtcgcctccaaggctgtgagtcgttcgttttgatgtgttgttttagggtggatgcagccaagagagtgggagatggatgaggagatctcgtgccggtcttttttttcctctctctctctctctctctcttcaccttccctcggacccatctccatattttctatcgatggttctttccttctgattggtcaggtcgcatgcacagataactcttactgatactgatgcttttgttcttcctcttgtctgctagcccatgtccatccgagcctacgccgacaaggcctctggaagcgttgacaagaccttcaagtacggatttttctctctctgttctctctgaccttgaaactccttcgttcttttctttaactcagaaagatcgaagtgctgattcttctgtctgaaccatcttactcttttccgtgcactgtgaaacagccagcgagagcagacccaggagaacatgtacgttcgacagcaggagctcgagcagctcaaggctctccgaaagaagacccagcaggagctcgaggccaagcagaaggagcttgtacgtttctttcttaacgttctttaactaatcccagacggagagcataatagttctcatgccctccttcgcttttactattcgtcgcctcccgaaacaggccgatattgaggctcgacacgagactgcccagaaggcctctgagcagaagtaaatgtaaccgaccatgctcgtccgacttgtgttcacttccttcctcaattaattcatcaatattgtccattccaaattctcttccccccccccttttgtttctgctagcatgctgcttttgatgatctgaaccttcatgtatacttatgctgttgtgtctgtctatctgtcccatgtttggtttttatctatctcttgtgatggtggccgagagttgagacaactggcctttgttggacaaatctgatgtgtgtctgctaggtctggcagaggcaagcgcgacagagagagagagagagataggcaacatggtgcacccaaagcaaacatggtcgatagattgatacagaaagagtgaaagtgggagcagaatccattcaatcccgatgacgatgagaaagaagagaaaaacctgcaaacgtcgtttttccattcaatccgtttcttccttctcgtccgtcgatctcatccatctccatcatcacttttgcatacacacacacacacacacagaagcacacgccaacacatgtctgctaatccacttgctcatcataggagaacgaggagggctccgaatgacgatcagccttcatccagagatgcaagcgaggaaggtatgtccggcctgttcttcgtacatccttcttgtcgttccgtcttttcctttcctttccttttttttttctttcctttttcttcttttctttcctcttcatctttttgttctcgcatatatgtcctgttctctagctacttcagaccggacaagctcgctggactcgatgttgacgacgagccgatctttttctctccatatgaacgttctcatccacaaacgttcatgctcacttggctgaaaacagacaacgacgagtctccgcacaactcgatttcccaacatcaccctttgaacccctctgggaccaccaataccaacacgggaacaagcatgaacactaacctggccagtcaatcgtccaagccgcatcatccgagtccactccgaacgaagaagacggcagagagtgggttgaaggttgaaaacagggatgtcgaaacaggggccgagagtcagtcaatctatgatggagatgtcggttcgtcccgggtggtttctttcttcgttcttgcctttcttggattttccgtttagctgaatccccttgggtcatcctttgtcacatcacatacacccagagctatcaggtgcctcgactccgaacttgccttcactcactttgccgtctcttggatccctatctcaacaagccccgacgtcgtctccgtcctcaacagacgtcactccgtcctctgcgaccgctccttccgttcttaccggtggggtccaaccatcaatcgtgacgctgtctgaagctgacattcaagaattcgtccggaaggcgattgaaggagagtttgaacctagtgtgggagtgcgaaactacaagatcaacaagccaccgacatcaagaccggtgaggatttatgcggatggtgtatatgacctattccattacgggtacgttcaaagttctgttcttatcggagagtagtcatcgttagttttttgaatccagataccaatcatcctatcgctctcctccacagacacgccctacaaactcgacaggcaaagctctgcttcccgaacgtccatcttcttatcggtgtatgctctgacgaactctgcgccgctcataaatcccttccagcgatgacacacaaagagagatgtgaatccgtcggccattgccggtgggtggatgaagtcgtgccggaagcaccgtgggagatcacccaggagtttttagacaagtacaaaatcgattatgtagctcatgacgaggagccttacaagagcagcgggaaggatgatgtatatgggttcgtcaaagaccaaggtgagttctaggctctctcttcctctttttttttctttttctttttcatttctcagaaagtggggtgggcggatagaaaatcaagttcaatctttacgtcagagtggaggtgtatctcaaaacttagtctgacatattcgcgcgcacatacacacaaacaaatcaggccggttcttaccaaccagaaggacacccggaatttctacttctgatctactcgaacggattgtgtctagctataggaacggagtgttcgatccaaaacttgaaaaggttcgttcatgaaacttttatttatttatttgtaattctttattggaatcgtcatttcgttcgagaggacaagagaaagatcgagacttattctgcctttctgttcgatctttctcctttccggattgtgatgcacccatcaaacagaacggtcacccagagttgaaggcggacagagtcgactggacagtcaaacattctccgtagcctctttttctcttcatcccctgaaaaaaaaaacgatctacttttcgtctagggaaggggcaaacccttgaatttctaatctttatctttcgcattgtttccatcatctaaaaactgatcgaccaaccaacgaaccaaccaatcaatccatgcatgcatggattaaatccttttttttcccttccgaatattaccttccgacatccttgtttcaagccctctcttctctttttctttccaagttttattttcgttctttaattctcatgtatacatcactgctccgttaatctttcacctatctgggtgtcatcgcttgctaactttgtttcttacgacagatgatgtatatagacccaccgacataatcttttgcctctctctctctctctctgaccatgtgcctcgttctttgtatccttctttctctgttttctcgcgccagtctgaattttgattcgagatatttgtagtacaaatgaacgaatgaatgaatgagaaagaagggagggaggctgactcatacacacatccagatttaaaaaaaaaattaaaaaaaaaaaacaagaataacaaatgaaagacggaagagattcagggaatcagagggaacacggagaggcgcgcaacgatcgacgatataaacagataacagaagggaacccttttaatccgcatgggtctttttatccgcttcctcgacttcctccggctctggatccgtggtgatctcctcctcggcctcgtccaaactttgtttctcgcccaggtatgggttcctcaccacagacacacagcccaacaaaggcacacagagacagatgccggtgatacagagcaaccgctgggtgtgttggtacgcgagcaccaccgcctgtctttctggggtggacatcgggtaggacaagatgaaggtgaactagacgtccggtccatgcaccggcccaggttcgggatcagagataaagaccgaagatgagtgctcatgttcgtgtttgtgcccctcgagaaagagagcgcaaagacaggtgaacggagagaaaccgagggccgagaacttacgggatctccatagacggaagcgacgagagtggagttcacagggcctagttcttgggccagatatttagggaggacttgtgtccagatcgctccagagatcgtatttcccagtgccgacccaatggagtactaaagagagaaatatcctcgacgtcccgtatgtcagcgttggcgtattcttttgtttctcttttcgaaaaagggaacgagtgaattgggtgaaactcacggcagagagatacagtgcggtgatgatagctagatgggatcgtttcgtcgcagaccgaatgagcgcctgagcgggataggggaacaaaccgcctaccgagcgttgcagcagcgaaattgagatagaaaggcgcgtcaagtccttctcttaggtatgtgggttttgtttatttatttagatcttttacttcacagcactcaccagcaataccaagaacgatctgaccgccgatcaaacctgaatggtccgaaacagtccttcctctgaatctgatcagtagaccaaacccaatcatgtagatacatacgccggcaaccatgaacgctgcttgtcagtcaagcgagggagaagagacaagaggaaagtaccagcaccaacatccatatgtgagtaaaattagagttgaagaggaataaaaagaaagaaacaaaaaaaaaacacacactactgacgtttcaatcgacgaacgcgacgaacgacaataccagcgatgacaccggtgatgaccgaagtgaacgaataaagcgagacgattctcgttgccgagagcgtggattcatcgaacgccaccacaagcacggtgtctgagaggcgttcgttggtttgtgtaatgatgtgtgagcttccgggtctctactgggaacctcctatgatagacaaaacaaggaacaaagacatacagagataatctccctgacagtaccaagtcatgttgagcaggacagcaattcccagactgctctcagcgtcacccaatgaaccctccatcagcgttcgcatcttttgcacaagagaggaaaggagacagctctgatttagattcgtaccagcctatgaccgttctatctttgagtaactatacaagccgacgaaggagatgatatttagcatttgaggaagttattcaagaggcaggaagagtagaacagattaacatgtagaggaacacagggatgaggcgcaaacctggtctcccataccacgaacgcgggcacacaaaggatgccgatgacgagcatcacactgcggtcaagtgtttgtccaccaagacacgatgagctcgagtcgtgttacaggcggaagaaaggaaataattaaagaaagggtagtcagagaggccccggacgcacatgatgtgagctttcttccaagatgtagagactccaccggctagagtgaacggaaggagaatgagcgtgaggagcgccacgagctggatggattacaagacatggtggactttatcaattttctctataaaggaagcgcaaacaggagtaaaaaaagaaatatgagagaaacaaggtcgaaccaagacaagtccgatgacgtccaactcccagaagagcttggttgcaaggtttcttcctccatatttctggaaaggagtgggtacgtcagccaacttgccgcccctctttgccttccgaagggcccacaagagggcgcccagaagaggaatacagcatgccgggaatattatacctttttgtaacaacaagaagagttaggacgagaaagtcgcgagaaaggatgatgagaccaaggaaagagatgtggagagacggataaaattatatagggtgtaccaaacatcccgataccccagttccaactagcgttcgcctcaatggcagcggtgatatttccactaacccacgcgtttatcaagaacgggagggctatttttgtgcgtacaccaacaagccggtcgtcaggggcagaagaagggagaaaggagaaaaaaagaaaggccaaccaggaatgtaggagaagaaaagacgagatctcaaactggtggtatcaccgatagtgacctcgatcaagaggatgatcgtggtgtaacccaactggtacaaaaccgctgaagaggccggacacaagatgaatcaagactaagcatgtcagatggagaagaaagaaaaagatcaagtgatgagggaacaggagaactaaccaccagcgcagaaagctttaatgttggtagcagtagcttcgacgatcgttcccacacagtactgttatcctcgtcattaaaataaaatagaaagatcaaagaggcaatcttaatgttaagatgttatccaagcgagaacaagaaagaatgacgcacaaagatgatggagaggatgattaattcgacccgaccaaatacgtctgcaatctgataaagaggaaaagggaggaaactgataagtggagtttaccgagagggggagagataagaacgggcagatgagtttaccttggcaagaggaggctactcaaagagatcagagtaacaacgaatatgcaatggtttcaaacctcagcatcagaatttgcttaatgggagtaggctttcaagagaaaagattgagcggaaagggggaaaaaggccaacctgagcggcagcagcgataatagatctgaggacgttgacggtggccaaaagactgagatttgagtaagaagctgtcgcaaacgcttggaacgtcgctctggtggttccgtcgattccataggcgtaggcgacaagaaagattcctttttttacggttcccattgtaagcccgtgacatatgatagaggatcgatatgggaaggatgtcagctgcactggagtattctcccagattcaaggagcgacagagataaacgaacggacaaacataattgttcgaagcttggtgtcgatttcttcagagatcgcagcgattcttcgaactccctttatttgataattcggcagagagggaggaaaaagatggttcagtcaggttgcatattggcttttctgtacagacaagagagatcagaggacgaggcctaccggactagcgtctccatagaggtccaactgatattcttctggtctttctttagagttctttcggtcgtttgagattgaagacctataggctggagggctacgaacggaggcggccatggcgtgtgtgagaattctcaagagtacttactctgaagaggatgaaggagcaacaaggtcgactccctaaaactttggtttctgagaaaagtgagaaaagggaaagatatgcacgttctgctttttctaaaaagattctcttgtatgactattcccgagatcctgttcctagatgcacactgtaggagaaaggacagataaaattaatggtgtcttctccatcttcatgtcttatgaagctttcggctcagggaagagagtgaccaatgagaagaatctatctgataactcagaattcataaaaatggaagaaaaaaaaaacaaggtaaagagatctttgtggagaaccagaactctgcaaaaagtaggaggagatccttttaatccgagcgtcagcgaagagcatgtgcatttttcgtcagcgaaggagaatgctcggtcagataaaacccggtcgatcggtcggtgagttagatagttagttggtgaaccagtcagtcagtcagtcagtcagtcagtcgatcaatcggccagcaccaatccttattcggcccaggtatccactctccgagttcatagaggaaaggaaacagagaaatgttctcttgctcgttcagaacatccactgagagctcaaggttgagacatatccaatggcgttcgaaatggaatgaacttgaagcatactcggttacgcctgactcggaaggaatcggaagggaaccgcgctggaccctcacggaccggcctcgacctgagcgaaccgtgggagaactaggtccagccttcgagtagccaatttgtaaccgtcaggaccgggctcgagaccgggttcggctatctcggaaccaaaaataccgagccgaaagatggcgcagcgatcagttcataacgtacagcctgcgccgcggtcgagtgaccgccatttcacgccatcgaccgcgttttggatgaatctgattgcttttcacatgaacatcaaaggcttatgtaagagtcatcacgtggcaatcatcttatgtaagccattcgtcctttccctcgttgtgttcagccttcattcgtttgttccttccctgcgtcttccgcttatcagaacgaaacatcgattctctcaaccctcgtcctatcccatccttcttccatctctggctacatcaagtggatcggatcccagatagcgtctctatataagatctatcgctctgctacgtttcagccattccgtttcttctggtttcctgcccgttggatctggaattaaacgttatctctcgcgttggctataagaggaaaacccctcaactcctgatctctttcagcacatttttccacgtccacataaacattctcatccctattctcatccaatatggcggctatcgactttgacgatctggttgctacgatgaacacatcgtgtatcggtcaagaagcgatggacctccgagcacttcatgtaagtcgatcgattcctaatcaggagttgtgttcctccactttccccttttacttttctatgtctgtgagcatctgggcgaatctgttgtccagagggaaggagccaatatctgttggctttttcacatttccttctacctgtttctatcgtcttcatgtccaactctatttccacgaacccatacctccgtttcctgaattgaagacgtgctaaacccacggaccggctcgtccggcccgtcgggtttaagatgtagacgagcgtgtaatcttgtgtactctcttctatctcttccttctcgttatcttctcttgtttcggcaaccagaagtgccgcctgatccatttgggataactcatgactgattccctgggtttcttcttctcgctcctacttctcttcggccccttttcatgttcaaattttgccccctcacacaccgtccgtcctcctcccaatctgttctttctaggcccatctgtcacaaacattatttatgccaccggcgcaggctcatcctggtcagcctacaccgatctcctcataccatcagtatccgtatgggcatctgccgggcccgccgccatcgtcgttgacgtcgaacgcgtcattcgcaagcaacagccatcaccctcacaattctttttcgtcccgcccgccaaacatcctgcatcataactcgtactccaaaggtttcgaacagggtacaggctacggcagcccgatcggagtgccggtctcgagaaactcaggattggctgatttggacgaatcactcgctgccgcttccgctgctgcttcatcctctgtcggggggaccccgaattcaatcacaccgagtaacagaccgtactacccgtcgcctacctcaccaacttcaccgctgacagaaggcatggatacgtattcatcgttccaatcaccaccacctgctcagaggcagttctaccagccaaacgactcttcaccttttgctaccagacaaaccaggagccagaccagacgaacagtcgaagccgaggccgctgccgctgctgctgctgctatgaccagatcatccggccagaacgagctagatatcgacatggccgattgagacagttccttggtaacgaaaagagtgtaacgattcagttcttggcatcacgaaacgtccttcttccttctttctttctctcccgggtttttgtgaattttcttcccttctcttttgtttccatatatacttgaacggaaccttctactcaccctctagcatccttttcgattgataggtttttttttcctcacgcttcctccatcttacctatatctccgccgtcgtctttcaatcttcctcttcttctttcttcattccttcatataaaaacgacattctcatcttgatgcatatagatttcgctcccaaggtaaacttcccttcccttcccatctccatacctgctctttctgtcctgctttgcgttgcatttcgccgaatgaccgtgttcgtttgcttcgtttctccttatctttctctgctctttttatttacgcctctttcgatctttcgatctctcccctcgtcttcaagtgattggttccatttacgctttctacgaggacagatgaaactagtcatggctgacgacgggagattgtcgatcggtctgtaccgggattgcttctctttcctctttgcctcttattcttcatatcctcgtcgactgtgaaaacgttgtattcttcttttcttgttccttctgtcttcttctccctctctcactctcactctccctttctcactctctctcgtcaaaaaccccatctctactctttattatctgtttctcaaattacatctccttacacttgacgatacaaaagccctattgctctgtcatcctcccgcaagagtcccaaacagaagtggaaccgatcgagagaaaccaggacttgtccccaggcgggcgcgcgcagtctcgatgacgcgcctgttgcttatttcctcgttgacgtcattcatccctcagtttccagcctttctttggagaacatcaaaaaggccttcgttggtctggtcaaattgatttctcttttcttcttctcctctatctacatctacatcaatatccacatctcttggtcgttcttctttgcttccatccatccatccatccacccgtttttcgtcagcccaaagtcataactactacgataatgtcctacgctactaccaaccctccttctggaacccaggatctccgacacggtgattctgctcctcactctcattctacctcccactcccacgagcacacgcacgggaacgtcggcagtgtgcccatcagcgggttcgctttgggagctcctattggagagtattcgtcctctggcgtcggttccggtgtcggaatcggatctgctgccggtgttggagccggagctggtgtcatcggtggaactagcagctctacctacacccacactcacgatcactcccacgccgacggacactctcatgaccattcccatggccactcccactctcacggaacggagggtgtcacttacggaaacacgggtggaaatcgacaggacactgaccctgccaggaaggaaaacgtcggacgggaggctgagaagatcaagaacaacatcacgcctactgatgctaccaggcagaacgataagacctacgctggattcgatcccaaagtaaacactcacaatgacagttcgtcctcttttcttcttttttttttcttttcttctctttttaaattattcctcgggctttcttcctcctctcgtttgtgaactttgactgatagtgacgcgttttgtaacccttccgtatcactctttctcttcccccccaaaaaacagacctcgaacctgcagtcgctaagcccaagcaggtagagcatatctcgaccgatggtcctcatggtttggtctggcaggagtccaccgggaagtacgttcaccgaagggagctcgagggaaagaactctatctagatctggtgtcctatcaacctctcccatgattcttccttccgtattaatcctatctatatctggtataatgcccgctgtggcgtccatccttgattcttgataaccctctatgttgtctgggggggtgtgtgtgtgtgtgtgnnnnnnnnnnattatatagctttgtagtgtaaaacgtctgtttcgtttttcgatcttgtgttttatcttaatgtatctatccatccgtccatccattcatcgcggctctgtctgatgtgtgccgttaagattccgaaaggtttgcagaaggaacaggacatcattggaggagagaagaaaaaaaccttgacatttccaggtgtaccggagagaaaggaaggaagtaaggacaacaccagatataaaactgaaacaacacatctaagaagaaaggaaagacgagcagacaagcagacggatatataggtaacagtgctcgagaaagagaataaaaaaatttaaaaagaaaaagacttgttaaccaagacggggacactcaaacaaggaggcttcgttgcaaacagagtaaagaggccggagagtcaacaaacgggaagagacggaaagatgaggatgaattcaagaggagaggcccctccctctgggatgaatgattatcaagacgaagcggattagaattgggtttattcaaagaacacggatgggtatgatataattactagaactcaaacaagacaaagcaagaagggggagaagaagaaggaaaaaaagaaaaaagagtatggacgggaactcaaaccggatcacaacgcccctccggctaggaaatctctcttcttatccccatccacccctgttgtcggtatcgacggagcatccagagggactcctgatcgagcgtgttcggctgatcctaaaaccggggtcgatcctttcccatttccgtccgaccttgatcccggtccttcgtgcccatacccatactcggcaccatacccatgttcataatcgtattcgtcctcgctgtcaaccggatagttaattcccatccctagacctgcctttcctttcccgacgacgccagagccgggtagagggatagtaggagatgtaggactggttgaggttgtgaatgtaggagtggaaggaacggtcgagaatgctccaaatctggacggatgtccgtttccattgccaactaaagaattgttgttgctgttgttgttggtggtggtggtggaagcattggtggaagaggaagaggggtcgggagagttaacggaagagttggtcttggaaggaatcgctaattgaccaaggttcgttccggctcgacgttgtagcctcgctctagttcgcttgatatcttccctgttgtccccccgacataagcaggcgatcagtcccgagtcgatgattaaaagatgatgagaagaaacatcaaaggagagacagtcgaacaaaaaaaagaggaggcaaacgaaccattcgattcgtaaaaacacccacatccacctcctggccaactccaaagcttccatcaaaaagaccccgctctcgatctcggatatcgaatgtagatgactgctcagttttaaactccatgtgaacctcagaacgagatcgacgatgattgcgaggtaataaatcgttggatctgcaaaatgcatttcctttcgaagtccgaaagggtggtcgtccgagtccactccaaagttgtttgcgccgttgttgttacccccgctgccacccccggagaagggcgaatagttgacggaccgagaaggatgtccgggatggtaagggtacgtagatgaatggtgtcggtgatggtgagagacagaggtcgtccgcttgtggatatctgatcgagcggcatacccggtagggttgtttcctggatacccggtggttgaagacatggttgatgggaatggaataatcgagggtgaagtcaagggtttactcaacgaaggccgtctagtgttcacagaccattcggacggagaaagaatagtgagtccccaatcgttcgtgacatcccaccaaaaggaatagagtgagttgacaaagaccgagagaagcctgagaggcgattgagcaaggggcaagacgttagagcacagacatgtgagaaggaaaagagggtgaggaaacacgaaccacagtcggaagagagggtgttcaccgaaccacctgttttctccgagttcgttcatatcagtcacacctctctcggctgcgatatcttccatgacggtcttctggacggccgagaagaggatgacggggaaggcggtggaatatttgagcgcgttcgctaacggtcgggtttgtttgtaatccgagctgatatactcgaccatacattgtctgaaccggatcatgtatggtattctttttattcatttattttcaagatcatatgatggagagtaagccagcaagatcgaaagaaagcagcctgtacgttcccagagttggatagaactgtacgtacgaagtgatgaaaggaatcaagtatggaccgagtgctccgccggcaccttccagttgagaggccgacaagttacccgcaaagatcaaacacatcgagacccaaaggtcaccaaagacctttgcgaacgacgtcaggatatccgcgcagattacatcgacaaagtgaaccggttcactgagtggtgagaagatcgttcgtttgatcgtctgcacaaacgccatgcgttctcttctccatatccgtccgtagggcgtgatggtttcggcgaggacacccagcccggtcaacaaaggaagtattctgtacgagttcatcttgtcctgatccgttccaccggaaagccagatgaacagtatccacccaccgagggaccatccaacgagcacggccaagagaccccaaagcggtcgaataatctctcccgcgcgggcataaccagctgctcctctctccctactagaatacccgccgccgacgttggattcgaaaaagtctccggggttcccaccgagaatggtcatctcctcgtcatcgtcgtcgtcgtcgacctcgggtaagacaggtctaccggtggtgagtgcctcgctggaggaggatgagggagagttgatggcgagtatatagccaacgtcgattccaagatgatggagcaagtgcaagttggtcgtccagagaaagagcccgagcccgatgaggaagagcaccctataagggaggcagaatgatgaatgaaacgatggaacggccaggtgggtatgcgggttgggtgtcagcaccggtggagtgtctatatccatcttgagaggaaagaaagattgcccaagaagaagagatagagggcgggaagagaggatgtgtatacaacgtaagagggcactgagggcccggaaagggagtggtctagcctagatgtaggcctgcgcgacgacctttttcacggtagagtgtgctggaacgagagaagacacgcattcagaccgcatgcaaacgatgagcatggacagacgatgcaagagaatgaaaacaggctaagggaagctgatgggacgaatgtattcttacctatcttggcccggtcggcctgccttttaagaagagaaagaaggatggatggatggatggatggatggaagacgaggccagggatcaggctgagagttcaggagagccgagacgctggttggatgtgtatgctacttcggtcacagacagagtcgagcgagtcagcaacaggatcgggcagccaacagaacgaaggaatcgacagaaactgcacgctcaccacttgtgatggtgaggaaggactatatgcactctctgctcgggcacccgctaaacacggttaagtcccctgatgcctgaccctgaacgaaaggattagaaaattttgtagtctgttttaggaaaagactacgaaactttgtattcacttccggccgctaagattgcccagcagaaaacatcaggcaggcagagcatacaccgacatacaccatctctcctcgccgtgctctttctcgatcgtggacaggatagaactcatcaagcaatcatcaagggaatgggcaagacccatagagcttcaccgtcttataacggcaagaagcagaagagaggcatgccgagtagtacgtccgatcggtcgtcttgacattgactcgtcttgcctcacctccgacttggagttcaagttcttggctgaattcttttttatttttttatttttcatggaacttttctcttttctctttctttccttgggactcttcggtcgacatctgtctgtgtttgtctgttgtctgtctaggtcgggttaagacaagatcacatggttcaacctcagacttttccatggacgtggcgacgtacgaacgggaacttaaagctcaggttggttcgatcagctctttcggctttcggcccaaaggtctcagaggtcgatgacgtgggtgatgagagtgggatctattcgttcacatcagatgaaccatctgggactctattcttgatgagacgatgagacgaaagaacgaggcaaacattctgggcgttgctcatcatcgttcgttggttgactgaccgtcaatctttatatcctcgttctatttggctcgctcggtttccgtttgttcttccctctcttgccatttccctctctccctctctttctctctcacgcacacacacacacacacacacacacacacacacacacagctggccagcatgggactctatgcaagcaacaccgtcggagatgggaattgcatgttcaggtaaacactatcctttctctcatgcgaccatctttcgtactatcgtacctagctctttatctaaccgccggatcgctcaatgtctttcttcctctcttcatcggctattgatccgtaacgcagagcgctctcggaccagctgtacggtacacccaaggagcacatgagtcttcgtcgagaagtacgccagtgttctacccttttctctcgtcagcactcctggagctgcactctgatctctgtctgtctgttcactttctagatctgcgactatctcgatgccaacatagatatctttgagttctttgtggacgatgggcgaccgtttgcagagcacatgcgcgccatgcgagagaacggtgagcaaatctaggcttatatacggttatatcatattcgcaagtgcttgcctgacacatacacactcttgatacaggaacatggggaggacatctggagctcacggcgttcgctcgactaaaacaaaagtggatcaaagtcgtccaaccgaacgtacgtacgagtggcctgatatgtgcgatggtgtatatgctgacctgaccacaacacccgttccgttcctcgtccacacagctcgtctatgttgtttcgtgcaaggacgaatccccagggggtacccctcgacgggcggctggaccaatgtttaaggactcggacgtcatctatctcgcttttcacaactatgagcactggagtagcgtccgcaatctagccggcccccacgccggtcctccgttgactaaggaagtgccgagaccatcaacctcgttctctcctacgagatcatcaacatcgacactctcctcaccacccagccggtcactgtcgcccacatcgttctcagacaaaccgtcggaagtcgaatcattgattcttagctcaatcccttccggatcggcgtcgttgatcaagattcgggagatcactcgacaagtcgccagaaaggagactgacggacagatggacgatgttccgtgggagcaggtcgtcgaggttatcatcgaccaactagataagaatggcgatggcgacaaggaaatgatggatctcgatcgtggccatgacccttcccctatttcagcccccgcttcgaaaacaccgccgcctttagaacagattttgtcccaagaaaccatcaatcaggatcgagaagaccgaggtcgaagtgtactacctactctcgctcaaagagaaggacacccgtacccatggagagaatcaagcccggttccttcgacggacggaagttcgtttggcgagaaggacgatcgatcaccgtccgttgcttcaccaagagttgcttcacctctcgtggccgatgctgctgccggacctggtggcctggctaagccgaaacgaggccggaagagacgatcgccctcggcttctgtctctgcctcggcggtcgcctccgggagagtagcaagtaagaaagcactgttgccgagaaaacagccaacgaggacgtccgctcggatccgaagctcactcgtcccggttggacaaggcagatccgaagtcgagggctcgtcgccggctccttccttggctggaacagacgtctctgtttcctccaccggttcatcttttgtctctggctctggttcgtcggtttcgtcagcaaacccttctcaagggggggagacagagggaacgactgttgtgtctaactcggcgcccagcgtaaagacggtcatcgccccagctctagataactcacagcctgtagacacaacactctctgccgacgatccgactttgatttctgctcgttcgatcccggtcatcgacaacagctcgaacccgtcttcttcagacactcgacccgctcgacctagacaaaaacgttcgcttccgagctctcttcctggctcgtctgctctctccaatggggctgagttgtctgattcgacgtcggctagttctcatccgactgaggatgaggacgaggaggacggcaacgactcgaccacgtcgtcctttgttccttccggtccaaaatccagatcgaaaacaaagccttcggggccgtccggcacgacgaaagcgaagaaaggaccgacaggaaagggaaaacggacggagaggaggacaaaggtggcggaagctagagctgccaggaggttggccgttgcaggtgagagtgttgggggcgaaggcgggcagcagggtgaaaagacactaaagaaacgcagggaaggaaaagaaggtgagaggatgatgacgagaagccgaaaatcattgggaaccgagcctggaggaggagcggcgtcgaaggaggttgggaagactgtcgtcggtgggttcaaagagttgttcatctgagggacattgaacgttatctgcctcccctctcttttctctcctttttatcgtgctgggatttctttctgtcacctctttcttccttctttctcttaataccatcatccacaggacagaacgttgtgtttttcttgtcgattttttaaatcacattcttgctctcctcctgctcatccgttcaattatctttttgtcatctttcaatctgtggttctcgtttcatcttactctactttgcttcattcttcaattctcttcgtctatttcatctctttgctccctttcactctctctctctctctctctgtatcacaccccctttccaatttttcaacattcttcattgcatttgcatgacagcctcgtcccccctttcctttcctcccttctctctttgcacgctcacgcacatagtcatatctcatacttcataagcattctatattcattccatttgccgatgtacatctgttatatatcacatcacccgttctctctctctgtctctggatcacgggctcttcacgctcgaacacccgcaagattcaaggaataccgcgatcttgagctaacgcttggtttttatcttgatccttgcgtctttcaccttcactcatgtttcgccgtttacctctcttttgaaggaaatagaacacaatcactgagacatgtcaagacgcacgagaaagagaacgcgaaagagatgaccaagacgtcttgtgagaaccaaatcgacggctcgtgactcgcgggatgagatgagatgagatgagatgagatatgagttcgttcattttatataaggtgataaaaggaggatatatatgtatatgtgcgcgggtgcgtagatgcaagtcgggtcgagtggactaggaggagattgtatcgcgttggtgttggtgttggtgttggtgttgtttttctctttttcaaaggaaaaagttgtaaaaagagagaaagagaaagagaacgaaagatgtagaaaacaaaaataaaattgaaatccaaggaatcgatggaacaaacaaaagaaaaagaaaaagagacgtgcgaagacagcgctcagatctccttcagagcagctccctcgaacccagcgagcccctcgcctgcctcctcgcccctgcctacatcacccgcggtctccatgcccatcctgtcggcctcttccagaccggccgctatcggcctttctgtctctgcctccttgagggattcttctatatcttcagcctcggtctcggtggacgtcggttgcggggccgaggcatcggcagtagtagtggcggtggtggtggtggttgatgtcgaaggaggaggggcaggcgcaggttgggaaacagcggtgataggcgctgggaggacggaatcggtgagtgaatgaggtcgggtaggtgaatctggaccggccgtcggctcgagcgcgctgggagtggaagttggggtttgttcgggttcgtctgcctcgtcccttgattaatcgtgagtaaaaacaagacgtttttttgttgttgttgttttttgttttttttttaaaataatttcgaagatgagctttgatgttgactctgaatgatctcaaggaaggagaaaaaggagacaagaacgagacacgaaaaggcaaagctcttaccatttgttactgaacctggtgactcgaggggtatccgccgtcacgctccgcaccagccggtccatctccccgtcacccactttgccctcctcgaccgaggtcgcgtactcctcgctatcccaattggtagccacatagtaacccactctgacaaactcggtgtcgttatagagcgcggagaggatgatgactgtgacgcctacgagttcggccggggtcgggatgcctgagggtgagtctgttggaagggaggataaggccggtgcggcggccgagaactcgaaagagttcagaccgaccggaataggtccgacctggtttttgcaagggaagaaggaacaacaccaagatgagcaagacagctgcagaagtgaagaggcggaaggagagggaggggggggaaggaagaagaagaagaagacagagccagacggaccatacaagagtccaactcttgatcatcactctccgccgatccgacatagacaagtttccactcgagatctttggaaccagaaagagtttgtgcggttgcctctgatcagaaaatcccgttggacgcgaaggtctcgccagacggaggacgaagaggaaagggaaagaatgatgagagcaggtataggacagaccttctttcagaggagcgatacattcaaattggattctgaaaacatatggatctgtaaactttgccggattgttgacgactggcaaagcgtttaatcgagggcgacgaagaaacatcagcttgtgcctgtttgcatccggactgagtttattcgggctaccaccaagggttacagatccgatagagaaacttactctcgacgttttggatgttgacgatcttttaggttgatggaagggaggcagattcaatcgtcaaaccgaccgatgaatggatagaaattcgaacaagacttcagcgaccggttcttctggcatgtgttgctcaaaacgatccttaactgtccacgactcacagacatgaccgctttgtttattactttgatgcgagggagaacgaagagcgagaaggcggatcaacagaggttttcgatggaggtgaaggagatcaagagaactcggtcgggacgcgtacacagagaagtaagtgagagaaagtgagggaatgttggacgaagggaagagaattgttgagtgatcatctatcttgtcgcgtcgcgtcgagtcgcgttgtgtcgcgtgccatattagatcagtcgtatacgaggcctgaacggtctctcgactgcaacgtctcaactttctggttgacttttctttcatccgttctttctttttttcggtgaaaggcatctcgagagacagaacggtttgccatctgagagcatctcggcggtagaaagttccaggaggcaagttaagccagaagggaatgaagacacggccggtccacatcatcatatacaccacgtgaacgaggctcatagagaacgaaacacacacacacacatacatgtatttgaatgagtagatcagatgagagaggaacaatgatcgtgaagcacgcaatacggagctaagcgataacgggaagctagcacgagacccaacgtgacggttgatgagctagaaggagaagaagatagggagtactgtcgagagctgaagattgagcgctgtgtgaagtccatgagagaacctcgaagagagagggcgctattgaggttataaaaagagaagaagaagtagggaggaaagaagtcgtttttgagtcatgtgcaagtatgtgtgagcatgtgtgcgcacgtctgtgtatagagattgaatatcagtcgctgcattatattcggcatgacaattcctctcaacggttcaaaaacttgaacgaaggttttggtcaccgaataatcagtagagtagggaaagaggaagatcacgagcatcgcacagattgtgacaaccctaacactggttatctgtcggctaattcatcgctgatcgttagaaacaccgagagaaccatgtgggctaacgaagaaaattttaatatgccgtaacgaggcgcagagtgaggagagaggagaagaaggaaggaaggaaggaaggagggaagaaagaaagaatagatgaacgaatagatgcattaggctgtcttggcttaggtggatgcatgagaagatacgtgatcgtccaggtaaggaagaagaagaagaacgaggaggaagtattttcggctaaaagagaacatgagctgaaataatcaatctgtccgggcataaacggggaggaaaaagagcgagagtagaattgagcctagcttcagttctcgtccgtgtcaataacgataaccggcctatgacggctagacctgagttccgggtacttgtcgttgaaacgacgatcgagattgaaggaatttcgaatagagatcgtataatatgatatagactgtcagagtgatcggataggtcgaccgaagagaaaagatggatgagggatttatgaagatgaaaggaggcaaaacgaaaagttgaaaattgaaagaaagggatgatgatgtatccgagatggcttttttcacgtgcgtttgttgactttattcgagtcgatcgtacgatatatgtggggcgagatgaaaagcaaaagacaaacaagtagatagatagtgaggccatgacatgtatgtttggaaaagagaatatttggatatgggagttttagcaattggttttaattcttgtagttttttcttctttttctttcttctttgaataatatgaaactcttcaaagaccgtccgagtaaactctagaaacaagtgatgaaaaacgaaaaaaaagtgaatgatctctaggcttccgtgattccttccttcctcaagaaaacaaagaaagacaaaataaagaaaaatatgtaaaacaaagtgagagaccggaatgagcgaatttgtacaagaatcaactggaagattagaatacaaagagagaaatcaaggtttgcctgatggatagagaggacataagcgagataggccaacgattgataaattaagcgaggataagagatacacctaggataaccctatattgtctatacgctccaaataggactggtaaaacagaacgcagtacagagacaaccaagtcaatctacaagatagaaggccacaaacagattgtaaggacacaaacagagggcacgaacatcgatcactgggatatgccaaatctgtcatcgagccggtaaatagacaatcggctctgtccagaccctctcgttcggagtcttatcagaaacaatttgtatttgcgccccgcctgcgaattgaactttcttttgttcttctccatggctaacctcgctatcgagaaaaatcttgtacgctccatatctacctataacattgttggcgatagtaacagtgccaggtgcgcggcgtcaaagccagtgaagctgctggtgacgacgtaataaacgctgctaccgtcgcttaatacagcaataggccaccttcccctgaaggatcaactaagcggagagagcgacagagagatatgccgactgcgcacgtgatgattaccgtctatccagcggctattcaaatctggatataaattgaacggtatataaccgccgggcgggtataaaaatagatcgatacgaactttgccctgaacaccccactggcaacacgccatctgacgcctagacctcggaaggatccgtttgaaatcgattctcgctcaccttgaccgggcgggaaatcaatcgaacggggtccgagcgtagaacatcctctctgcgtccgtagacttctgtttcgccgccttcccgatagaaccgattgatcgtgcaggatgtctttctgtgggagatagattcctcagccgtataaaggtctgccataagatcgtccaccctgtctgggtttctcttttccttactctttcttcatcagtatcgtcagaggccacactccacacttcctcgtcctctcatcaagttcccgcacctccgacctcttcccttcttcgctccctttctactccgtctccttccgccatcatgtcgaacattgaggattacgagacaaaaagctacgagaaagatacgggtgccacccacaccatctttcccgctggggaggagtccaggccggaagcccagcaccttcaccgagggctcaaatccagacacatggccatgatcagtatcggaggaggttagtctagaaccttttcttgcgttctcttctttgcgctctagaaagcttatctctccttaattatacagttatcggaaccggtcttttcttaggtactggtagagctcttgcccacggaggcccgcttggtctcttcctcggttacaccatcatggcctccgtctgtcttgccaccatgttggccctcggagagatgatctctttccttcctattgaaggtggtcatcttacgttggcccaccgattcgtcgatcctgcctggtcgttcgccctctcttacaactacgcctacagctggcttatcattcttcccgctgagatttctggtaagcgtctttccctcatctcttgattagtttccgcttctctttccgttgtattgatctcctattctcttgcttatctctaactttccccgtctcagctgtcgctatattggttcaatactggaccactgcctactcgaacgctatttggatctcgattgctctcgctatcgttattgtgatcaacttgtttggtgcccgaggatatggtgaagccgagttcttcttcgcctccatcaaggtgatcactatcatcggtctcattatcgttggtatcgcaatcaactgtggtgccggaccggccgaccagggttacatcggtttccgatactggaagaaccctggacccttcgtccaatacgaacgcattcccggatccctcggaaagttccttggcttctgggctgtccttacccaggctgccttctcattcattggaaccgagatcgtcgccatcgctgccggagaagccgagaacccccgacgaaacttgccaaaggccatccgaacggtctacatccgaattgttgtcttctacatcctcggcacgttcatcatcggtcttaacatccctagcaacaacgcagaactcggtcaatacagcgatgcccgagcttcccccttcgttctcgccatcaaggccgccggtattaagactctgccctccatcatcaacgcttgtttgatcacctctgcctggtcggctgcgtcttccgatatgtacacctcgtctcgagccatctactccatggctcttaatggattgcttcccaaggttttcactcgaaccaccaaaaacggtcttccttgggctgggcttatcgtctccagtctctttggtctcctcgcctacatgtcgctcggtacttcggcctcgaatacctttgattatttcgtaaacatgaccgctatcgctggtctcatgagttggcttgcgatctgtgtgacctaccttcgattccgggccggtatggatgcccagggactcgaccgagctatacttcctttcaagtcccgatttaccaaagtcggagtttactacgccatcgtcttgatcatgatcgtccaattattctccggatggaccgttttcctcaaggacagctgggacacagctacctttgtcaccaactacctgcccttggcgttgttcccggtcctcttcgttttcaagaagttctactctaagaccgtctggcgaagggctgaggacatggacttcgtcaccaacattgccgagatcgaggccgactcttacgttgttcctcctcaccccaagtggtggggtcgattgggcaatgccatcttctaaacaaagacaagaatgctcagttttgttctcctttttctgtccctcttttctccacattctctatcaaaaatcacatagtttgtcactccgttgtatttgagcccaatcgggtttcgcctcttctctggcctttcttgtttgctgcatagtttgctgctgccttcgtcttcttaaatactattatctcttatctctcacgatatccccttgtacgcttggtcgccccggttgtaatagaatgggctttttatttctccctcaacgtcctcatcttatcataccagctacgtcattgaaacggctctgacgcgtgacgcaattaaatttcagacgcgtccaacgacgcgctcagcccgatcgatcatcatcttgagagtcttcttctcatccttctctcaacctcaacatagaagaatccaagttggatgcgctcgttcgtcgtcttgcttaacatcaacatcagagctcgactagtcaaccctgtctttcacccagcagtgagcaccttccagacccaatccacacgcagatcgtttagttaccacgttagcaagttgaatatgccagagaagagaaagaagccgttgccagacgaggtggacgaggacgtgaagagacacaagccagagcaggctgagaaggagaacgagaaggaggattggttcaaaggttccgtttgtgagttccttcaatccaatctctttcttccgaatggaatcccgctccaagaatcctgatcgccttacccaacattctttcatacacacgaacagacccaagagtgtcgatggttgaagcggccgatcggatggatgccaacaatcctcttgagctactggagagtgcgttgaagaaacaaggcggaccggaggccgtgagtgatgccggagagtcggtcgtttattggatgaatatggaggatatgagacgttcgtctcccgttttctttgattcactcattgcctacatatgtgtgtgtgtgtgtgtgtccctaggaagtcttccattgctgacggtttcgtccattctgtgtttgatgaccgactccagtcaaagacaacaaagcgctatccaaagcatcagcgtacgcgaataagaacaaactcccgttggtcgttctcttcccgatctcaccgggagactacaagtctcacgacagatcggccagacggatcgatttcatgttgagaaacttgcgttctctcaaggtgtgtctccttctttcacttgtctctctagatttcaccatttttctcgaacgcatagtcatttactcttggtttggtccatacgcaatagacttcgttgcacgagctagagatcccactccttcagttcattcatccgactagaaagacacttcccaaccggatcatccagatcgtcggctcaccaggtatcaaagcgagacacgtgtttgccaacctgtcgtacgaggtcgacgagttgaacagaaatagagcggttcttgaacagggcgcagacaaaagaatctgggtagggttcgaacatgatcgttgtgtcgtcccgcccgggggtgtgaaaaagaagggaaccggtaccggagcttacaccgttcgtccttgtaactttcttacttctaaagagaactcaccccgctcgagtctgatgtctattcccttcatacgtttcaacgggctttgaacaatcaaggtttattcaccctggttcagacaatggggctcgatgatccatgaggatccctcattgtttgacgaataccctaatcctcagccgaaccccaaagggacactcgaatccttctctgccaatgcgtccggcgacaacaaggatctcttaaaagacattccggattatattgaaggcttccagcttgacaagaccgacgcggaacagatgagagccgtccatccggggggcgaacatgcggctgaaagagtgctcgaagcgttttttcacacaaagtcgtcttcgaaaaagttggggccagtcagacctttcgaggatgacgatgaggtcgtcaagaaggggaactcgagagtggaagtttattcggatgaaagagatcgagcagatcgaaactctacctctaggctttcgttagtgtcccctttgggctactatcctgtcctttgctttcctattctcaattacacggcttcggactgaaggtttctttcttggcgattgtagaccatacctcacgtcaggcgtgttgtctcctcgacagatcctcactcatgtcctcaagttttccggaaagaaaaccgtcccggtcgataagaaggacggtgttggaaactgggtaggcgaggtcgcctggagagacttctacaaccatgttcgtccatgactcgctttcttatcccttgcccttcctgagaatgatatctgtcgtgcttacttcggttgtcgaactgaccatgggcgttcacttcaccggatacactcagatcctggcggcattcccgagggtctcaatgggtcaaccatacaatgtgaaatatcgaggtgtccaggttcgagctcttactcttgttgcatcgctatgcctcatgtcggcttcttaacttatcattatctcatgcttcctagtgggagacggatccggagttgctagaggcttggaagacgggcaagactgtaggtttacactattttctccttcaggtacacttgatacgaagatgctgatggatttgtttcctcttcttcaaattctctcttcgcagggctgtgcgtttgtttactccatctttctactctgagttctcacacagatatctgaactctttcttcatgtgataaaccgaaaattatactaaacagatcccgtcgtggacgcggcgatgcgtcagatgaacgcccagggatggatgcacaacagggccagaatgatcagcagttcgttcttgaccaaacatctcttggtcgattggaggctgggcgagaggtacttcatgaaccagtttatcgatggtgatctcgccagtaacaacggtggttggcgtaagtcgatgtcttcatcttgtctcgtccagaaggtttgttactcaaaactgtcttttcttttttttttttttttt

SEQ ID NO: 1498 - DNA, 3159 bp, Xanthophyllomyces dendrorhous
tttttttttttttccttttcggggaccgcactcgtttgagtagaatggatcgcttctgtaagtttgattctctatttcggtgtaggctgtagattagtttgactgagactttgttctatgctcttcgttttcattcctatccgtttatcagaccgggtcggatccccagccatatttccgaattttcaatccgaccactcaggtcagtttttcagcctgccgctcctcttgtaacatgctcggaggcatgtcaacttatctgattcaatcctatgggatgtcctgtaaataggctgagaaagctgatcctacgggcgagtacatcaagcatttcgtcccagagctcagaaacctcaaaggcaaaggtttgtttcctctcttctttgctttcctggaacgaaagggggttctttcttattcaacgttgcatgtgctttgtattgccccaaccacacagcactgtatgacccgtacgggcatttatcgcctgcagagtttaaaaagctaggttatcctatgccgattgttgaccacaagaaggcgagggagcgcgctatcgagcggtacaaaaacccaggggtcaagcctgatgaatctgctgacgggtatgtagtaatttcttttacaaaaacagggtttgttatctgggttatgtttcaagaaacaacgttgttaacatgttctgggatggtgtggctttgtatgtttgttgatagacctacacaggatgatatcaaggtgtcgaacaacgtgaaaccgaaagtcaagaaaagccctgcagggctcgagtcgttcgggtttatatcaaaggcttaaactgatttaactattatcgtttgttcttggtcttcctctctcctcatacaatgtatgcttctctctatcctcgatttaatggctttgttagatattccgtcaaaacaaggaaaatgagcgaaaaaggtcgtctcatgggtggatccgattagagaaaatttgtagtctgttgtaataaaggactacaaatgctttctattgatttctctatatatgataatttctttcttttacctattttctggccaacaccatcttccaatccgtccatcaatcaaccgagcttcatgtttggtcagcctgttcgtatctactcgtcccctatgctcactgatttcttactacatgacctctggctcctgattccaagcccaactcacgcttactacaaaatctttgacgaatatgaaagcagcaacaacaacaggcggcatcgtccccgttctcatttggagcaccagccggaggatcagctcctaaaccttcactctttggagctccttccaccggtcaacagagcgccccttcgttgtttggatctcagcctgctcagcctcaacaacaacaacagcaacaacaacagccgggaagctctctcttcggtcagcctgctgggcagcaacagcagcaacaaccttcgacaagcctgttcggtcaaccggctggtggtcagcaaaccaactcgacaacatcaactgggctctttggtggtggaaacacaggacaggcagcaggatctagtgcgataggtggatcgtcactcttcggagccaaaccggcaggatcgacttttggtggtgggttgttcggccaacctgctcagacggggtcatccggtggactgtttggccagcctcaacagcagcagcaacagcaacagcctcagcagcagcagcctcagcaacagaacatgtttggaggtggtggtggtttgttcggttcaacagctcaacaacctcaacagcagcaacagcagcagcagcagcagccccaacagcaacaaccgcctcaacagcagcaaccatcagggatgtcgaaaacgacaaagttcacagagctaccagagtctgctcaaaaaattatcgaggggatcgagtcagttacctctctttcaagctctttcgggctcatccccaaagatgtaatcatctgattttctctcttctgactcttgatctcgctttggtttcctccgaacacgactcggtcacagttcgttcatcatccaacaaatcaacctgtcacattcgctcgctcaacatccactctccgaagcttcaaacgcatccgcctcatcttctcttgctctactatctagtactacctcggttgctcctacgatccctcagacggctggtcttttaaaacaattgacgaccgttcgttcctcttctttttcgtccattgtctttctatttgttgacgagttagccgatagggcggttttgctcgatccattttggggaggagaatgaagaaaggctgggctgactatttcaactctgttttgtctccttgtgatcctttactctggcatactatgtcgtcgtcttttgttggcggcataaacaggaaaccacagcgttgaccgctcacctccagagctgcgctcgaaatgttaacgatcttcataaacgagtttctgcagatggagaagatgccgttcgaggtgctcggattatggatgcttccaaggtgacctttttttctttagatgttttttcaactagttttgttcctccatatctttggaaaaacacacgttcatccgaactgactgtctcccgattttctctcgttgaacacgacgacaacgacagaccgcacaaggaagacaagctttgaagggtcaagcaaaattccccaacgaatactttacaaagctcaccgacgagatgaccagtcgagtcagagtctaccagaccgctatggatgtttgtcccctctgttctcttgcgttttctttgcctttgccttgattccttgtacacatatatgtcattcgatggatcggtactgatgaacgttctgtctttttccaaacaccagcaactcactcaaactctccactcccttcttccaccatccagcttgtcgagctccagtctgtcgaacccgcttccactccctccacttcctacgccccaaacgatatcccacacgctgcaatcgcaccaagtcctccttcaccgacttgccgctcaggtaggattcctcgacgaagagctgggcgcgttgaaagcagagtacagggtcctgtggagagaacgtggcggacagggcgggagtgtgagggatgtgttcgagatcgaccagccgggttcatctgggtccgggccgaca

SEQ ID NO: 1499 - DNA, 2033 bp, Xanthophyllomyces dendrorhous
  misc_feature (249)..(258): n is a, c, g, or t
accaccaccaccacccgcatcctttattattcttgttcaccgatcatatgtaatcgcttccttctcttttggtcgttcattcagagatggttcggatctagactggagagtggaaaggagaatagggacctgaacgcagcgctcttcgaggtatccagagaaagacgatcacatagacgaagagtagatgaaacatgcgtcgggaaagaaaagagtgcataaaaaaggatgcgggtggtggtggtggtnnnnnnnnnnggtgatggcagcggtgaagaggcaagttaagtaaagggttgcagagattcgggaaagaaagaggacaacaacagattaggaaaaagaaaagagaaacgagacatgatatgaagcatacacgtggtttggaaaggaaaaaaaggggaggggggatgaccagggaagaaaaaatagaataaaaaaggatgatgggtgttcggaatcaagagaatgaacgacagggggatcactgtaaaggttctttactctcgcctagtctgttcaaatgaatgtacacctatttgaatccgattaccaaacatgatcatacaaaagcagcgatggtcagatagagtgtttcataaggaaacgaaatgtagaaaatcaaaatgaaatggaacatacgtcggtaccgctaaaggaaaagaacaaggttgtgagagaaagcatgaaacgggtcagaaactttattgatcttgatggatttcaccttcaaacacctccatgtatatatctcaagctgcaagagagagaaagagaactcgacctggacttactagccttccatctgaaagcccgaaaggcagaccaaacaaaagacacgaacggttcagtctctgccggttgatgcgactgcgatcaaggaaataggtcgactgaagaaacacatacactgatcaacctaaggtcacctccaaagaacctcgcgtactattcgacctcaaatgaatgcatctgttagcaagcgcccaaagaaatgttttttttttctaaataaaaaaaaagaaaaaaagaaagggaaccaaccagtcttgataacgggagaccataaccgaacccagccatgggcgcgttaaagtccgaagtgacatcgtccaacgtggcggcctccatggtggtatacatgtatgtccagatcaatgggatagcacttcttgggattcctccaccttcatcagagatcttgatggtgatgtcttcctttccttcgacgacgacgactttgatcggtgggtattctcctgggtggtccgctccgaatcgctcgatcgtcgctcgtagagaatttttgagaagctcgaaaatgatgtgcgctctgtgtttgtgcaaagagagtaccaagtcaggggtcgtcgctttggccttttatttattctattctcgatagttggagttatgaaagattggaagaacatacaaatgtccaggcacataagggaacgccaggtcttccggacaaaccagctggacttcgggcgctttgaaaaggcagtagtgatcagacgcgacaaactttgcgttctctatcgactctgtgcacatgtcaaagatgttctgtggatggcggtgaccggcgacgtcaagatgatcaggccgggatacgaacgatcatggtgtcaagtagatggatggcttacggcttgtttgcagatgattccgacatattcaggatgaggaggcaacgtgttgagagcgatatctaaggaagagccaaatcaacagagataagaatgagagacgatcggatgaacaaccttgggacgcgtccgacaagagagactaacgttgaccgatcaggaaacgaatcccaattcgactcatatggaaccgatcgaggaactgttggatgctcaatcctatcctgtccgactttttgctatgcttccactccaagatacctcgtctgagatttttttttcccgttcgtgcgcgcaagcaggaaatcgacacagacgtcagtcaacggctgccctgagttggacgacacacacaaaaaaaaaagaaaaaaaaaagag

SEQ ID NO: 1500 - DNA, 987 bp, Xanthophyllomyces dendrorhous
aaaaaagaaaaaaaaaagaggatggattcgaagatgacgagctactcacgctacagtcatcaccgtcgggtcgtgtctggctttgatcttttggagacactttgtgaaccggtcgttgtagtcgtggacctcgggtggccagatgatgtcctttgtggagccataatatctgatcggaagagattgggttggagaaggcttagcgtgagtggtgtggaagatctgaaggtttgaacacaccttttgtcaagagggattcgcatcttgcccttgtctggctgtgaggatcgatagtagtgcgactccagagaagggttgtccgttgcttccggtaagggtctaaggaaggaaaacaacgccagtcaggacaaaggggatgagagaagcaggaccgggatgagatgtctttaaaagaaaagagggaggagaaggacatacgtaggtgctttgactcgaagagcatcctggatatcttccggtagttgcggaggcgggaacgagacgagctcctggatgaatgaataggtaaacaaaagaccaggtatccgtagagagtactcggtcgatgagcatctgagatctcttcaggcagagccgaggaagctgtctggcttggtcctcaaccgagaccactcctggaactgagcatgggataagaaacagagaacgaagactcacctcgaaactctgagcataccactctttgacccggttaatgctcggcatcttgttcaagttttccggtagctcatccaactctttgactctgtgggacagtctgatgggtagctcttcggcaagaaactgagatgctttgagaagtgttccttgggatggattctgaccgaaacctgtgagaaggaggaggaagacgaaggagaacctgcacggtcagagagatggaagatccgtggtgaggaaaaccaagagggaaggaaggaagaacgaacgaatcatctgttgcagggacactacatgacccaggag

SEQ ID NO: 1501 - DNA, 5904 bp, Xanthophyllomyces dendrorhous
accggtcatgacagatcaccaggagtaacatgaacggaaaagaccacaaagaaagcaaagagaccaaagagacaagcacagattcagaacgaagcagacgcgagcacaaacaaagcagatcagccagacggccgagccgaccaagaagactgaccggcagtgggcgcgaaacctgcgaaatgattgatcttgtcgtacgtgctaggagggatcttccaagccatgatgaacgagtgattgtgtatctgacagaacgagaacgggagtagctgcaagaccagatgaggctaaacacacgacggctggacgttgttgatggtgagcaagacgagcgtgaggaaaaataagaaggtgactcgagaaaactctgaaaacgtcacatgcccaaaaagtgtaaactctgaaagccggatgtccgagttcagccggtgcttcgttggcttgtccgttgggtagcggggaccccatcgtattatttaatagacacacacacacacacacacatgccaggatggcgacagaaaataaagagagagagagagaaagaaaaaaaaaggaagggagaaaaaaaagaagaagatattaatggcaatggctagatggtcgatggtaatacataagaaagaagagaacaaaagacacatccccttcggcccagatctcactgccagatagctgcagaggtaacatggaacaaagagggcatcggggcgtcgacagaaacgatggtacatacgaacagacacaagggagaagagaaatcagacaaggcggagaagaagaagaaggaagggagagggaaggacaagtccaagaacgtcctctttgcgccatctcacggatccactcgctgccgcttcaaccctctgtccgacagatcctccccttcgacctctccggcaccggctgaatccccaacggtgccaccgacaccggcatcggccgccccaatggatgccgccaccttgtccttctctgtggcaagctcgtgctccaacaaccggactcgctcctctagatccaccctccggtgtcgttcggcctggacgagcgctttgagatcggatatcgcttggtccatcatcatcttttccatcgcccacttctcacagttcgtcgtctcggacgcctttaggtgagagatatagtccgccgccttctgcaagatcgtctgtggagcggcaggcaagggtcgagacagaatccgggtcagccagcaaaggacaggaatgtcaccgaggtcaaaacgaaagacgagagactgaccgatttgttcttctcgacctggggcagataattggctagtgcctcgattcctgcgttgatcttttctcttcgcttcttttccacgtttttctacacgaataggagagttgagatgatgtacaaaagcacacacgtcaaaaaggagacaacaacagaacaccttgtcagccaaatgagttctatcggccaggcaagtcaaaagaagactcaaaagaagaagaagaagaagaagaagaaaagaaaaacacccacatggttgtccttcttgttctgcacgttggccaccccgttactcgtccgtcttctgactccaccgacacctcctgaattctcgccttccgttgagccgataggttcagattcggacagctttctgatctgtcctcccagtccaccgagagattctgacgacccaccgtctggcccggtcccagttccggcgcctcctcctcctcctcctgccaccccagggggtaacgtctgtcggagtccagtcgatctcgagacctgacgcatttggttagctgacattccaccctgtctgatctgtcctccggactgtcctcctgaagaagaagacccggcagcagaattcgagccttgctgttggagaagagaactctccggtgcggaaggcgcgtccggggcaggactgtacgggccatatggatcatgctcgttgtgttcgtggtggtgatgaacgtcgtggtgatgaccgtgatggtggtgatgatgatcggattcttccggatgggaatggatcggatggacgtggacgtggacttgggcgttctcagacacgagtcgttcgagttcatcgatcgtcgtggtcggatgcggtcggtgctcgtcctatcgagtcgagtcgagtcaagtcaagtcgcgtcgaaaatgaagggggagaggaaaaaagaaaaagaaaaggagaggaaaatcgtcagcctgttctcgagatcaaacgaacccatccgcaaagagaagaacgtgatgaacataagaacatgtcaaagaaagatatacacttacaccgatgggcagagctgcccaaaacgccttcgcgtccatctcgtcgaacggctcatgatccccaacgccaacgccctcgccgtcggccccgtcgtggtgaacgtgatcgtccggctggacttgaacctggccttggacgtgatcggatagttctacttgtgaatgagggtgtggatgagagtgtgaacgatctgtcccctcggcttccaccccatcgacgtcgacgtcaacgtcgacctggattcctgagggatgcacgtgtccgggcacgtgtcctgttccgccgccggtggtggtcgaaccgttgtgatgttgatgaagatgaagatgagaaggatgatcctccgactggtcgtctccctgaactggggcgtgtggatcggaccggacagatgctccagctccggcagagccagctctgagcccaccggtctggctgctgtttgtctgtccgacggccgaggcgttggggacagccggcaacgaggatttcgagtctgtggtgatgtctggatgatcgatcactccatccacctcggaatccacttgcccggatggatgagcggatggatgtgtctgtttggaaggtactccgattgttgacattgctaagaaaggtcgtaataggtctcacccgaacagtggcaatggttgggagatggtgagaggaaggtgggagcggaggaaagaatcttctctgggtgaaactttggacgcgtctgttcattcttttttcttctttttttttgggtcgcttgctttcgttcccgtccgggaagtttccctcttcgtctcttccttgcttctctcgttctcgttgtcttgtctatctggacctggttcttgtcctttggcttggcttgtctcgtcggtgatggttctttttttttctctctttggctgagagtatccacgaaaaacagcgtgttgagacactgcatatggggtgtctctcggagaacgcacaccatgatacccgacaactcagtctcacacagaccgtcctgttctctctgattttcttgtcagttccgttttggttcgttttgctttgattcgtctcgtttgctcgtctgccgtagaaatacatgaaaacagaaaggatagatagttctttggtgtattgccacgggatgcggcaaagaaaggcgaatggagggtaggcgaggtcggcgagagggagagaggagggtaaatgaaagcgagcaagattgaagcggacccaagaaaagatggaaaccgagaacccaagcaagtataaagagagagacagaaagagagagaagatcaagatgagaaaggccaaatccaactccaaacgctagctctaggcagactcggtgtaaggcgggccgagcatggtcctgaacatagagagtactccctccacgacgatcaacagcactcctcctccaggagccaaccgaagcaccttgggggtctgtaggaaggaacaaagaacgtgtccaagcaaaacagttgttagatcagtctcgacgtgttctcatacatgtgtatacacacgctcttcacttctctcaggaggaggaaaaaaaaacagaatggaaaaggtagactgacgaatcctcggtagagcgcaccaacaccctcgttcttggcgatccggccgatctcgataaacgtccagccgatcttttgaccagcaggcatcgactgcgctctcgacttccacacatcagccggcgtgttcaatgtggtaccaatgaatcctccgatcgctccggccacaaagttgttgaacagctgctcggatttcgactggatgacagtcgagaaaagatcgaatcggtcagtcggattgactatcaccaggatcaaaacagaacaaactcacatcagccttgggaagcatacctcgaacggaaaagatgcatccgaagtatcctcctacagaaagagaaaaacagagcgatcatttagttcagcttgacctcgggagagacgtcccagaaggggaagaaaagaaaaacggagaaagcaggacaaaccgttccacaacacgtgcctccagaaggtagcctccatacccttgtagagacctgcgggtagggaagagggagaaggacgttgtgttcagatggatatcgatgggaatagacgaggatgtgtgaaaaagaaaaagaaaaaaagaaaagaaaaaaaaacatggtcagtcttctcgttacagccagtccgacagataatgaaaagaaaagagaaacgacgaaccaagaggtcccgaggcggcagtgacctttcggataacatccatactgcccgtgtactttgagttcttgtcttgcaactggagggccggaatgaaagcaaagatgcaatcaatacaacgtcacatacgagagagtcaacaaggaagcaagaggaaagaaaggactgacgttgatcttgacaccttcaaacggagtgacgattctgtaggacggatcaacgatcagtccgaacgaacagagacagcagacggacaagagcaggtgtgaaagaaaggacgtacaaagattcggtagcacctgcagacatacccgtcaggatggacaaactctgagtcataggagtcttgccgtcattggtgtagacctttccccacgcgtcgttggcggcgactttggggataaagaaagatcgaggagaaacgtagttagtatcctgcgcgggccgttggaaagacatcgaaagaatgatctaacgtacacttgagagctcgcttgggagcctcgagcatgagaggagggaccaatcctcggtacaatcgtccaaagctatgaagaacattgtgagagatatgtgatctcggtcagcgcacaagtagttgacacatgatgagggagaagacaacgaaagatggccgaaggtcaagagtcgaaacgtcggaaggaccggagtaaaacgggggaggtcttaacttccggccttatctcttggaattctctgcccgaaccaacaaagagttgtggtctgatggattggtttcttctcttctcttggttctatgggaaacgccgcagagggcatcctgagcagaacgcttgctatgtagtagaccatggcgatggtacatgtcgaataggacgggaaacaagagaaagacaggatgatcagacgcacccttcggttccgacgatatccttgaacgtggccatcatgccgacctgcttgccggtcgcgagctgctgcctggtcttgacgacatcgagcgggtagagggtcaggatctctgtgattccggcgatggcacctgcagcgaactggtactgaaacgggagagcaagagctgacgaaagagaaagaagaaagaatacgcagaagaaaaaacgaaagagccatcagttcggacgtccggaccgaaggacaaaccaacggatggacggatggatggacagaactcctcagaggattcgaccccaggcgaggccaaacgaatccacagcacactcacgctgcttcttgggtgttgtacttgaaggggcggacatgaggatgagaaggaagagaccaggacaagagacgaggagtgttcaagacggagagaagagctttcttcgttggtgatggtcgtcgatgggcaagaaggaaaaagaaaaaaagaaaaaaaaaaag

SEQ ID NO: 1502 - DNA, 19111 bp, Xanthophyllomyces dendrorhous
tgctgctgctgctgctgctgttgctgctgttgctgctgctgctgctccttcgcatgttaacgtccgagtgtgcatgctgccatcgtatacatccagtccgtaggaaagacacacagaaagcaagagaggccaaatgttccatcttcatctccatcctgctcctcccactgcctgctcctcctcctagacatgtctgtggtcatacttccgatgcttgtcctgctcctgctcctcccgcgttggcacacaaccgtatctgagccgttggacgacatcctggtctcgtccacgcatctcccacccatctgatgagctacccgatagatgagatctaccctactgccttggccggctgactaagcagcgaacgaaacagtcaatcagcatcaccttctcctcatcatcatcatcatcaccttcatcaccttcatctcccttggtctctactagtaacggtcatcgtcaagcaaacgttcagtccacgataccatcgatggcctcttcagcttcatcttcccctcacgcaaccgccgcatccttcaggagactcgtctggcaaggttccgtaccggtgagcatcaggctggctcaagacacacctcccgttcagtctggtggtgtggacgcgtactttgtgagttcctatgtttctcatccgtccgtccgtccgtcctgttcaacagaagctgatagagtcgctttgaccaaccgttgggacgatccttcagattcaggctcccagacagagctatctgcctctgttgcttcaagacatcagggaaaacttggtcgaacttgcactggacgaccaagcactcgctgctaccaggcaacaggattggtggttcgaagatgaagccggtagtggcatcacgagatggtgtgtgtgtccttctcaatgtgttctctctttgttatctcatttgtcttgctcacctctctacctctctacctccccttcacttttcccccaggcactggccgataggccttctctacgatcactcgatcatcaatgatccatcaagatcgccaacgattggcaccaccccatcttcgccaaccgctccgctaagactgatccttcatctatccaatccaccagcagaaaagctgttgctctcaaactctatagacgcttgtagattggcatttatgagcgcgatcaaagaggctgactttgttagatggggaaacgtcaaacgagttaccggacttcgcaagctcgaccaggatagtctctgggatggtctccgagcgagtgggtaattcatctttgttgttcactacttccttttcatcatgagctgacgcttcgctctttcctttattttttcttcatctctttctgttccgctttcgctcgctcatgttcactgccctccctcttctagatgactttgacctgcatgcgaaagtggcgtcccgaatcctccctctgcccaatttctctcctaactcatccgatcatgggtcttcacagccaccgtccacccacctgctcgctcctacctctcgacaacatctatcccgaccgccttcgactgaaccagactcgacctcatccggtggtaactcgagtctggccagtccgaacggaaaaccggatagcgcaaacgcggtcagaagcgtccctataaagattcacctcccagaagcggcaggcgtcttgcagggcgtcgttcctccttccgagcccaatggtgaactcccttctctcttttttcttcctctttgtcttacggacatctgaccgaacgttctgtcttttcccactaaaaggcaccccaacgacgattcattcatacctgcattcatccatcccgctcctctttccgaacccaccctcgagcctgaccccgtcgactctatcgactccatccccctcgctcgatccctcttcttccctgtttgttcctccgtatacacatccgggttcacacacacagccctcgacgtcaacatcaacatcggcttacacattggcgtacccaatcatacaaggcatcgtaccaccgccagagacagagatcgcttggctaggcgcttgtctagtaggcgcagatggttggctcgccatctgtatcgggatgaacgcctagccgatcggattccttacgtatctcgattcttttgttttcctctgtcattcgttgacacctttttcttgttttttcttttcttttctcttcttctttggtgagcgggggtgagaatatatgtgatgtgtttgaacaaacccagatccgaaattcatacgagtcaggacttttctcagtccttttcatgttacctctttccttctttcctctccaaaatatccatagataaactaaaacgaatgcgataagaaagagaaacagtcgcttgtaacctatcaaccatagattaggacatccctgtcctactcatctttttttttcttttctttttcctttgggaccctctcttctctttcaaactcttcctcctcaatctcacagctcgcccgaggatgaagatgacagaattgagctttcagtcaacagtgagctcctggtcgaccttgccgaactgttcgaagaacgtccgcatgaacgcgatactatgaatccccagttttccacacacgcacagatcaatattacatcagtttcatcgtcgatcaaacgagagagaacgagagggcatctccttccttctcctccctccgagaagagggacgaaaggaaagaagtaaaaggatcggacgcactagtaggcaacgtcttttgaaccagcggtctccctgatggagtgcatggccaactgagcgagtcctatatcgaccgttcgaacgttggtcgacagatgaggtccgactgtcgatccgcatgtactcttcaagtccacgcgttttatcagacccatcggatgagggagtcaacaaagagacgggttccaaggtgagcgcattaatcaattaaatttagatttaaaaaaaaaaaaaacaatgacctacgtcgtttcgaacttcaaactcttgaagtggtacgcccgcactaaagccgattttaattccaaaaagaagattagttcagtcgatgtctcttccaaggacctggccactctgatgtacaaagagaaagcaagacaacaaaagagaagaaagaaaggcaagggaacatacattttggcaattcgccgaaggacgaacgtcgtttgagcgtttgaggtgtaccgctgattggcgttcgtcttgataaccacaccacctcccatcgacggttgactgctccatccggcaaagcacatgatgtatcagaacagctccttcgactcacaggtctcgattggtagcccaggaaaacaagatcaaacaagaaatgacccactgcaactcctggtgtttctctgcaaagttggggtgcatcgcgtgtcccatatcagccgaaacgaggaaactctttgcgagcgcttcatcagtcctgcctacgatcgtagagctgtccgcctctgagacgttcagccctgcagctgttaaccgagtgacgagcgatggctatttatttttgtgatcgtccgagagaggtgtcaaattctggtgaacgtgatgacatgtacgtgacgagaaggagatactgacaagcatattggactctgctccgtggtgactgacagaaccaacttcctgatcgacccccaaataaatacactctatttgagatcctttttgtccagattagaatttcaaaggacgtaatagatagggaacgaacctcgtgatcaaatagtagaatggcagaagcgggtgcagggctagagctcaaagccgatccagcatttgtaaacgagtcagtcagggcctcgacagcggcaaaactggacatcaggttgtcgatccgaggactaaagataaactcgttagaaagaccgcccagacaggcaggctgggtgtcgtacaagcataactcgaaatcctggatctcatctgccttgcagcccaactcctcagccaagagccctaggagcgcaggatgatgtttctccttcatctcgggcgatccaacgggcgtagcaaatgtcgaggcagcggaggcacttggcgaattcagaatcgacgaaacgagacctaggattggagtgaattgggtctccttgttgaaggtgaaggagtcattggagcctctatcaagatggatagccaaggaaggaatccgtaacaaaggcctatcgatcttgatcagcttggagacaaacttctcatcctcggtctgaacaataaccctaccggccagactgagatctcgatcaaaccacgaccgccagatccctccgccatagagttcacacgcgacctgaagccagtctcctttgaccttgttgctgacaggtcgaatcttgagacagcatgagtccacatgagttgcctttgtatgaaataatgacacaagttgaagccttttcagagtctgcacgaaaagaaaagaaaagaaagatgaaaaagggagagagctcagaacgaacgataaggccaacaccggattgaccagagatgaaggaggagggtacggcaaaggcagccagagctgactgattcctagtaaaatagtagccctttccaggcttaatgatcttggaccagtccgaagactcggaaatcttcgtctgtgtaattgatcagggcaaggggatgaagagaagtacggaagatcgtcagctctatatgatgaccagttggccaaaatgggaagcgggaaagactgacaaagccggctttatcgagtcttgcaacggccttagccacagcatggtaaggcgttggagaagcgttcacgaaatcgacaaacttaagggcagctgcatcgttggaactcgtgggagatgtgccagctgtggaatgttcaggagagaaccgggtggaaagagagaatagcggagttagccgaaccccgtatcttggtcaattctcatgctatagagaggaaaacaagacggaaataagaacagtgaagcgaacagatagacattttgacttgcatctgaattgagatagagaaggacgaagagagaaggaagaagacgattgggagttatgagtgtgtggtagtaggatatctcgaacatgtacactgcatggctccatccgtccgacaacaaccctaacccgatgatggtcaacacatggtccttctagacacagctttcgggtctatcgtgaagcccgacgtcgctttggccgagtaagaaaggtgaacatagtttgagtgcgctgagtagaaggaaatataaaacggatgattggctttttataggaaaaaaaaagaaagaaagatggctcaactgtcggcactgaagattgggatcaagaagagaagaaacccgcaagttttgttactgaaagtcgtttgcagagccttcactggctgctcatcatacagaggatagcatgagccaaccgatttcaacaaagaccgtattcaacttaccttcgtctccaagctgagaccattgtttgatacaactacgtgtgttggcgtcaagtgagcgcggacgaacacaaccgagtggcaggttgaccaactaaatcaacctcgtccgttctcactcgttctgatcgggtcaatgtacgcgacaggctgcgacgggtttgaaggagacggtgggataacataaaagaggctgaacgggtctaccatcagctggaagcgaactctttccatacacctgggatctaattgtcgcatggagccttcattgctctcctcaacgctacctgtaccgtatctatcctagaggtactcctgttcatctgcctgtctgcctctcttttcacttctatcttgttcaaaccctcatctgtaccgctcttctgcacaccttctcatctgtagagtcgtctcaccattcattcatccatccatccatcctccctctcgaccacttatgcacaaagatccggcttgatatcaacgcggtcaggatgtttctgccgggtgtggccacatgtcacgtgacgtcacataatcacgactggaactttctagtcggttctttttgcccgttcttttttggatcatcccaaaatccgatcgagagcaaaagtgagacttagcggccgacgaccaacaccaaaagctttcgtatcacacatacccactcatatacacacagcacaagatggagtctcttcttagatggtgtgtataaggatctttattgacccttctcctcagtatgttttgtggatcgattttggcgcttcactgatcacacatacacatacctcacaccacacgattactttcgttttcgtttcttaggggaatcgaaaactctgttcctgcctccggggacgcctccgagcttcaccaggtcgcagccgaagtcgcagccggaaaaagaaaggatctcctcgatccggcactatacgaagccatcatgggtaagagtgacgccgtactcatgaaggaggctatggcggccgccacggacaagggaaatgatgtcgaacagagaattgtggctttggagaactttgaaatgctcgtcgagcagatcgacaacgccaacaacctcgagttcttgaacttctgggcacccctcatcgagcttttgatcgacccagaggacgaaattcgacaacatgcttgttgggtttgtggaacagccgtgcagaacaacgctcaggctcagaatgctgtatgtgtctagactacgcccacgtttgtgtccaccttctgccctctatctctttcctcactgaccttgttcacatctctgccgatgtctttcttcagtttatgaaactcaaccctctcccaacgttactcgccctgatctccactgttcctgctccatccgacctacacctccctgcacacgtctcaaagagctcacaggctacccgatcaagagccatgtacgctttcagcgggacgctcaagcataatgcctatgccatcggcaggatggacgatcacgaaggttggggttggcaagtcctcaagggaggattaagtggtgcgtttcatttatctgttgatttcttatcgtgctgcagaaactgtgtcgcatttagaaaactgagcgctcccttcttgactcggacaatgctcttcagatccatcaatgacgattcgacgaaagaccgctttcctcctctctactcttctccttctcgtcgctgctcccacatctgaattcaccttaacattccgacctgctcctacgacttccaaccctacgccccgatcaagctcaacagcagtgacgctcgctccaacccaagcgaatgaattccctaccgattcttccaaagccactccttcggttccctcgccatcctacacttctatcctcaaatcattcgaagcacatgggatcccatcagttgttctagattctctccgacaggccgatttcccaagagctggagcagacggggatgaacctcctgcgaacgaagatccggactacaaagaaaaggctggaagggtgttaatatcgctcttggagaagaacggattgaccgaggagctcaaagcagagtttggaacgtattggcttgacgtcaagaaagaacaggggggtgtggagaaggcattcgaggtcggcaaggaagaggctgtagagattgagaagttgttgagtttacaaagatcatagagttgtatctcttgttcttagacaatatcatatagaatgcgccaagcgacgactggctctcttcatagatttggcgagcgccgtgtttcgtcaacgattcgatcacacgcaacagtcaaagaactaaacaggaagagcccattatatcagacaattcattcccccttgcgtcccttcgattttatattttctatcaggaacagttcaagccgacggaaccttgtcttcctctccggccacaggttccggaacagaatcagaagtcggtcccgaagcagaagtagcggcagcggagtctgagaacaccttccactcttctgggaaatctctgatagacactttgcttccgtccggtcgtcgtttctcaagcataaactgtcttgtgaaatgcgtgacgtcgagcggtacatccgcgaacatgtcagattcatcctgatttttaacattcgcgtttggtggaagagaaaggaaaagttggtattgtatgaggttagttcaagaaaagaaccagagaaagaacaaaagagcggaacgtacattggcctccttgaccaatcttcttagcgtatcctcgcaccactttttgttctgcagctgatacctaaacaaatccgacctgatgacaacccaaccgtccacgtcttcgcctttcctatccttcaagccgtgcttgtaagctctgtcgacctccatctctcggacttcatccggggtccaacctcctaccctaggtgcttgttcttcgccaagaacagccggccgtccggttcggctgagatgagaggcttgctcaacatgccggggaacagcaggtagagaatgtcgtcggtttttgagggctggagcactcgtgtttcctagtttaaaatgtcggtttcgatcaaacgcggccggtcgaaatggatgatagaattctggagtagcgaggaggaggaacttgtgtttggcggcaggagatttgaagggaagtttgcaaacaggagccgaaagtgtcacgaccgagctttgaagatgttgatggatgttgagattaattggcgatgttcgtaggtgtgtaagaaagaaacagaggaagaggaagtaaagaaaacaaaagacctacgtctctttgctctcctcctcaaggggccatgtcttttgagtgtggaatcgaacatattcttcctcgacattaggaggctcgaaaggaagcgctaaagaatccaaaagttgagcaaatggccgatcgatcagttcgtcttatcccaaagttgaacagcgtcggcttcaagtttttccataagagctcatcttcaagccgagttgtggcaatcgcacgatgtgttatccaaaagaggactatgtccctcctacggagaagccatctttcgtgacgggagcacgagagaacgagctacgttggaatctcaagatagaaaagaaaagagaaaaaagaacgattctgaacttacgttgaagctttggtaactccaactctactgttctcatgaacgccaacgcgtctctctccttctgaatcatctcgtgacctatcgaagttgtctcgtcatactggaaatcatcaaacaactttgtccttcctttgaagttagatacctcagcagaggcagaagcagcagttgccgccggggaaggactcgtaggaggagcttcggcgtatgatcgggtagctgtgaaagtagatcggaggagagcagaacgagcaagcacaggaatccgtctgacaagcatggttcttgatgtatacgtttgagtagagagacgaaggttggtcagggataatgatttgtcgcaacgtacaacattcggacggggatgggaataaagtgttgatcgtggagtctgtccgactgagtcgattcgaccgaccctatataagcaaccctaacatatgctagttccgtcgcgccttacagcttcgtcttgttcgtctactctccgaatatatttggaatcgtcgatggagaatctttcgtagagcgcacacgtatgacacacagaagagaaaatgaaaagacatatgataagaagagacgaactaggattagagaagataaatgatctaatagattgtttacaaaggtgttctgtccatccgttctaccccgcccctctttcgagcccatggtatctacatgccatcttagtgatttgagagggaagagataaagaagagaaacataggacgattttcttagagacctccgaaaccggacatcgagttcctagactttgttggcccggtttccacactcgtcccacctgatgccgatgttgacgccagagcgttcggtgtcgatgggttaggagacgaaggatatccattgaaaaagtccgtcatggatgctctacaatatcaacaacaagagacatattgtagtaaggtcagaaataacattgatcagcaaacttatcgaaaagccaacagaagaaggaatagagaacaaacttacccgaaagtagctctggaatccccagtcttacacttcccgttttgactatcgacctctgctctgtcctcaccctcctcagtcaggtcctcctcgttgttccctgctactcctcctacccctccgctgaacaatccaagtccggttccatgcgaacttccgtctggagagccagtgtacccatcgtccggccccctatttgactcgagccctccgcctaatggggtactgcctccactcccaggcgtactcaacgagggactcgatggccgagtgttcgaccgtcgggatgccttcctcgcgtgatgtcgccttgaggcaaccgagttcgtgaacaacggaagcaagtatcgctcatccaatgaagtgaaccactcgccatctcggaaaaccatgccttcccggctaccctcttccagaagtgtggtcgactctgcttctccctcacccggcaggggttgaggttgagatccttggttatcaaaatagtcgtatcggttgtcggcctcgtgggggaacatctctccctcctcttcctcatcttcctcctcatcgtctatcaaatcaccatcagatgagtctaaactagtctcgcctcggaagctaggactggctaacaacgcattcgccgtccggggcggagcaccatacagcccagagcttgtccggaacccgttcggcctgattgagctttggccaggaccggtcagaggagagttatagccgctaccattcccaagtccgccaatctcaagatcgttatccgaatcctcatacccgcctgagacgccccgtcgaagacttctgccattggatccggcgaaccgtctggagctagggaaagaagacgaattccgggagcgatcattccacgcgtttcggtttctgctaggaccatagggtgccggaagggccggaccttcttcatccgacgaaccatcggcctcttcaacacctacacggatccccaagacctcaagcatacgagcggtagttcctccaaagataatgaccgtgagtacaacaacgacaaggacggtcgtccgcaatgcattcgcgttctctcctgtgagtcctacagcgagcgccacaccgacggctcctcgaaggccagcccagaacatcatctgtagaacgcgaaggtcaagtctgggtatgagtataacgctttagtagggcccaacacagatcgagtagactgaccatctgataagaatgagggagttcgtcatatcgttgacctctggcatggtaaacccaattgataatctctgatagaggaaaaacagcagcataccttgcggccataactgagatctatatttgaaaacacgagaaaacatggtcggtgaccgttgttcaaataccaatcaagagtatcttacacttacagcagttaccaagatgaatagcggcttaaagacctggacttcttgcgcaaagagtgcgagtcctaagtagataaatataaagttctccgatagttgggctaggacggcgaacatgtacttcgtcgttctttgtgttcgacgggacattgaatgataggcgtaatgcttgagcgtgattccgcagaaaagcaacgataccacccctatgtagtaagaggatacgtctcacgagtcaatattgtcaagaaccagatgagggcgcaggacagtagttgaaaatggacacgtaccagacatgtgcagaccggtgctcatgaaataactcgtgaacgcaactaaagtgactaggcaactctcgatgcccggatagaaccgtagttgagagtgttttagaacaagcgatgtcaagagcccagatgcgactccaagcgccatcgagatgctaaactgaagcaagaagatggccactccgtggaagaacgagctgaagtgaagggtgtctgagtcgctgaattgagagagtgttctatcaagatttacatgagacggatcaatttgtatggtcagtaaagacgccatgacgtaaagaacatggaaatgagagagcctcactcgtaaagtacgatagagaccgcatcattgattaaactctctccgaagatgatcgagtatagcttgggatcgactttgtacgagttgaagatcgataagatagtgacggggtccgttgccgagagcgttgatccgaaaatcagacactcgagcaatgtgagcttcacgttttctagaccggtgaaggaccataggtaaacaagaacactggaaaggagagtatgtagaaaataagttcgagttgatgcgagagtcgcgaagacgaggggatataattaccctaagccgacctggggagatatacggcatggagagttcagcaacagtcatgatagcgcttcccttggtgtattagcaaaatggacgaacagcacttatgaatgttccggcaaacgcgaaagttaggataaccccaaagtttcgaaagaagttgtcctgatcacgtccgacagaacgaaaatgtgatgagttgaggaaatccagacggcatcacatataacgaaacgcgtatacctgcttgagttcataacccgagttcagaataatggggggaaggagcacattgaagaacagggtatgcttgaaagcctgtttgttgtattcaaacaagagggagcagttagccctccatatcgatgctatcccgtcccgtcccgtcaacgtctcaaagccggccgactcaccagcatctcacggatcatgtgtcctggtgatagcttgaggactaagcctacaaccatacctacgtatcagaaggatttgatatcatggtcagctctctgaccatcagccgtctacaactgtgagacgaagaacgcccgaagtgtagcgttgtgccatgtcacctatagacacagtgtgttcaagtttgaacgctatgcggtatctttcgagaagaaaacatacctgcgaagatagagatcacagtctcatgaatggctctgatcttgcgaacttgaaggtagtatgaagtccagagtgctccgataagaagaaagcagaggatggtgagcgcccaggtggaatatgtctcttcctcctcaggcgtcgggtttgctatgacactggacgacattcgggacagctagagataacgagcgatgatcggagaaagctgaagacttcctcaggaggtgaaaaccaacagtggatatgctctccttgtctgtctataggcgtgtgtttgtatcctgagagacccaagatggggagatctactacggagaggagaccgaaagggagatggatggtctgattgggatggtgaacgaatcgaacgggcgaatttcgtcaaacgtgtccctgcctcactttcagcgcatacacaccaacaccttattcgatttgcggtccctacatcatcagttttgatctcaaaggcctttctatagattcagatggatgaggacgagcagctggcacagtaagtgctcgtagatgtgtgtttcgaggataccagcatgttgagctgaccgtcgtctggtatttcctgttgtctagtgcgatcaacatgtctttgaccggaacccagcccggtcgtacggatgacaacgaagaagacgactcggtgatttatctttcagatacggatcttccagcccaagtacgacactctagaactgtgcaaactactgccagagagaccgacgatgtcattgatctaacttcagatttgtcagacgatataagtcctgaaggttgatgtgacttcttataaagagtatacagacatctcaatactcgtcctgaccgtcgatttctttcccaatctcttgaatctgattacacagtagataccacatatacatcgaacagcgatgcattttttgaacctgagatggatgccgaactcaatttgtcagtcgactccttatcatccgggaacaatctatccgggattgctcactgctcactccttctttcactctccaaagcgcaatgaagttgtcgaaggaggccgaggaactcgaacaaagagttagaaaatccagacctcagacagaggaagaggaagcacaggctcttcggatgtacgtgtcaaactattattttcgcttcaaccgctttctgacttatccttctcaccactctccattcattgctcatcagagccatacaagcgtctctgattgaaaatcgtacgcgctcagagaaaccagagtcttccaacttgaaacgcccgcgccgatcaagttcagtcttcgaaacgtcttccagtccctcccgtgcagattgttctgcctcggatgttgacgactcgcgcctgctgtctcagcgcaagagggaggaacaagaagagagaagacgtgccgttttaatcgcacgaagtaagaaaagaggcagctttggagagttaacccctgcttctgtgacaacaccccacgcagccagtacttcgatggccaaagattctctcttttatagcgatcctgatgatgaacaagaggaggctggcaggagagaagatgccattagtcttgtttcaaatccccaattaacggtcagggcaataccactggttggagcgcagaaggcgctcgagaggacatccagcactagtttcgaaggaaggaataaagacgaggcgagctctaaaccgcgaaccaatccccagagcttgtctataccatctcgggctcagatggaagccgagcggctggccagggctcaggctaggcaatcctcttcttctggttttaattcttcaccaaaacctgttccctatgaagttcatccacctacacccgctcctaaatcaacgagcaactatatcattagcgcaacagccacctcgttcgaagcaccccggaagaaacccagagtagatccagccctgcaagcaactattcaacagcgctcgggtgaattgtattggcagggtgttttaggggtgactccaaatgtatatgctaaagaagcaaaaggcaaaagcaaggtctttagcccgaatgatgtaattggggatgtaagtaccttttctagggtcgaatagtaccttcagagccctcaggtttcgttctgactatggatggaaaaatctgtttttgatctagaaaaaccaaatcgcgttctcgttagtcagactgacacctccttcaatcatgtctcttcagacatatcgctaatcatctcgatctgaatctatagtatattgtctacgtactgctttgacccaaattttttacctgatcactttcctcacccaagtgaagctcccatcatcttggtctctccaccaccagcggttgagttagcagggaagagtagttatgatcagctgattgagggagtctggagttgttttccttatctgccaaaatcattctcgtacgttggtcctcatgtcctcttctgatgtcaagaagcggtcgtaagctggcagaacgacatcagctgactttctctcttgtttctttcttcggtacctcttcgattatcaagacccaactttggattgtttatgggggcctgtcatatgaaggtgcgtacattctaccataacgcttgatggttatgacattcgcaggctctaatgacccagctctcattctatctcatcccttctggtctgcttggacagttcatgctggtcagcgtttgcattcccctcaacaccctttcttctacacttgagtgctaactatcatctatcaattttcgatactcttagctgttctacaaggatggacggatgagaacagtcatcactagcgcgaattttatgggattcgattgggagagtattgagaacgtgagccctcatgtagttcctatgctctctcctgtcaatcaacttagatcagacttttgcaatcatagggcgtttggatgcaagatttcatgcctcttccggatggaccgccccaggatacagaccgatccgatttcggccagcaatgggagtttgttctacaagtatgtccccgacaatttatcttgtgacccgttcatatacatcgaggtatatttaatctttttctagtccctgggagttgataaaacgttagatatgatgtctaagatgcatcttaaaatccccataacccaactgtcgcacatacatcggtataacttcgggaaagtgactattcgattggtagcctccgttcgaggaactcgtaccggcaagtatctcatatcacatcttatgattgttctgtgctcgtagactcaataccacctcaatcttacacctaggctggaacgaggtcgaaaaggcaggagtggctcgactgggaaaaatcatccgtgaggaacgctggattgcaagagatgaatacaaattaccgtgtttggaagcacaggtaagtgtctataatagctaaaaaatgttgtggttgccaagatggactggctaacaagttatacttcgtgaaccatgattcgcactgtaggggtcttcagtagcggctgctactcctcgtgagaaccctttgttgatcttactttccggtagaaacgagccctggtctcatgaagtcatatgttttatcacctttgacgatattcaggttggctgaccgacttttggagactctcggacgggttggatccaagagattggttagttgctagatcgacaatcaagacatacccacctatcaagataagtgagtatataaccagagaattgactaaatggaagacctgtcctcaatttgcgctcactctctatatcaatactcggttcgacgtgatcaatcatcgggcgtgctccgaagtatatcgtaagtggaattcaatttcatcatcagtcagtcgcctgatcaagatactcacttgtgaatcggcggatctcgtcttttctggatacagcatctctggctacggtaaaagcttccgagatgagcacgcaaggagggtaggctctcacagtttatatatatataggaccgaacctgacatgggagcctcacttactttcccaaatgtgattgaactggaactttgaagagggaccatgtttttcaccaggaaaaactgggtacctggcatccagccgctgtttcatgacgccaattcgaagagagcaagagtcatgatgcacatcaaagttcgaccgtctctccatacccacgaccctgtacatcgtctagtaatgtatcgctgacatggaccaaacttctctgtttccttgatatcggcatcttatcatgattcagatgttgctagcagtttttgaaaaagttccccaaaggctgagctcttctgtctcgacgaacaggccatcttcaatgaatgataagcgatccgtagcggcttcagcagctctatctcggcatgtgaagcagaagatagacgtgattgaagagtcagagacggaggacgaggatgagggcgaggatgtgggctccatcaaacagaccggaaagactttgcggcaggtaggcggttggatgtatatgggtttgttcatctctcttcattccgaagcacaagtactcttgacgtgggacactaaattttgttcatcctctggcgcacgaattgcgctttatagggagtcataactttactcagtcagcttggggaaatctgagtatgaaaaaggacgtcggtccgtcgatgtctgtgagtcatctctcttgaagagaactctccatgcttttccatcgaatagcattctgttggcgcgttgaacgtggatttgacttcaatacatcttcatcacagcttatgaattatgaactaggcatagtatttgtgcgttatcattcttttcctgattttgtatcccttcatgtccttgagactaaacaatttttgtgaattcatgctgtgatactctgaacatcggatagcctctgccacttgagaaagctgaggagaccgcttcggcgcttgctacctggaagagacctccgagaaaatacttgccatctgacattccctgggtgggttcttgtggtcaacatcaagtgcattcgctctgtcatatctcatcctgatcatctgttcttgtcgtttctgtttcaacactagatccaaagcgaggccgatatgtgatagtttatacactgtatctagaatctaatgtactatgaaacatccttaatcaaatatacgattttaaaatctatgtattcaaatattaagtctccaatgatggtcgcccccctccgtctgctttggcccatctctgcgtttatccgtccgacctaaatctcactctcccaaccttctatcgagcgaaccttcagccatgcaatctgctctctttaacaaggttagctcaaagggctaatccagcctcagtgcagctcatggttcctgctgacaaggttttcggtgctttgaacttttttctctgacttttctatctgtcttctggctcgactttttctataataggctggcccgttagccgtcggctcgactcttgctctcaccggaggtttcgtctacaatcagcagcggaagccacttctcatggacgagtatcgtaggcgagaaaaggtacgtctaggctttcacagtcaggttctcattgggggcgtggatgagacaagaagagagaaaggctgcatggcagaaagatcactgacgtgactgattcaactacttctatgataaaaaaccatgcagcttccgatatatcctcagcctcagccagagatcatccttgtcgacaccttttctcctcttcaggctcatattgcggttggtagagaagctacgacatcagtcattcaaaacatccgggatgaatcccaaaaggttgtcgctaaatgggtggccattgagcgaagggttgctagttagtctgatctttgcatctctacatccttgcagtcgaatacatggttgaccactcttcctgcccttctcttctgtctctttctcagacaaagtaaaggcgacgatcccagaggacgagcctttgactcctgggattgcctgggtgggtgtgtctaccctcgctggttccatcattgctcgaaacagtcagtttttttccaacctcctgatcacgcatatctcatctatacactcgaaataacaggaagaaaacgcgtctctcttctctgttcg

SEQ ID NO: 1503 - DNA, 19147 bp, Xanthophyllomyces dendrorhous
  misc_feature (15764)..(15773): n is a, c, g, or t
  misc_feature (19074)..(19083): n is a, c, g, or t
tctcttctctgttcgtaggaaacatccttgtccgagctcttctccctccaactctccttgttgcctctctgcccgtcttccttcccaagctttcagaaaacttatcgtccgaaatttctcgatacaccctcaagacttctcctgaacttcatcgtgaggtttctcaggctcgagccaagctattcggtctgactgagcaaagccgagaggcctggatatctggcaagcagaagctgactgacagtgtcacccaaggtgttgactttgttgatagcaaaactggacttcagttctctcagactcttcgaaacaattcatcagcttcttcatcccctatcggtgaagagagatctcagatctaccagcccccggtgtacactgtttccaagacacccgttcgagatgctgtggtggccattccgtcaaactctgcgccgttgacccaggtgtctgacgtattggatgtgcctgtttaccaagttgttaccacgaccactcctaactctatctctactaccagctccaactttgcctccactcctgtggcccctgctcatttgtcgactcaggagcaggttgactcggccgccgcgtccactttggcttacctcgaggagaaggccaaggagggtcttgcttcccttcaaaagcaagaggccaaagcggagaccgctgctcgacagaccgcacatgagggtcacgttcaggcgaacgcccttcgggctaaagcacaggaaatcgttcgtgatgctcgatccaacgccgaggagggtgttcagaccgctcaagcaaaggttggagaaggtatcgaggtcgcccgagcaaaggctgaagagggcaaggcttctctcgaacagctcaaaaaggaggccgtcgaggctctggctgacgtgagcgagaagacgaaggagcaggttcaggccgccaagggcaagttcgaggaggtccaggcagaaagagcggcggagcaggagaagcaggtcattctcgaaccgttacgtgcgcacggagtggagcaccccaagttgcccagtggtttcaagaagctcatctagaggaacccctttcttgggttggacgaagacgatatttgtattgagaatggatgatgctatgattttctttattccaatctggtcccacatcaacttagcttgctcgcatatcgatagttatggcagttccttctttcggcgttgtatcaaatcaagagagcagacatttgtacagacgaaagacagatgaggtgtttagacgacaatcaaggagaaaaaagaagacaaagatgtttcgccatcaaacgtcatatctacgtctcgacaagggaacacccgccttacatcctatccatatccatccatccgtcgcgaaattgtccaacttacgagttctcaactttctgtctcgatggcttctcttcttcaccgaatgcgaccagatgactctggtgtcatctatcgaggtcaccgaagagagtccttcatgccgttagatcaagcggaacaggtcgagctacgagctcgtcaaagaacgtttgaaggagcttggacaaggtctatcccctgcatatctcaacctggcttgcttagtctctgattttctttaaccgatgtcagagtgatagttctagtcgtatatgaacttacatgattctcaattcctttggcggccttgcagaaccgcgttggtcaacctgggctatggagcggtcgtattaaaagtattcgaccggcgatttctatccagtctgtcctctttacctcgtctcgttctattagattgcactttctaaatgaatctcgctcatcggatgatgtgatgcgcttctgcccagttggcttgctgtatacaacactttcgatcgtcttgattatcgtagcagtccatcgaggaaggcagagtaacaagtcgttttctgataagtttccccacaggtacggggctcttttattgggaaaagagagacgagatctctcttgaaaatcttgcctgactaagggaactgacgaagaaggactgtgtctgatgaccaggtatgatggagagacactagacgcatcgcaagtcttggtaccaaccgaggagccatctcctataacccatcaaataccaagcgttatcaccgatgccatccctgttctttctcctgaaccattttccgacccagatacatcccggacaccgacaccggtgggtactccaccagggatgtcatctcagacgctcactcgtcctctgttatccggaagacagtccagaggaggattcttcaaggatgcagacagcagtgatgctgcgcaaaacgctcaacagacacgacagaagctagatcagcagaaacgagtatttggagcaccgttcgtcactgcagggggagcggtcttgctattcgtgagtaaaggtttttctcagtatcttgttcgctttgagagatttctttcaactgccaaggtgtactcgaccgtgaagtcattctttctcatctctgtaaaattatcgcgttcatccgcctgatcccgttttctgttactatcgggttgccgtgttaaatctcacagagctctctagtctgtggcatggagatcgcattgtttgtgcttatcatgaagttttaggcgttgacgacagtcctctaaaacaaaaccttaagaaacatatttgtaccaactgctcttcgtgttcgagaataacatatctgataatatcgtcaaatgttcataaatcaatcatctctggcacagtcgggcgttgttggagtatcatcacatcgcaagggagtatctacctccacaaaacacacagcacactgcagccttgagcaactcctccaacagccaggcttcatcagtctccgatattggcctcgacctgtttgcatttccagtcaaatcatctggaggcttatcacagtcctctctatcttggcattcatttgtatgctccatctcggtttcttgatctgtcagagtcggctcgttgtcggcctcatcattctcgtcttcctccttgacctcctttccgttctcctcttcgctgtcttcgtcaatcctttttttcattctttgaccgccagtctcgctgttgtgagaaacaccattggcggatatttcctgcacaacagagccttcaacgttgaattctgggagaactgcaaggggtagggatgaaggaatctgcgtgtccatttcggactcaggcgtgggagtcaactctgaagacaactgccttgaccggtcttgatatgtaacacgtggcgggggtgatgaggcaggtggcggtgtcagttcagatgtcggtgggatcgacgaaggggacttctgcagatgtggtagatgtgcaggaccaatcgagggccggagggcttgtctagatgtcgaactaagaccaggaatcgatatagggatgtcaagagaggttgaaatggcaggagttgcttcatctactgaagcggaattgaaaattggggctgcgtctggattcggagttgaaggagaaagggtagcagcgcgggtgggagaggaaatcgatgagtagatgttaggaggcgaatgttgatgaacactgttgacagtgatatcgttgccatcttcttcctgacgagatagcgatccatcagtgattatcaactccgtccgcccttgctcctctcggggcttatttttgagcggtgatcttggccttgtaggtacgcgtaatttctttcgacgagatggtaatctggaaggtggcagaagtgttgggcgggtacagttgatacatctccggactcgagggtcgacgagcagtctcaaagtgactgaacagcgacctgaatgtactcggacatatgtcacggcacagctatcagcatatggcgtaggaaatgaaactgaagacaggtataggttgctcaccccaaacatgcccctgctcacaaatagcctcttcggtatcgttgaataatatcttcgctccacaggccggacaaacttctttctcgtctgcacaatcgctgagtcgagtactgttcctagtagcctgtcgaatctgttggtcttcttccgactcttcgggtccttcttgttctacattctgccttctgtctatagctccatcggtcatagctgactcgagcctttccagatcgacctgaatatcagtttcgaaaaaaacggccagatcgaaggctaagccagtgatatgcatgagttcggcagacgaagggcctatagacaaattgagagcagtcgaagatgttggcacatgtatgcacaacgataagaatgcgtggatcaatcggttgatgagagctttgtcctcggctaatggaattaccacgtttcgcgtttcagatcagcaatagttttcttgccagacaagagaacgctgtgaagcgcgaggacaaacctgaatcaacaaactcctttactctgtcgacccactcaaggatcacacgtagagattctcgaagaatcaaccgagccagtttctgtcggtgaaagacagatgatggatcttttgatcgggcttgcgactgtacctttcgagtcaaaattcaatatgagattcatcatgacacaatcttgtcgaactaggagtgaaaactcaaacatagcgaacgtaacacataatgaggcgaggaatacaaacttaccgacaggaatgtagcaagcgctacttttgaccgtaatcttcctatgttctcatctgcccaaaggtcatctttcaaaccctccctgaaccaatgcctgatatagtctccgtcttgaggatacttctcagaagatgatggtcgcatgaatgttgaaggaagttttatcaagtgatgtatcaatcgagagtaatacgtttgtgctgaggcggaaggagacatgagttgaaggataaacggcaagagttcagacgagggagaagtgatagccgctgcaaaggatgaaacaagaagtgactagacatcagcacacgaagtggagcatgcttgaagaacgaagaaagtacggaccgttatcatgtttattgttgaggagcaactccaactcgctgaagaacatttgttccggtaattgattggtgatgggtaatcgatatatcgagaacgtattatagactcgataagacatagtatatgtcatatcataagggtagaaagggctagaagaggtaacataatcaacgaattagtactcaagagcttgcaatgaaagtttttctgagaaagactgacgaatagatcgaagcccaaaacccatttcccagatatgaaacacccgatgtcctcataactacatctcttagctcctcgactgtctcagacccgaacgcttcggatttttcaaacatcgtgcggacagatcgagagagctcggctgacaagctataatcatatataggctcagcagtatcgagttgactgatgagttggtgtgatccatccgtgagcgaaaacacaatggacgttggagtcggtcgactgactcctgtgcaaatccatgagcaggaaaattcaaacgggcgttgattttagtgatggacaaccaagtgcaaagaacgaattccaaaaagcaggcatcgaagtacgaaccacagcagttgcccagttttgtgcttccagcccatctacctgctctacacgttttccagcgtttcgttccttcccagcctatccacccatctctgacactttcgctccagacgtagagccatccaaccttagcccaagccagtaaggaactatttgaatcaccatttgatcgattcgtccagactaaagctgaggctggtctctggtcaggcgggaaaagttgtttgggctcgcttattgataaggagagtgatgttgtgcttgatatattttgagtgacaagcaaataatgaatcgagcccgatgggtcggtataggcaagttttgcatgagctaggatgaagcacacaagaagaaatgagtccaccgatcaggtagttaggctgttgaggaaaaagcgaacatactggcataaggcgactctgaggaccattcactccacgtcagggatgaaatccactgcttagatacacgaatcttgcggacaagggagagtgttccatcaaatgcatgtctaaatccatggtcaatgtgataaaacaaagtgctttagtgaaaagaagatagatggaaaacgaccgattacgcacaaccaaaaagtgatacatcctcctttatggcccagagccagcaaactgccatcggaaaagaaagatcttttgccctctgcattcaagggaaaaacgacctgtttagaccattccaagcctgatccgataataatctatatcaacatgattgcgcaaaagactcatggaagaaggtgtttgagagccgtacaggtcgtctgggcgtctagtactcgttgaacttccatatcgagcttttcgatgtttgtttctaattgcataattgcctctcgtggatagtcggacgcgtccagtagcttaggtacaagcgtatcaatctgaaaaaggacgcgacgtaagtaaatgcaaaaggacaagctatggccctaaaacgacgcgacttacaggttgccacaagcctaaaacaggatccttgggaggtgagaatacaaacacatcaagattcgtggtcaggccgacaagaacacagctgagcatgcaaggattaagatgagacgtttgtcagaatgtaagagcagataggtatagacagtaatgggaaaacgaaccctcctaacgagctaagtccagagggagaccaacaagccattctccaggaaatctcatttgatctggtttgtgtaccgaagttgagaactctgtaatctacagcaacgacataagaacaccgaagacgattgaacctcgacgacgggtgcgactgcaatattcaaatgacttacctgcactttcgtcctcttcccaacgtgacagaaagtctccagggactgaaatattgttgatcaagcattttaccacactgggaggttcaggaatcctaggcagggtagattcgcctccctcttccgctttgtttgcagcagaatctaaggtacggtctacagaccaggcgaagttgtgcttcgtatctagcaccctctgatcaactagagataaaccagtcgaaaacgtaggatccggagtctatgaagccggtttcaagtcaggcgaagcatccaattcaaaagagctgatgaaaagacgcgtacgactatgataagatctctagatcctattacaagaaattgcccgtcttgagatctttgcaaagatcgaggggtatccgaaggacacgcagcttgtagtcgatacgtgaccgaaggttgagcagaggccatcacaccgtttgcttgatgaattgtttttgaacggagaacagaaaaacgcgttatcaaggatacatgagtctacctgagaaagctatcccagaacgatggtgatgatgctgatgaagactattgttgaagttttgaaacgcagcggtaagctttaatagagagtttagaatttcggtttccgctcttatccatccatccacccatcccaccacctattcgtccaacaactcatttctttcttttgtaaatacagccaacaatatagaggtcgttcaatccagattcttggatacagattgtattgtctatattctatcaagatcgaataggctttgcctcagaggttgaagtgtcgtcggccttctccttacctcaaaattcaccatgcttgcggatttgattgattttctaatccaagaaatagggatgagtggccctcttggtacgtgcttattcaattgaatctctcttagcaggagatggctgtgcattgccttctcatcaggcctatgtaagactgttggagacgcaaatgatctggggttctactttaaagaagtagcagacttaaatgccggtgttgtttatatggctgcttcagttcagcttcattctcttgctttcctacaataaccaaggttgatgtcatccagtgatttcgggatagatgattgactgccttgtgatcaacctgaaacaaattttgttacaaaaccgatgtttttaggtattcatccggattccatcatagacttggctaaactgcactatactcagcaggccaaatccacctctcacgatccctcgttgtcatccgggaaatcccctcagaaactcgatgcagcctttctatcgtatctgtgggatgttttgattgaacaggacgatgttcgcgttggacgggaagagtcattttcgccggatggagttgaaattcaaaggacatccgaagatctgcccagcagaggaaagaagcgagcagtaggattgaggcgaagagcgcttgaggatgagagagaagagggtcaagaagaggatcaagaatatgagaatgaggaaaaggttctcagaaatcgacggacgagagcggataagtctgatactcccgtagccgtgcgcgccgctctggttgatttggacgaggaagagcttttttccagtgacctatgggatctgaagaaggaccatggggcgaagctcagaatagcactgtctgaggacaaggcatacttcatcatgacaggcacccatcgaggggtatgtaatcttcaaaagcttattttcggtgcgttcatctaatgcattgctaacggtcctatcctcaattgttttcttcgtctcgattgtttttagaaacttgcgcttggagatcaaatgtatcaggctcttactttaatctcgcagtcgaaaactcagggaattactactatatctcttacggatgtgatgggtcttgacccaaaaaccattcactatttcactaagagtttgcttagctggaatctaatgtaagcttgcttaacttctcccaatttatctgctaccccgaagacaccaattttagagtgacttcttcctcttacaacaatttattcttttgttctttgattgaaagatcaaaatttcaagcctacgctcatggaactcataccgccatccactttcattcgcgctacaccacccagagtgccgaatatctaactcttcgagggactgcctccgctgcagccgctgccacctctttgatttctgcaacagatgtcgtttcagatccaaaaaatgctgacaccgatagcgcgcagcaacctctcgccgacgaactaggggaacttccacaaactatgttcagctatttggatgtcgttcagcatcgaatccttcacgtactagcgagaaattcacaaggaatagcaagaagagaaacgctacttagggatatcgtaagcttctcatacttattcgatccgcatttctatatgtattcaagtcattgcaatctactccctacagggatataaaggagtggttggccgacaacagcagcgtatgcttgctcgctgtatacgtcatattgtcactcggggcgaaatccgacgtgtttaccttcgaaactcgaacccagaaggtaaatttgcgtccctagagcgaggatttcaacttatcaaaaaagctgagaagaatggggagggttccgaagatgtgatgagtgatcatgaggaagaagaagaagacgaagagatgggtgacaccatatcagaagaggacgagaacgcgctggtagctgccattgtcgatggatcggaaccaaatttgatcgttcaggacagtgccgttacagatagtgagttcttgatataagcccgtccaaaacatattttcaagatgaagttgtggcgcatgttcaggctattctcacctccaataccaatgccggcatttttcacgcgtcatcgcttctctacaggaccagcagtcgaggacatacgtaaatttgcttctcccaaacgcttcgaacctatgaacaagatggagccgtccaccagtatcgagtatcagatcatgcgaatgcttcaagtcgctggtgctacaggggttacgtgccaggtatgctctttatgtccctgtatttgacttgttgttcacttcgatatggttttgctgaccttcatctcgagtccctctttctccacattgaatcatgatattagtccatcactcatgaactcaaggttgatcgtaaatttgttgatcatttcctcgaacgattcgccaagcagcctgttcctcccaatctctcccatcgcggtcttgtttcccttgcagatgttttgggaaaagaaaagttaatttacgcattcgacacggaaggctatcttttgcaatgtaaggagcacggatttaccccagacgcgcatgcgtttcctgcacctgatcccgtgcgtgctcgcgggttcttggatcttactccgtacgaattttatgtgtcaaagagtcagcatatcgcgtggaatagttctttcactcaagggcactttggtccgatgatcctccgaatgcctgttcttgcattcttcaacccttgcatcccacctgaagtaatctatatcgaggacgaccaggacgaacggaaaccagtgacgcgtgctaggcaaaagtcttcaggtagaacttccatagtcgctaacagtcctcccaacatctttgtccgtccgaaaaccaaaggatctgggcagcagtacaagcgtgggatcgggaaaagcacttatgcgcagttgcagagaatagctatgggagtagagccattacccatgtcaggctcggaacggagaaggatcattggacgcgctgagtctgaaggagtagacatctcaaaggctgtagctaactggcatcaagcacgtagaggagcaatagcggcacctgatagtgaataccaatcgagctcaagaccgcgtcaatcaaccattcatcgtactactgaggccactcctactgcttcccctgcggtcaggcgaggacgtcctccaaaagccaaatcagaagcctttcaagacctgtctgatatctgtgttacaatgacacctagttcaacaccaactgcacccaggaagcggggccgtaagaagtctttcttggctgctgacgacaatgccgccttgtcagctatgacttccacgccgacactgccaaaacgccggggcagaccaccactgaaagcaaaatcgcataccaccccctctgaaagtccttccgttgaaactccgcaaggctctgtagatgatctcctgattgtcaaccatccctcgccgagtacagtttcgacgagtgtattggtagacgaggggtgtactcctgcttatcgacctcgaaagcgggcacgcttttcagggacggccaatctcaaagttaatcttgagggtactcctaagtcagctcagaaaccatcatccgtcctcatcaacgatctcgaatctcccctttcttccatcgatagtttcacatccacacctcagtcatcacgtcctcttcgaaaatccagtcgcttgtcggctttaccggctgcttctgaagctctcaatcattcttcagtggcgcatccaactgcgtcacctctaccgaccaaggaagtgctagaatctaccccatcggcgactgcattgaatggtgtcgtttcgtcgcattgctccaacaaagccggaatttacgacccagataccaatttgaaatccggttctatcaatacctcaatatcagttggcccactcaagaggagatcgagtgctcctagaacgagcttgcatggccctagccatgctcagaccaaacgtgacaagttttttgtggactggattgagagtctgggaggagtgcacgacataagctctaattctcctctacaccttcagcgatacctggaaaccgctatcgctaatgcttctgcaaagggagtccatctacgactcaacgctactactatgattgacaagaagacttggtctgcttccctagaacgtctcgtcaacaaaaatgttctcaagacacgtactgtagcggtagaggtcaatggctcaatgttgaccatcaagtttgtcttcttgactgatacgccagaaaccaaaatccaagaagaaattcgacgacttgcatctttagcagaggcccgtggtaaaaaggttcttgcttccaaggtcgctgatcagaggaccgctgctcaaagatctcgcccgaaaggtgtcgttgaggctgatatgggcccacagcctctaacagaacgggaacgattgtaccgggctacaatggtgacgatggaaaaagaagctgaagagaaacgagcattctttgccggcaaagcagcccagaagcgcatccagcttggcgatgattggctagcattagctaaaaaacatctcacgagaatgtcggtcacattaactcctactctcgagctcaacatccgggccgtccagcagctggagttagcccaacggtctggagggcgattggatgaaactcatatagcatctttggtacaagagctcttggatcttcctgagggtgatagacctttgccccaggaaacaccgatggggcgacaaaagaaagggactcgtgtcagacgacccaaaatctccgatgtgtatgacagggtgaacgagcttcaacacgataatctctccgagattatggacattcctttctttttacccgtaactgaggaagacgatgatctgattcctgctagtcttagaggacctccagaggagtcaggtaagatattttgacgctgttcgtatcttctacatgtctagtttattgatatccaaattatatcgtccgatcaaattgccagatcctttaggtcctcgtcgtcgaactcgatttacagatgaattagacgatatgattatggatcttggggcaatccttgagactcgaggtcgtgaacacggcttcatgttcacctggaaaccagctaccaaggtcattaccagccttaaccataatattctgcgacaccgttactcggtactccgtgagcgcctagggaagaagacctatatcaatgggttatctgaggcctactcaaggctctggaaggctcatcgaggaactatcaatctaccagaacccgcaggggcaaggtcaaccgagtttgatattgttcatcatgtgaagttcttccgaaaaaacacccaaaaaaaccatctgtatgttttctatcccgtcctggcgtttgactggtttgtttcttatcatcatttgactgttccacaggctcaactcaattgtagaaggccaacttgccgtaactcctactaccgtctccattgttccacctcttccgagcaaagtatctggtttaaaagattggaaatttacctcacctgagcctgagagcaaccattggaattggcttctcgaactcagtgctgcagtcacagctgagtttgcagaaaagaagacgttggaggcgccgttcgccatagagcctctcatatcttcgaaaaaagatttgccggttatatcacggttctcgcgcgagcagggtgtgatcgggtctactatcaaagtacgtcttttgtcactcccgtacactgtgcggcgtttttgaaacgctgtttatgaatgtatttttttaaatttttttttgcttacccttctcaaccatattctctatctaccagatgatcgtgaaccccactactcgaacttcagatcctgatattgctgaaaaaatacttcctcaaacccctcttgtcgacactgtacatgcctcattaatgagaagtggagtgatatccaagattgggaagagcaaagctcctcctactcgatttttcgagataagcgaagggtgcgtttttatatatatatatacacgatttgtctcatgagtgtactccttatgaatcattcatctgataatcgttgttatcgatccttcaaactctagattcatgaagcagagcgagggtccctatgagccaacattcttcgatgaagccggaggcgttcacaatccaaaaaaagatgacaccttgcttttagaagaagaacactcaatttggcctctggttgcatctgaaggagcaactgcaaaactaatcaacatggtttctgacaatagggtttgtcctgattttcatcgattgatagctaacctgatatgtggcttatcaatattgaaataatttcttgatatggactgggtgtgtgtcgctaatttgacttcttcactacattggtcatcaggtggaatttattgtggaccgcgaagagatggaaaatcttgcgggccgaggaatgatagacactaaaaaacttggtgggagcatttcattctcggacttcacacccaaatctgttgacttacatcataattttgggcaacgtagatgacgaggaccttgaatttcatacttatgtccgcatcacccagccagcacaaccggtcaatcttcacacagacatctaccttgctaatccttcgtcagacctcaggcctgcgcacatcgatcctgagaggagaaagcaggccttgataacgcttcaacattctggagcaggggaatgggtggagcccttcgaggaggggttgatgcgggctgggaaggatggactgacatgggaagaattaattgtttgtgctctgccactttctctttgcacttttttacacttaagaactgataacgcatccattgttttttccaggacttgacaagctcttctccagtctccaatattctccattttgcgcattgcttctgcgagacgacaccttcgctatccttctgggctggctatgatgaagcccgtctcgtttcctcggcgttcttctctgattggtcagtcgaaataccgaaggacaatgaacttgtgtacccacggaagtgggtggactttcagggcaagattcttcagaaagaatgggaaaagaacgtgagatgtgtagttgggacgttgatgcatcggccatatgtcaacgaggtaagtcaacggattctttacttgtgttcgtcatcacttgtgatgcagtacatcttgactagtgccacacctttgttgaacgcgacctactacctcccaatctgaactcgcagtggctccttcggaaagtgctcgaccctatccttgatcgaccagaactcaatgatatcctcaggcatcttttcaagagaggatgggctcgacgagtcacgttccatgaggcaacccagctggcacatatctgttcagtcaagcctattggatggctgagtcgggaagaggagaagtgggtagggtggtgtctgatcggggaggattggttggaaaacgccggcactgggataggacaggttcgtcgtataaatgaggttgtgtaggttgtcctatgcgagatgaagcgcatagcacaattttttatccagatctttccgttgtctgctctgtattttcgaacatctttctaccacacattgtaccaacatcatcattctttattcttcgatcaattttcttgtcttaagttattcacctatcattttcttacatctgcgaaatagtcaactttgtgattcaatatttcgacatgcattcgataagctgcctatagactatcgccatgatcaaacaccccaaatgtaccattcagaaaagtttgtttcaaccaaagacgtacagacatccactccttcatcttgcaaacatcgtaccaaaaaaaagacatgagataacccgacgcgggactcgaacccgcagccttcagattagaagtctgacgccctaccattgagctagccaggctgttgatggcagtctgcgactagtgtaacctagtatgttcttgtggttgagcatcttggctgaagaatattactgaaataaaagggtgaaaatggacttttcgttctggcacttgttcccaatcaagtcctcactggtttcccaaaccatatacacaccacccaggtnnnnnnnnnngtttcagtaaaatggattgagaaaccaggaaaacagaagggaaacccgctagaaaatttatagctcttcggaaagagagccttgggactccgcgcaaatagaggcaggcagatgatgtctcaagaagagattacaaataacagatgaaattatgtcaagactgctgaaactccaacattagctttgaatgtgggtttcaagcagtctttgttgtgtttcaagccgttcatgtcgagggtttgtagtatatgttgaggttttgcggcctgcgttgaatgtgatgttgaacgtgacgatctgtatatacactgtagctttcgtcgtctaggtaaccagtggaggacatgacgttattcttttgcctcttccatccgttctacctctcctatcttcctgagcctcttattctttctcgttctcatgatctcgtgtgcacagtagcagatcgtttctgactctggttctgggtctgatacagggaatcagttgctcaaggagggtcagacattgagaggattggagctgcgtccaagtggccacttccgaatgaactagcacaaaaagctctcaatttttccaattggtgctcgttcgttttgaaagattgtttataatgaatcataggcgttcttacgcgccgatgtatttggcagtggccatttggacgcgattctaatagactccatctgccgacgcgtctgaaaatccacaatctttagtccgtaaagttagacccgctcaacgaccctgccacctctttccttgtctctcctcaatccaaccttagacgcctacatgtcttcaagtttggccaaccaattgtagtcggctctcaacctgtccatcgtctcctgatcagatcaacccaacttgcctctcttggtaaagtctcatctatggctgacaagccaatccgaatgcacttcctaaacagaactcatattacgtccgaatcggagacgacaacaaagaggacgaattgcaaaggactcacaattcgaacttcgatacctgtatctacggccttgaaaactaaacattcgataacagctcagagcaacacagatccattaccttcacccttcctttcccataccctttccactgaaggcagctccttactcgtgtctggtcctcgtctatcgtcgacatctccaagctcaccatcgcctgaatcatattcacaatcctcggatgaaactgcttttacagcatttgttgtttcgaccatcatctcctcgttcctatatcttggcccggaaccatcatcggttcaggatgtggaggagctgaagaagataggggtccgtcgtgtattaaatatggctgtggaatgcgaagatgggtttggaatgaaagacaagtttgaggtttaccgtaaacttggaataagagatactgtggaggaacaggtagttgcacaagatctgaacgatgcgtgcgcttacataggttcggattcaccagactgtcaatcgtatgtctctggtcatgaatcattgaccacttctttctgcttacttgtctttcaattcagacgatgccctcctacacggatgtccaatttacattcactgccgtgccggaagatctcgctcggttatggttgtactcgcatatcttatccgacattatcgctggccgctcaagacggcgtacgcgtatgttctcgaacgaagaagaggaatatcacccaatatcggattcatggctgagctcatggcatttgaggagaacgaacttgttaactcagcaccgaccatgaacaaatcagtgaacaaggtataggaaccgggactggatggataaatacatcacaccaccgagcggtcagacaaagagtccatcaacgggattagaggtcaatcccatagacctattgtcccataggccgggtagtatgccctgactacgtactcagaatgaagggtagcaaacctagattcaagtttgaaaggtacacggtcattttggcaggttttttcttgtgaaaaatgccgtgattttattctgaatttacgcaggatcattcctcccgttcgtcgcttgcatttgttctggctcttactacccacaggtggatttgtgagagaacgatatgtatttgataaaatttcaacatctctatcttctttggtcaagaagacgctcgtcttcatctcttgaacttcgtccgtatgattctttagttgaatactactagcttgacttgattctatctcttcttgctgttcagctctgttacattgatccatcaccacatgtattctcgcctgtactctttcgttctctttacgattttcattgtttgatttctccaatctattttcatcgtccgtctgtgtaaaaccttgggtttttatttacaagcatcgaatgaatctactacctgatcggacggctgagaggacccggcgtctcatatccataatcccgtgtcaacgtggaatgactgttgactttagctatcttgaccgagatcattagcaacttagctattttgaattgacaatcgtcccctactattgaggaatgacagcaacggctgtaacactcgcactctttttcctctacacaaagtttagataatcactgtttgatgctttgtgtcagtttcttatttcatttgtggaccgccaattacagcttttattcggttcaggatccaaacatgtctgctgggagagcgcctgtgtcggtgtatctgtcagcgaatcagaaagcgctacgtgatagggcgttcaaattgtttccgaaaccaagatttcaagcctaaattccctgatgtcagtcagaaacgatctgctactgtgcacacgagatcatgagaacgagaaagaataagaggctcaggaagataggagaggtagaacggatggaagaggcaaaagaataacgtcatgtcctccactggttacctagacgacgaaagctacagtgtatatacagatcgtcacgttcaacatcatactcaacaccaatagctccctgactttatgcctgtttcttgacgaccagtactgcagggaaaataagatgagactgagaatttcaagggaaaagatattggaaaaaaaaaacgaccgctgtagggtttgaacctacgccttcagagaagagtagctgatttgatttgaattcaaggctaccgcgttagaccactccgccaaacggcctcattgaagactcagggttcacaaagctctactagttgaaactcagtatcatcagtcgttgggatttcagcagtcttgacattgttacagctattgtttgtttttctattggatatagcagtctnnnnnnnnnnataatacaatagggagctcttaataaaattagtgagcactttgggatattctaatggtggagtc

SEQ ID NO: 1504 - DNA, 40219 bp, Xanthophyllomyces dendrorhous
tggctccagagcttcaaccgtcaagccaaaccgccattcagaacactatcatcacgttccttctcccacttgatcgcgcaacgcgcgctgagaccatgctcctctgttctgccgctctttctcggccacccacctgagctgaggggattcgttcaggtcgacggcgctccacttgtcgggccgtctggctctcgccatgatcgcagtggttgcttcttgttcacatcatcgccgccatcgggcagtggtcctgacgattgacccgctttgtggttgactgtgtggctagccggctgtgctgagagactcagctttgttcctcttactacctctgttcttcagcgagcttttgctgatcgacaacgaatgatcttcactcttgatctgtatcgtatactctcagccggacacgatctggcctgttgatcagagtcaggacggcgctgtattttatctgtggttgtcgccttcttctactgcttttaacgatggagtgctcgactctgcctggcaagcacttgaatgctggatgcgctggcgtaaagaagggtgctaaatcacacttccgatgatgacttgcatcaaaatacatccataagattgtatgtcacgccccgcagacgaaggctaacgaagatcatgctaacctcagactgagctggcgaaatgaggaaaaaaaagtcacagatatctttctacgacaaccccaatagtggtcgatgtctaatcattaaccttgattccgttgagagccgttcaattggtcaacagatggctctctagaagattttcttgaactttggaaacgtatatggttttcaaatctgattagaatcgggtttctgtagaagagaacgatgatggcggtgagcttgactgcattcttctccgaaaggttcatgacgggcgaactacaatgaagaaacaggcataggaagagtatgtgaaaacattagaatgcatgtccaggcaaacctttagatttggtattccttgatggtcaggtaataaacctcattgtgtcgtagccactgagagcagagattttgaacttaatttgcatcatatcatgctgcttcttgtttacttgaaaccgtactcgcagaatctccccttccggctcgttctaaactttcatcctccaacatccatgcagggctatacatcgccccgcgacgaactgacgactgcttttcacgctccgttgttgggttatttggtttacgcgagggagagtgttgtcgagaggtagtcggaattaagagagaaggattgggatgagtattgacaagagatccaagggaggtatagctagaagagaggggtgagtgagtgagtggaaaacacaagtaagcgtaataaatccgaagaggcgtttgatgtagatattgacactcaagacagacatgtagtgaatcgaagccaaacatttatatcgagagggaggagcgaaagacgtacccttcatcatatagaacacaccatggaacatgatattctcgcaagtagtcccacacatccctatacgaccagttcaatattggatgtatgcgaagaaatgatggccaggtcggatcggtcggctgggtcaaagatagtgatgctggtagagcaaaaagaacatcttgaggtaagggttcaaagcttattgagcgtaaaaactgatgagaactgacaaccatgcggatcccctcgtctggttccaactagaactccttttacgcctttgcctcttccccaatcaggctcgccatttcgattgtctccctcacccagatagacaccaagagcagccttcattcctccacttatcctaactaaatccagaccgtatgctttcacggagtaatcgacaaatttctctacttcgggaaacggcgctggcaatgtgatatatacggacttgatgcgtggaagggctgagggagaggaagacgtcggggctcgaacgggaggatgagagagtggactcgagagtggacttgataacacgttataaagtagatgaagaagaagtgtacctattaatgaggcaaacaggacttagtatgttgatgaccaggacggctcgtgaagataaacgcaactcacaatcttttccgccgttgaagctcaaggcgagagcatccagactaactcccaataaagacgatcgagcgatggttgaggtcaacgcaggggtggatcagccgcctcttctcataactaagagatggaaaaaaatcacgggcttacccaaatgtgtctagtgcatctctgatgaccgagtgcgcttcgttcactttgttgatcagttcggttcttctctgagatgagatcggaggggtcgaggtacgagtgataaagctgagatcgtccgacaaatgcacttttataggcgaaggagacatcattggaaaatgataatttagacgggtctatgagcttctagagctagaaagctgaggggaggctgagcgggaagcgataatccgtgagccgcaacgctgaagaatgtaagatggatgagtgggagtgaaagaagagaaaggaggaagatgttgttttggtatgctgtcgtctctcattacgatcaaggctgtgcaacactacaatgtttaaggagtctttcctaatcgaatggaaagctgtgacgaggcgagcacgacctttaaccattcattagtcgttgataaccctccaccatcactcatctgacgtcgagctcattcttgttctctgcggatttacttcttgtttatctgtgttgtgagctcttgtcctgcccactagacgatttactcaaggaacttactcgagcttgaactttgcagattagggatgccccgcctaaatagcaaccctgatcccagaatacctcttcggcaacttccgctacgagccactcgtccgtcatccatgcgaccatcaccagcatcagccccttcttcgagctctaaatcactcggcgggaacctcaagtcaacttatggatggaatcgatcgaatcgagataacgacggaggagatgaggaggaacaggccttgcttgatggagtagctagggatcatggtgagggggacttagagatgggtagaacgtcggaagaaagaatgccaggtgatgagatcgatatgaaggtaagcacgatccatctataatcgaacgccttataataatatttattctcttatgtttcttatgtttcagaccatccggtcaaaaatgaagaaagtatctcgagacgcatcgcgaacaatctcgtttcatgcatcgagtacgttgataacgttttcgcctctcctgtttggaattttggctgatacaacttcaatcttcgtgacttcatccaatcgacataggcaagttcaagagcagctttccggcaaacctcatccgcaaccagaaatataacattgcatctttcctccctcttgtcttttacgagcaattcaagttcttcttcaatttatacttccttttggtcgcgctcagccaatttattcctgcattgaagattggttggttgaacgtttttagtctacatcttatatgggttcaatcttaacgctgatctctggtttatactcgcgaattatgcaggcttcatcgtgacatacgttgctccgttggcgttcgtattagcagtcacgatgggaaaggaggccttcgacgactaccttcgacacttgcgagacacagaggccaattcggcccgatatcttattctagatcggaacacaggtccatcaaccatccctccgacaagagcagttccatcatcgaggcttcaggtcggtgatctcgtcgtcttggagaaaaatcagagagttccggcagatatggttctgctaagaacaagcgacaagagtggtactgcattcgtcagaacagaccaattagacggggagactgactggaagctcagagttgcggtcgcaagcttccagtccatgacggataaagagcttctagcggtccaaggagacgtttatggtgagtgtttcgcttcgacaacaccactcttcatatttcaaaagttgatacctaattatgttaacttttcaacctcagccgatccacctatcaaagatatccacaccttcgttggaacggtgtcgcactctccgtttgatgaaacgtcagacagagcagtcccaacttcgtcctctcctcaagcatccctcctaaccacgtctcagcctccaaaggttgacccgttgacggccgagaatattctgtgggctaatacagtgcttgctgcaggatctgcagtaggatttgtagtgtacacaggggaagaaacaagggcggtgatgaacacgtcaaagtctgagacaaaagttgggctattggatttagagatcaaccggatggctaaggttagatatcttcatgtatctcttgtgtataaatacaactcgtggtactgacagctggtgtatacacccggatagattctgtgtgctgtgaccttcgtcttatccgtcttgttggtggctttgaacggattcagaggtcaatggtacatatacgtgttccgattcttgatcttgttctcctctatcattcctatcaggtcagtaatctgctcttttgtaatgtcagtatccacaatcttaggtactaagaactgagcttttgtaacgtttccacagcttgcgagtcaatcttgacatgggcaaaacagtatatgcccataacattcaaactgatccagaaatccctgggactattgtccgaacttcaacgttacccgaagaacttggcagaatagagtacctacttagcgataaaactgggacattgactcagaatggtttgtgtagctttttctctatggttttcttttcgttcactcattgactttcatccggtcaacgtctgttgtccgtgcattctgcacattgatagaaatggaaatgaagaagcttcatctaggaacgatgtcctatgggtatgactcgatgaacgaggtggcgcatcagttggcaatctctttcggtggtaagttgcaacacaactaccatgtttctgaaattctttggcgggtttaacaaagccatatctgactgtattcgttgtacgtcatctaggtacacacgcgaggcatgggtccgggttagtgaccggtgctgtattagcttctagaggcaggagagacatggcctcgaaggtgaacgacgccgttttagcattagctgtctgccataatgtgagtgctatcctctacatttggttttggctaggttcgtgtctgattatcataggctcgtcttcaaaggttactcctgtcgaaggcgatggcgaaatcacataccaagcatcgtctcccgacgaagtcgctatcgtgaaatggaccgaatctattggcctgtctctcatatcgcgagaacggacatctatgacggttcgcattcctgacggctctaccaaaaggtttaacatccttgatatcttccctttcacttcggagtccaagcgaatgggaattatcgttcgggatgatcaaggcgagacaaccttctatcagaaaggtgcggatgtagttatggcaaagattgttcagaagaatgactggctggaagaagagtgtggaaacatggctcgggagggcttgcgaacgctcgtggttggaaagaagaaactttcagaggcggcatacaaagactttgaccgtaggtatcacgttgctcgaacgcagaccgaaggtagaaatgaggccatgactagagtggtggaagatctggagcgagatcttgagttgttggctctaacaggagttgaagataagcttcaagaggacgtccgacctacactggagttgcttcgaaatgctggtataaagatttggatgttgacgggtgacaagatcgaaacagctacctgtattgccatctcaactaaacttgtctctcgaggacaatatatacaccaggttgctaaacgtgagcgtttcttctcccgatttgaacacatacgtgctattcgaaggttttactaacaaacttgtacaaaacccactagtacggactgctgaagaggcacaatatcaattggatttcatccgaagcaaactggactgttgtctagttatcgatggagagtcattacagctttgtctcgatctttacaaggatgagtttatcgagctggcaactcagctctcatgcgtcgctgcctgtcgatgttcacctactcagaaggcggatgtagcgcgtttgatccgacaccacactaagaaaagagtctgttgtatcggagatggaggaaatgatgtgagcatgatccaggcagctgatgttggtatgtagatcctttatatactatcatagcatgtcctctcttaagtctgtgagctgacgttcgtaatcattatcatcacaggggtgggtattgtcggaaaagaagggaaacaagcatcgttggccgccgacttctcaatcaaccagtttagttacctgaccaagcttctcgtttggcatggaagaaactcttacaaacgatcggccaaattggctcaatttgttatccaccgaggactaatcatttctggtgagttcactcgtagtgcgttaagcatcatgtatgtgcgattgagtcttacactcattgtatacacagtcatgcaagccgtcttttctgctattttcttctttgcccccatcgctttgtatcaaggttggcttcaggtcgggtatgccaccgtgtatacgatggcaccggtgttctctcttgttctcgatcgagatgtcaacgaagacgtggctttactgtaccctgagctttacaaggaactcaccaaggtaaaatgttgatgctctttgtttcgctataaccttgactgactttgtgcctggtccactcgtattgaacagggacgttcactctcttacaaaaccttcttcgcttggacactcatatcagtctatcagggtatgctaatctttttgtcaacctcttaagtacctgtcatggaataaaattttgacctcttgtgttggtccaggcggcgcgatcatgattatgtcgctacttctgttcgaaaccgacttcctaaacatcgtcgccatctcgttcactgcattaattctgaacgagctaatcatggtggctttggaaatcaccacgtggtaagatcgatgttctgtcggtcatcattatgctgcccaattaactcactcctttactttttaaaaggcatttttacatggcggtctccttgattgttacactcctcttttacggaatttccatggcgttcttgcctgaatacttcagtcagtctcaatttgatacttcgcacatcggaacgaacaactgatgaacgttagattctgatatctgcacagatcttaattttgtgctctccgttcgtttcatttggaaggtggccatgattgtagcagttaggtgagtctcatgtcattcattgagtcgttctacttgaagtttccatagctcacgccagtatcgagtcgacactatctcgttctagttctctaccattatacatggttaggatcactcaacgatactttcgtccagccacatatgccaagttgatctcatgatcgatctgatatggtcggcgaagattgttagaccggacttcactcttataccctgcttaaatacaatgataccatcacatgtagacacaagacagaggatagcaatgttgttttgtgcttggaaagagagcaaacatggtgataacaccaaatgtcagataacgtctcacttatatacagactcaatgcagcagcgttttgagatcttattaccagccatcatactattctagatctcctccaatccactttagctcgcttcttcaaacaccgtaataagtccagttcacttgttctcattcagagagtgtctttcctgctcgagacgtagtagtttaagcggcaaagcaattagagtcgtagaggaaagcaagagtgttctacctgtcttaccgctcttgactgatcttgtggtcattggagattatcctgctcgccgtccacaatacttctctccatccagatatgaacacttcagtatcaccttcgtctctatctacgccgacaatgacattatcaagtctcgctacgactatcgtactcagccgtaccctgactgctagtccttcggcaacatcgacggtttccaatgacagattagatgttcttccggggaaccccttggtgaatatatactatcttcaaacttcacctgttgaaggactagtacattaacactttctgtgtgatcatcgatcataacaaccaggccaatttcattctgggactattggtcataactctcgctagcgtgatgaactctttcggattaaatatgatgaagctcgatcatgtaagtatccattccgtaactttgttctggcaggacgagataatcaagtatacgagaggcatggccatgaatcaaacagaactcatagtagagggtcatacttgttcgttgctaatggtgctccttgttggatgctcgtggcaactttctttcgctcgtcatggcagatcaagacggccctgataccgtccggtcagaaacgtcccgagtggctgcgcccgacttggctgctaggttttggatcttgtaggttctatctctctatctgtaaggacggaaaaacgacttcagacaaagctgaattaagaggtttgaggaacagatgtgatatcgcagttggtgggatccacgttggctctgagatacttgcgagctgagttcgtagccccgttaggaagtagctcgctcgtgttcaacttcttgttcgcaagatggctggtgagatatctgtgttattggttcattatcccaaacctatcaagttaacaaaagaagaagaacgctgaggccctcggatattctattttgtattcggaatatctaggttggcactcgtgagttactcctcatgtttgatgttcgcttgaagttgaagtgtgaactaacatcgttatcctacgcatatggatcttctcagcggtcacacagaaagacatacatggcacaatgcttattattacaggagtcattttgatccttgtttttgccagcattaattccgggctctccaatactctttcagttcgtacaatatacaagtattttcatcctgattgacaatgtgttcattgacagtatctttgatctacgtatacggcttcaaagcttgatagactgtatgtgctttggggtcgaggaggattccttttctacttctttctacagatattagtcctgtttagcgcatgggaaactgtgcatatgctcgctctcatcttgagaaaccaaacaagtaacgaggatgagatcgagcagcatctatcggtgtgttatgtctctttctcatgctaacaagtgaatgccatactgtttgccttaccttctctaaatcatgaatgcacgtctatggggtgtgcgatgagcagacaggaccgcacaagcatattcccaagtttttccatcctgtccaggcgtatcataaatcagcgcaacgattcctttcagtcaaattatcagtgttgttggggagatcttctgagaaacatttagcgttctgtaccggaattgggtgggcgagcgtggggggagcaatggctggtgcgagtctagtgtttgctaaggccaccgtgatgatcgggatgggagaaggaaacgttgtgagtctttctatgtcatgttgtatctcgcttgaacccttgtatttaagttgatgtcaggaaatggtcatattgctctcttcttgcttgtagtacatccactttttacccatgataatgattgctttcctcgcattaagtgctgtgctccagatgattgctctaaacagaggtttaaagtttgtctctgtatcgtcctcatcacatctatgctcagaccttggcctgactacctatatcacgaaaaaccagagcttatgattctacactagtcgttcctgtattctacgtgagttgtgctactttctcatcgctcctcaaactttatgttgttaaaactacgtttctgtttcgttgttcatgttctctttggcttgcttgatggggtcgcgcatggtaggctggatacactctccttggctttgttaactcgatggtcttcttggaccaagttggtgcatacagttggacggtgttgttctgtattgcggtcggagtaactgttttgttgagcggagtggttagtttgttctacctccgttctgctttctttcttcttggctgatactggtttgatatgacggtacgttacggctcttgctctcttcaggttcttctgtcctctatcaagaaggaacctgtgcttgaaactcctagcgcagacgtccaggaagaccatgaacggcatttgaatgctattgagcatccggatcatggtcgaactcgaactgaaagccatggaatcgaagaacggcgtgcgttgtttgacgctgaagaggatgctgaggaggaggattctgatgatcggttcaaacgtcagtcgacgcagaagagagaggatgaattagctagtggggcaaagtgggaggttggaagtgtaagtgatgatgaggaggaagaagggtcaaaatgggaaggtcagctgagtgcgcatgtttcgtagtcacatggactgtatcatcttgctcttgccttatgagatccggttaatatctttctctgctgggtagtggatcacttctgttatatatctgatactcggtaatggacgcttgctcgattataacgaccgatggatgcgacaatccatatggtttgttctcgtctgacaaggaaaaggatctgaaagcgcttcattcattcattatggaagcgacatacataaacaatgccgatggacagaagaaaggagaaaagaggggtgatggctggagagtagacagcgcagggatgtgtccttccgttttaagattgatgaacaaggaaccacgaccaacctttattaaggctttcggaatccgccctttccatcagtgatggtaagaatctcggaaaccaaaccggttccgatggtctttccaccctctcgaagggagaatcgagatccaacctccatgggagtatcatgggtaaggtcacagatcatgtcaacgttgtctccaggcatgaccatcttctcctcaggagactcggttccctcagggaaggtcaagtggcaggtcacatcggcagttcggaagtacatctgaggagcgtacttctgaacgaagggagtgtatcggccaccctcctccttggtaaggatctgcgcgatgaaaacatgattcaaatgtcctaatcatcagtgatatgtttttagatggtagggctgaggacaagacaaagacatacgtaaagagaggctcggaacttcttgacagactcgatggttccaggaacaacaatgacctgacctcgctggacttgctctcgcttgacacctcgaagaagacaacccatgttgtctccggcttctccctatgaagcacacaaaacgcatacgttggatgagctttgcttgggaaagaacaacacgagatatgtactgatactgaagagaaaggaataaatacccgctcaagctccttgtggaacatctcgataccagtaaggatggtcttaaatcgggatccgcttccaataatctcgatttcagcacccttctggatggttcctcgctcgactcgaccggtaacgaccgttcctcgtccaggaatggaaaagacgtctagatgttatccgacacaagtatttctatggtcagtgttgctatctctagaccacagaatgcccaggccagatcaagcttaccctcaacgggcaacaagaagggcttatcaagatctcggacgggggcatcgagccactcatcacagttcttcatgagctcctcgaccttctcagctccaatcttggggtctcggccctcaagcgcggcaagcgcacttcccatgatgatcggggtgttctctccatcgaatccgtactgggaaagcaaatctcgcatttccatgtcgacaagctcgagcatctcctcgtcgtcaatttgatcgaccttgttgacgaaaacgcagagtttcttgataccgacctgtcgggcgagcaacaaatgctctcgagtctgaggcatctgaccgtcggtagcagcaacgacaatgattgcggcatcaagctgggcagctccggtgatcatgttcttgatgtctataagagagcgcagagagtcagcatggcattgacgtatgtgctatcagtacgctggatgtttgacatacaatcagcgtgaccggggcaatcaatgtgggcgtagtgcctcaaatcagtctcgtactcgacgtgggaggtagcgatggtgattcctcgagccttctcttcaggcgccttgtcaatctgagagtaatcaatgaactttgtcgatccagacttctcagcgaggtgcttggtgatagcagcggtcaaagtggtctctaaatcatgaattcgggttgaaggtcaaagcttacttcacgttagaaaaggactcgatgctttaccaaacaaaaggagcgaatgaaggactaacttccgtgatcgacgtgctagatcgtggttgaccaaggaaagaataagggaatcagttcaatttctgacaagaaatggagaaacattgtcttacaccgatggtaccgatgctgtgatttaacgaaggaaagaatggtcaatgacttttccatcttcaagaggctggctaaatcttacgcaagtcggcgacttacttgaagtggggcttggctcgggaaaagaactcggcgtaagatcgctgggcctctacagatatacatgagacaaaaagaaattcagcgcagggcacctcaaaactaagatgataaagagcaacactgacctcgggtgatcacaggagcgactgcaggagcggcgaaagcggaagagagcctggatcgggagccgataagggtcgactgggaccgaatctgagtagcaaccgagagaggccgggcaagtgaggcagctttagagaaggatgaacagataaccaggcgtcagaccattggttcttctccttccgaggtgtaagagagaagaagtcctgctagatggcgttaggttgtaaatgagagcgagatgagagaaacttggctgttccgttggttcattaacattatcccagctcttcaggctgatccacagtcaaggcctccgagacctctaccttctcattgaatgtggagtatgtatcgatcaggaactctgatatccttcatcacattcccgccactgttccatcgttgattcagtccgtctcagcgatactagattcttgtctaacggcccgatttaaggcacggtgacgagactaggttccatagagtatatagctctgatcgaaactagtttccttccgtcctatctacgatctacgagtctgatcgtactattcttgcggtcttcgttctataaacgaaatgagagagagggaacggacgagaaaagaacacggatagaagaggaaagggaaggcactaaccccgctgagctccctgtcgagcggtgagagcagtaagcccggatcgagcgcaagtcttggtagcgagcatgtttgagggcgagctttgagaggatgtgtgtgtgcttctaactgttagagagacgacggaggagcgaggtaaaaaagaacggggcgaaaaagaaaagaatcggacggtgagaggcggcggaaaaagtgtaacaatgcagtaattcaaatattatatattgtaaccagctcaactaagtgttccagacccagcagatggttccttgttgaatcctctcgtttgcccacactcaccgtctttgtcgccttctctattcctctctctctctgttctttttctcatcgcttccccttgattctatccagcatgtcgtaagtcagagcctttttgaatgtgtgttctcttagcagaggtgtctgactgttcgattctcgtgattgtctgcctgtgtcgccatgctcttctccgccttgatggaaacacagcgacctcgttcaccttccaaagtccgagcttaacgaagcccaggtccgacagctcgaagagtatgaaacctcacagggaccgctctctgttcttcagcagtctgtcagaaacaacactcaggttttgatctcgctcagaaacaacaagaaacttcttgctcgagtcaaggcattcgacagacatagcaacatggtatggtcgtttttccctccttcatctttttcttccttttctctctacatatctacgtggtatccttgcatctagagcattcctcgtgagcttctatacatcgttctgctccagtcgcctcctgctttcgaaagaggtcgtacagactgcacaagcagatgagcagtgaagagattgccagcgacatctatctacgcgtctctctcaaaagtcttcagatttaaccttccgtttctttctttccttctcacgtttctaggtcctcgagaacgtcaaggaggtttgtattccttctctgctctctcatctcttgtctcatcctcttcagcttttgatgacatatattcgtcttgttcgcgatcgagcagatgtggaccgaacagccgtctagcaaaaataaaaagcctgccaacaaggatcgatttatctccaagatgttcctccggttcgtgttcttctttccgtcctctcgttgagagtctacctatccgatgatcaagagtgcgctcctggtgaactaacgctgtgcttttgttaaatatacttggtgaaacaatttgcttgttggaaatctgaatgttggtttgcgacgcggtgctgcgtttcggatacatgatgggcggatggattacttcttcgggcaacggctgatttctgaccggttgcttgggtttctttgtagaggtgactctgttgtgatcggtatgtctcattcatcctttgattctccttgtacttccagagctcatcctgaccttccttttgctcttctgtccgttcatccctgaatatgtatagtccttcgagtggctccgtagatcctctccaacctctcctacaaatgaagacagcttccagggttcttctcctttccttccctctcttcatctctttcaataacccgtcaaatacaaaaatgagcatgaacttcttgtactctatctctcaaacgtatgctagagaatgaatcaagacgagcagaccctctgctgtgctgttccagagcgttatcttctcgacgcctcaaacggccgcgtgcgtcaattattcaactccaagcatgagagcagatcatccaacctcatctttccgatgagatcaacatcatagtggtctgttgatctggcctgttggctatcagaactacatttcaatagaaagaaacggccatttgcccaattcagataagatgactaaaaaagaagagaaactgatctattatgtaaaaaaaggagagataacaaacgtttgtcggagagtgaatgagaagtggaatgagtgaaaagaacccttcatctctgagcggcaaacacctggacacaacatggacgccaagagatgaaggcttatattttctgcaggaaaactcgacgattcgttaatcctattcaacttctatctagttggccaatcccacctcctgtgtgaacggattgacgaaaacaaagtcaaagacagattgtgagtgattacaaactagaggaacaagattcaagcggcaacagagatgcacaaaatttaaaggatatgagggagaagaacacataggaggaatccttacattttgaaggaggaatccgactcttctctgactttttggtgcagttcgaccaccagtggtcctcatctcctgacacacgaagctgtccggcggtccgagccactcgttcaacctgtatctctcctcattgtcgtcctcgtcatcagcgcccccaaagttgtcgtactcgtgttcttgtccaaacagatccctggcgagttgggtatgagacactccgccgtacgtggtcacacaccgagggtttaccaaaatcctcgccgccgtgaacgcagagtttggtcggaggaactggacgtctccaccagggatgtcttccgtatcgagcggaggaggtgcctgcgaatcctccgcgtctgtcatggcgtccgcatccgaaccggcgtggatatcgtattcttcggccggatctgcctgcttgtgatggaaaactggggcggctcctggctcctcatcctcaccaccttcggcaccggcaccaacgacggcggctgccactggcttgaccttagctatttcgacatcagcatcggcgtcggcttccaaatcgatgggttcaggcatcaccggagcgttctccgcagccgatacatcctcatcctcatccccgtcgtcctgctgtctcttgatgactcgagcttcaacctgcttcgccatctcccgcttgacgaaagccttctcggaattgttgatcactcgcttaccgtactttccggtcgcacccatagtatcgtcaacccacttgacgttcctcgagttcttcactccgtccttggcagcatcggtccagagatctcggcagaaccacatctgagtagagtccatgcattgaatatctgggtccatctcaaggggctgggcactggtcgataggttctgggccagtccagatgctcggtacttaagacctttgtagtacgattggaatgggtctactacgtgtgaaccggattcacagcagaacacctggaacggcagatgagcagcatatctctctgtgcccactcgatctcggggagggccactaatcaataacaaaagtttaatattgggtcggcttctttccaggtaaattagagacaaaggtaagcaaacttactcctcaggcttggcactcgactttgcctgacggaacaagttgccctcgatgtctcgcgttctccatctatatccgacattgtaaaacctcctgtcagactttaattcggcggtatgtttccgtcaaaaaatggcgggagattttagatatagacttaccgatcggagaagatgaagaataagttatgttctgcccaatccataccacacaccaaactagcgtcattggccttgctgactcgcaagttctccagcacgtcggtcgggcaggtaaatcctttgagccagacaacccggtggaacttgatctgtctcttctcggccaattcaaacaaaggatctagcgccaaatttcgggctgtcgcctcctcgagagggtagtaagctgccgaagggttgaccgtcattgggggaactcgtcgaattctgaaggcaattcctagcatggttagtacggcttcacacaagtcggacagcgtcggagtagaatcggtcgagtctgagtcaagcatcgatacgaagacattcttgtgaccgagtctagaagaatttgggccgacaaccacagatccataaggtcagttggttgagaagtgaggaagtgggccggatacaacagaaggaagtatctcgaaaagagataggaaaagaaaggataatcatgatgaggtactcaccgtttggccagttgaacgataacagcaagttgatccaccaagaagtgatcggctgaatggacgacaatagcgatgtagtataagtggcctcctttggcaagatcttcgtattgatcatctcttttgttctgtccgaacggtcgagagagtgtagggcaggcagcctaggtcattcgcgcccatcatacacgtatcatccggaaattgaacgaggacgggtaacagggagtcttgcgatcagctttgctgctagttgtatcgcgaatatgaaggatagacgtacagcaacccatccattgaacttgaggagttcatcaattgcattccggacgacctgagcatcccgatgagcggtgtctgcgccagtgatccatggcttttgatatcgctcccagtagtcactcacaccgagggagatctgctcgtcaaacatatcagactcatcgtcacgacctgaaggatgattcaaaaaagtacaaggtgtgaatacacatcttcatgagtctatcttgatgtaaatagaaatcaagtaggttatgaggtgagtagaaaagaacgagaagaaccaagatagcaagcaagacaaacagcgctcggtctcgcctctcccggaaatctttgatcccgggaggtctaaagacgctaaggaatggaggaagaacaagaaatcttccagagagagagaaacgaccagcttggctgacaaaacgctagctagaaaacatacctaatcgactctgcaagaaaccatacttgtgaacatccaagttcttgtctcctcgtattcggtcgatcacaccgtgggccttgatctgggattgattcgatactctaacctcgggagagctgaaaaacagccaacggatagtaaaaaaggcgagaagtccgtagactgtacgttggcacagccttacctgtgcggctgtgagagccatacttcgaagggggaagggagaagagaaaagcgagagattgggtgatggttgatgggaacgggtttcgtactagggatccataaaatacaaggcaaaaagaaggttgtcactttcgcgcagtcgccccgagatgctcgtccagtgcttattcagcacagatagcatcgaatgaagaacgacacatcgtatatcatacattgtgcacataaagctcactcatccagctcatctctcagaaacccagtgagaccctcgatctgtttttctatctggctgccgccgaaaccaaagagaaaactctggctgccgtcaaattcaacctcacttatcgttctctccttcccagaggtcatacctcggaccgaccgaccgagagcgctggccgatgatgatgatgatgatgaccgagtgctcaggctcatgagtcctctccgtttgagattggctgctgtcactgttttcgtcgtctttacagtggaaggactaccgacgcgttgagaatttgaacggagcgaaggtgattcggaggccagaggggaggttggttgagcaatcggtcgaggtttcgaagtaacgggcagggaaacaaccatgtttgtatgatggattggatccggtattatgggtggaggagcacatcgtttagagttaggagttgaactagagagatcgctcggaaatgaagggggataaaactagagaagatatgcgaatgagatatacatcccaaatcgatcagccagtctacggaacaaagtagctcagagggaggaactagaagcggatagacaggacatactagatcgaatgccgactgatctaatagattttcccatcgacgcttcttgagcaccgtcgaattgtcctcttccggctccatgtcctctagtaagctctttccagcgtcctcttccagtgccctctcgaccgacagaacactggtattctcctcattctccttggtgccctctgctgcgccgatcagtgtactctctctgactctttccctcctgagttgtcgagcgggtttcttgcccgtgaaacgtgctgcgttcgctgatgacaacgaccgccgcttagtttgtttaaatgtcaacagacattgatcggatgagactcccagttgaatgtctgatggttcatcgcgcatatgctcctctcgggtcattctagccagctttttggtgttacggaagattttcttcgcccgatcggaagaaggaggcgtgggctcttgggagccaatattcacattcgacattgaggagagagggagaggaagaggagaagatgagagtgaagctgaaatggatcttgtggtaccattctggccggaaagcgccgaggctgccaaagatgtcagcggggccagagaagaagtcgggacgtgttgcacagctagcgtcgcatcggccggtcgaggtgaagacgagcgagtgttagagcttggaagcttgcgtcttttaataggcactgtcggatatgagacagaaaccacctgggtagcggactgcctccatgcgaggtattcggtctcatttctagaatggaaaaacaacggccggttaaggggaagtcgtcattagaaaacagaacgggaaataagcctcaacgaaaaggccagccaaactggtcaagaatatgaatgacaagagagttcacgaacctgggtaaacccctagagaagttcatgtgtctctctgagcgttccttctcatctattggtatagatcccagcttccgcccaacctctccccctccggctgcccagagccattcatcgccagctggatccttgtatgtgtgatacctgaccgaggtcaggtacaacatctcgggagactctcgtgcgatattggcaagctgtttgacgcgacggtcaaactcgggattcaatggtggggcagtgaatggatatggactatatcgaatgacaggaggaagcatcgacagaagggatcaacctcgaggcagaacgagcgaacgtaacagatcccacttacggcacgctagcaaaagattcaagtctctgcgtaagctcctcaagcgatagatctctcaacgagcggatggatgtcatgaagaattgacgatgtgatatgctcgatgggtcaatcgatcaagaccgaaagaagagaacgttgtatcccaacagttggttgacagttgatggaacggattttcccagttaaggtttactcgaatccatcatcactcaacctcaaccatcatacccgcatctctctcatacaacttggtatcgatacaatgtctagcaagaacactcagcctgctcaacctcagtataacaatgccggaggtccttctggtctgaaccagtcaccgttggttggggaatctgctcctccccctgcctgtaagcttccatcgttctcttggagatgcggtggctattctccaaaactagtggttcttgtacaagtggaaagctcattcctttgtcgtccatttggacagacgccccgtctccttacttccaagggcttcctacattcaatgctccggagctgtctactccgttcgtcgctcctacagctcacgtagccacccagcgagctagagctaggttcttcaaggcgcttgtggtggcgttcatcctctgggttttcctagggtccgtgtcgtttccaccattgtctttctattctttttctaggctttgacagttccttgaatctcctgcctttgtttcaatacgatctgttctgcagtgctgtcttcggaggtagcgttttcgaggatgtctcaagggacggcagtcatcgaggctcaggtcgacacccgcatgtctacagtggctctgacacctgggattctacaggaaccgaagttactctcgaccatgttgctcatacttctcccgagttgacaacgtttagagagacaaaagtagtccctgaggttgcgtctgtcgaggaagccaaatcggattaaagaaggattaatatttgctacataggtcatctcttggctatctctcgctctgcctttctcttcctcttcttcttcttcctcctcgtcttcttttcccttccttgtttttgcttcttctgattctatggacttatctctatgcatggcgtgctttgtggacatgaggacaacaccattgcgtatatccaatcattcgtcgttgatccttctgtgcttccaataggcgaaacagaacggtacgcacccgcgacgtcatcagcgccgatagccggggcctcttctctttttctctcttctttatcctccccctctttctttctgcccatttcgtccgtcaacgaccaccaacacatatcgttgccagccaatacagcaaagctttttagacagatatggccggccttcttgcatcctaccaatcgtttctctcgaggaatcctctcttgggaaactcggtctctgctgccgtgcgtcctctctgcttacctgcctcgctggttatatttctgaagacaggcccaagtagattcgcctctctaatggttgcttgtcctttatcttgtgtactacttattaggctttgtttgccactggtgatggaattgctcaacaatatgtcgagaagaaggtagagatgcttatatccaccgtacttttacttcttttaaccatctgaagatgtactaacttttcggagggactggctcgcgccgggcatgcgatgttatagggaagggaccatgactggattcgaacagggtaggtcatctcgacttctagtcaggtttaacagttctcgtctgatctgtttgctcattggtatctcgatcaaactgataggaggatcgttctctggggaggaggattgtacgtctgtgtatccattgactctctttccgaccccttgcaaacgaatgagagctgatcacggtacgggtataccaacaacggacgatccggtggctggttcctcgattcaaacatctcagatttgctcctgttgtgacccgttcgttcagttaatcgaagtagaccttgttgatgctaagcactcggtcatactgatgcttgtttcgtccgtgaatctgtctcttttcgaaacagaatggtttaagattctcgaaaaggttcattttctgatcgccacggcttctctgcacatgcatgctctgggctgaactactgcgaaatcttgatcgtacaggtccccatcaagaataaagttgctgctaccgcgaccagggtacgtgcatggttacttggcagtttggacattggtagagcagacaaggagctgattcctcatccggacaaatctcggtgtcttaggttgggttggatcaatttgtacgtatgccactccgtttatttctcaaaacactgatgttccctcctgctctctctgtcgatgggcttttgaaactgatcactggctcttgttaatggcaacatacaggtttttgcacctatagtgttgacgacgttcttcagcttcatgggactgctcgagggtaaagagaaagagaacgtccaagagaagctgaaaaacgacctagtccctactttgaaagcaaactggttcgtatctcttcctggttttcaccatcgttctcgcctgtttgaagaggcggttatactcacgctatgccatgcttgtatactcgaaggatggtatttattcctacgcaagcagtaaacatggcattgatcccattgcagtaccgactgcttactatgtaagctttggtctgggcatgtcttcccctttggacgcggtcgatgactctgctgaccagcctgtcccgcttaatgccatgtttcctgctgaacatgtcttcgtttcaatagtaacctggtaagttcagcgtgctttacatctttcatcattcagttcggcatatcaggctctgattctcaatcattcgttcggtatatatccggcttaggtcaacatcccgtggaatacgtatctttcaattcaggccaacaaagattcgaagtctgtccttaaagaataaatagattactctgcactagatattttgtaggaacgttcgcgagcaaattctcaatgatgtgtagaacgtagaacgtagaacgtagaatgtagaatgtagaatgtagaagggatatgaatgagatatacaatcgatgctactagtcatgacgaaggtgtacagatgggtgtctgtaatcgatcaagtaatttttgtgtaatggccgactacaactttcgcataatcatctgattgccattgtcatcagttcgccaacgacgaccatcaagtgaacacacactcaccatggctccctcgagagcaaacccaaggggtgtttatagtcagttcccatgctttgtttgctttgctatctactttacttaaatcgatctgaccgttgttcgctctggcctctgggttggactttagttagcaatgtaccctagtaagcccatcgtgttcaagcaacatccagcacaagacgcacctagatttgacgtccacaccatccatctatgcgtttctaatcttcatcgtccactcttctcccttatcttacttatttttctggctcgatagtgatatgacagaggaacaattggctcatgtgatgagcgaggccggaccggtcgcgaagactaggtgagtgagactctctatgacatcttcacttttatccttctttcaacctctgctctgtctgtcagaatacatcctcaaaacaatcatgtttcttccttttcttctttcttccgccctatatggacttgctggtcattctggacagacttgcattccatcctgatactggacgggctaaaggttttggattcgtcgacttttgtaggtctagtcgcgtcttctccttcgttctgtttgtatggtgagtaggcagtgtgctgattgtcagactttgcttcttccgtctcatgacatgcagatggtaagtcttctatagaacccacattgagccgttccacccaatgctttcttactctcatatccctctctcggcattattcatagattccgaaacagctgcctcggctgtcagaaacctaaacggttatctgatcaatggtcgtccgctctcggtgacttttcagatggacactgatcacaacgtccatctctcagcctccgttgaccccaactcgcctcaagcgttgttacagaaccctccaagaggtagggagcttgaccggggagctctcgcgacagacgcaatcactcaaactttagcagctatccctgccggtcagttggaagaggtgttgggccggatgaaggtttgcctagccatttctctctccctcttcctcttgcttgaactgatcattcatgacttgtttatatgtgttcactctttctggactgcagggtctcgttcagacatctccggcggatgcccgacagatcctgatgtctaatcctcagctctcctacgcactttttcaagcaatgctcatgatgaaccttgtcgatccaaccgtgatctctcgtatgactgccggtcagccagcctttccgccatccgtcccaccctcatctacgccggtccatacaacctcagccggtcttcctccaccatcgtatcctccggctgcttcgcatcagccacattatcctccccaacagccggtcagagggtatccctcgtacccaccgacgtatgctcaaggagggcctccgccaccacctacgttgccatctcatcaccaacctgcctcggccggtccgccgtctctagcgccgcaacaacagggagcacccggaagatctcctctaccacctccaccgcaacaacagccaccgcaagcggcgaacgcgatgccaccttcgttggctcatcttccaccggatcaacaggcaatgctacttcaggtgttgcagatgccaaaagagcaggtcgacgcacttcctcccgaccaaagaacaagcatcatgcagctcgttagttctttcacttcgttcttccgccttctggtattcgccctttgttttatgtatggtacaagtgactaatcatttgggaccttccttttctctctctctctctctttttcatatggctgggggttaaatcgaactcagagagctcaatttgggtcaatttaaacatggcggtgacgaaagagacggagaaaagagaaggaagaaactttgaagagaaaaagacagagaatctgtcattcgatatttgagatgctatctgatgaacacgatcggaaaaaagaaaaaagaaaaagaaaaaatcgaaagtccgacgaaagaagagaggatacatccatagagaagtgggaaaataaagatggaaagttctaatccgtcttgacgtgcctgactaggacgatgtgacatcccagagggctgtttatgtcaaatcttgattccttcaacgatcactaacagcactgattctcgatggaaagacacaatctctgacagtcaacagtctatcaggaggaatagaaactccacacattctacaatcgagactcgcgtaggcacacacacatttatcaaacatcaaagtggagaaagtagaagaaagacatctgaggctatagagaaacatccctggcagatgatgatcgacaagaacgatgatacggtttgctggcaacttcttttttcttcctcatattggaggaagaagtaaagagtgtgtataaccaagagacagaacgatcaataggagagactaagaaggcgtcaacaaccctaggtcaagaaggaaacaaatcatgagactcgagaagaacgtagtttgagttaaccaagaaaagggtttcaggaaggtacttggatcgacatctatggggaaaggtcaaaacagagaacaaaacgagaggggaaaagagaaacgcgagctggtgggcacgcaacaagggaggggggggaaaaataaatgttggaatcatatataaccacggcgtccatatgttagcagaagaatatgggtttgatggcaaaagagaaaaagaaaaagaaaagatttaaataaacaccggaacagaagcgcgatggagaaagcagagaaggatgagatgatgatagaaagccgagtatgaaagagaaagagggaagaataacaaaatgaataaagataggacaagccattgaagcacacaaaaacacaatgatgtacaagcacatgaccggctttgaaagggaagggaagaaaagatataaagaaatctcaggaggaagaaaaggagtagatcagaaaagaatgaggggggaaagagttgtgaacaactatggaggacgaacaaaggaagagagactagagatagaggagcagcgtcatcctcaaggcttctttcctccagagttttctgagccactacccattccccacaacacacccaaaagatctctggcggtagcgacaactcctccgccggacggcgatgtcacctggccatcttgcttctttgactgacctagccctagacctaaaccttgtccgatcgcagagccggagccaggagagaatgagctagaggcgatgttctgagcagagaatgctgaactacgttgatcaatcgacggacctgaccccttggagctagggggggaggaagaggaggacgcattggccagggtgggaacggccgaggatgaagaggatggggatggtttcttgggtgccgaatgagcgtgaggaagagacgaggctgacgtgctctgaccagatctaggaagagggcgcatctgtatctgctttgtatttcgcaatttgagaaaaggtaggatgaacaggatgaaaagccagtagaacgtatcgttcgatgtgcacatcagattgagttctcagagtacatccgaatcgaaaggcagagaagaaatcacttacagtaggggacgatgtaggagtcgggttggtgctagccataaacttgtatccttctccctcctcattgtcttcatctgcctctacctcttgagactctttcttatcgtcatcgtcatcatcatcaacttgttctctgaccgtgtcggattcttctggttctcggttagatctgttatcttccctctttgtcgcaacctcatccttcggtacatcccctacgtcgcccttctggaagtgatcaccaaccattccacttccggggatcgaaagtttccccttttttgcctcttgttccacatggctcactccttctcctccgccttgtccgtccttcggtccggcggtcggtacgtgcttcttggactcgttcgaatctttctggtcctcattttgagtgtgggtagcccagtagtcgtcgattcgcattccgttgtcgcctgacggagatcgaggagacaatccattatcttcatcttcctcgccaaacgagggctcctgtgccccggcttttccggtagcaggctgagtgttgatgcttggcggcttggcgcctctaggtccagcccctgccgaagagttggatgccttcgtcacaggagtcgttgatgggtgaacagctcctgtcggggacgtgactccacctggtgcggacgttggccacccaccggtggaagagatgggcgaaccaggaattccagaagaggatgttcccctagaagccggtcgatcatgtaacgatgttgcactcgagtttctaaccaccgatcggcctcgagtaggagccacgtctggagaggaaacaactttgtcgtctccaccggtcgacgccaaggatgaagaagtggcggcagaagaggtgttcgtggaagcaggggaaggagaggcgggagcagcggttgggacgttgcccggtccagagactgcttggaagacacctcctgctccaataccctcgtctcgagaaatctcaggtgtcgctgtgccggaagaagaggcggtcgaggtagaaggaggaaagtaagatcctgctttatcacctgaagacgacttgccgcttcctccgctggatccagctttgttccttaggatggatcggccagctgacacattgggcgagggcggtgttgtggatggggttgaagaatccttggacgaagtaccagaggtgtttgtggcggaagcaggtgaggaagtgtcccgaatgatcttcacttcagagtttcctaccttgtcttgaacggaaggaacagaggcatatgcaggaggcgtagtagatccgacagaagcccctctacgaactgttggggtcgaagttccagatgagttggcggatgacgtttgagaggtcgactttccttcataatggccgacactaccgactcgaccgccatggctgcttcgaccaggaccggacgaagagccgctgtgggggaagattgagaaaagagaagaaaaggattggagaatacaaacttagctctgccctatgaatgggaacggtagatggatacacatggagaggcaaagaaggaaacggaaggtactgacccttgttgaccccctcggaagtagtcgtactcatcgtcgtcttcatcccactgagcggcatcgatgggacttggaaaatcgccctcggccctggcctgggatgaggcgatactctcctttcgctggacgccggcatcctggttattggcagccgctgagccggcattcgggacgtagacaatggcgggtgcgggagcaggcaggacctcgttgtttttgagaagggcaggggcgatatgggcgatggtgaagtgctcagtggaggactgtctgctaccagaaggccggacggcgtaagaagacgagctcgatccggtgcttctcatttcgagatgttcatcctcgtctgacgaatcgatcccgccgtcttcgcttgaactgctatccggccggtcgggtgggattgatgtcggctcgctcaacgagatgcattgttcgacgaatgtgttgaacgagatatgtctctttgctccgtcccttccttctctgcctccgtggtcaccagtatcagatggggtggcccctccagggaagggggtcaaggccgagccagctcctccggccggattggtcgcggcggcataggagatattcatcgatggaagctggaacctcggaggagagtttcctcgtctgccggtgctgcgacggaggatatttgtgtcgctcctggtctgatgtaggccgggtcgggacctgccttcggtctctgagaattcatcttcttcgtcttctgggtagagagattcgaggatgggcgaggctgagccacccatctgagctcgctcgttgttaggcccggtgagaatctcagagatagttcgatgcttgagaatcggtttcgcacgctttccagacgatagatctaggtgatcttcggtagtcgagatccgaggaggaggtacggcttcaacattggtatggagagggccgtagagccatgtgacgtccgagtctttgagcctaaagagttgagaacgggacggttagccgagttgaaatgatgatgaacaggtgttttgcggtatgagaagaaaatgtatgagagagagacagcggaagagataaagagatgatgatgatgatgatgatgatgatgataggggaaaggaaagttgagatagtcaagagatcgcaggagagtaaaggggaaaaaaggttttcttctatcttttctttttcttcaagaatagagatgacccggtacgacgtccgttgaatcactgcagatcatgatggatgagacttggagtctgattgccgggtatattccaatgaggacacaaggagccagagaacagagatggagaaagagagaaggaaactcatcgaggctaaaagagaagggtatgcactcaccaattgagagtctccgggctgatcgtcttgagtttgttccgctgtttccaccaggtccgccaactggcgttctctagtctgactccgttggcgacctcgttctttgttctcgtcatcgtcctccacgaagaccagatgtcttcctcggtccaatcatgggacaaatagtccacacagatcgagggcaacctggtctggacgtctccgtcgtctgggttatgaacgacagaaccggtaccgttcataggcgaagcgatggccggtgcgggaaagtattgagccatagtttggttgagtagaaacggcggacgggagaaagggaaggaggtgtcaaagagtacgtgaaacgatgatcctcaagttgagaaggaaaagaatggagagaaggcaaggacgaaggaaaagaaaaatggggaaggaagtcgagtgacttgtagccgagatccacagtttacacggccggggtcaaaaaaacgacagatgctttgacggactgatacgaaggattcttaattagatgttttctctccaaatcaagaaagaacaagaacggcaactatcacgctgaataaatgatgggaagagtgtgtgagcgagtatgagagagagtgggagtgtgggtgtaaggatggcaagttgggttgggaaagagaagaagaggcagaggaagactaagagtgtgtgcaagaaggaaggagagggcagagggcagggggctgcttggttacaggcatgtttacgttcatgtgtaaccataagtgatgatgcgttgtaactgagcgtaagtaagtgcgtgctaccgggcagagacagagagaaacatccgatcgatagtgagacagagtgtgaccatcttggggcgaagggggtgtacgtaagcagagtgctgattcatgtgatcgtaaccaatatgattaaagtttcaggtacgcctcattagatagatgattgtgttcctttttctccgttcaaacagtccttagtggaaccctggagatcggagggaaacccatgccagtctctttagagaataccaccatctgagtacccctcaagatcactgctttcacatatccctgttgaaagcccggagcgatgagattcttgttcagatgggagtgaatacatgaacagagtcaaaccttctatacgcaccagactgatgaggttacacacgatgcactctgcgtcatcgatatccagcgagtcatcttccgtcccgaatcggagtgccgtcaggaagaacgaaagcggaagagccaccctgtcagactgaccacttgacggttgttggagacatgatcgatagatcagtagcctggtggtggatgaagagaacgaaatgtcagctcgtaattctaacctttggcctctgtccgaagggtagctaggcagatacacagaaaggggattactgacgttcgtcgaaggagacttctccatacaaggatcacgcctttctctctcaacacgcctaacacctttttccgtctgaaccattccattcggtcgacccgttcattgcccccagtctctccaagcccacgccgccagctcctaagatctccgtatcgaattccgcaaacaagcgggccaaactgatccgtcagctgaaagtgatcgagcaacttcccggtcggaagcgtgccgagaaggatcgacgttgttaaaagagacaccaggatcaaccgacggttatggaacatcgcaagcgtattcgagggacagctcagaaatgctctgtgtaaggaggtgtgagcctagaagacagtggtgaaccatgcaggatgagtaaaacagaagcttcctctttcgttcatcagacactacccgaagccaaagacacttgttcagacagacctgtggaattcttcggtcacccaaaagccaagtgccttgggcctgctcgaatctgaccttgaccgcacgttcgacccatccttccttttctagcagccctagggaaggccggacaacttgtaggatctgcgcaccaagcttatgagtgtccaatctcgcatacactctaaataagatttcggccagcggaaacagtgcttgttttttcgacgggaccgatggtgacggatcccttgatgagagcgagagcgcatctcggatgggttggaagtattgttggattgccagatggatcagatgtggagttgatagctttatggtgcatgtgagcaagaataccggatgggctgctttagatattgatccggaaactctctcaactagacaaataagacacttactctcgtcgaagacaggtatagtttgtacgtcaaccgagagaataagacggcatatcttccaccttccgatgattgaaatactgaatggagagctctaagaatcgcaaacggctaacgagatcagcatcttcctagactatgtttctcctcctcttaagccgctccttagcttatatacttatgaaagcttacccttacttccaagatctaaaacaaagttcccatagaccccactcttcctccatctttgatccttccgagtttgtcccttgaatttcgtccagataggcttcccagaaatcttggacgtccttcgatggtgtcaggtggggaggaagcgagccaaaaatccctcggacgatagtaaccgaaagtgctgatttctgtaccatgtaagcgcgacggatcccgatgagccatatactctactgcgttgtatacaccattaatgtggttcttacaagttgatctcggacggcttgaatgatgaccggattagtgcatacatttgccagttgtagcgtggattgggctgttggagggacaaccgcttgggattgaacgatcgttccaaagaacagtttggcagaagcctgagtcgaggtctgcatgctttttgtttttcgtattgtccaatctgcctataatgggtcttccctctttctttctttttcttacaactaaagcgtatgcgatggagaacgatgggaaaaggagaagagctggtttaagaagagcgttgatggagttttgtcggtcaatgcaagtacacgcaatgtaaccttttcaagtaaggattccgtcgaatgcgcgtgttagggttaccgaaatgtttcagacgcgttcaacccatctgagacgcgtcacgcgttgcgcgtcgcgtctgttctcgatcttcaaacatctcctttcctgtctatcccctttcatctctcctatcgaccatcattccacacgtcccaaatatcgttctctctatcttgccttttgtgttgattgcctagcaagatactcgattatgtcggatagcgaatctactcctccgcctgatgcgcctaggcgaagtggcagacaaaccagaaaatcttcccagacaggtaggtccctcttccttcattctccaagaagcacctcgtttcgacggatctggcaggttgtccccgtgtgtgtgtgctgagattgttagcatacaactctgtttctgtcgcgtgcgctgttaattttgcatataagaaccaccccttcctgctcctcgagctacagtaaagaggacaggtgtagccggatcaaagcccatcaagtcgaaaacgaagccgaagagaggtctgaacaaagggtcggaagacgagtcgatggattcggaacagtctttgtctggctctgaagaagaagatcttaaagaatcagatgaagaagactcatactcggatcctgtgagttgatatctgttgacaggaggttgaataaagattaactgactcaacctctccaacgattcgtgtcttgtctccacgtctacttttcctgtcacacctccctttgaccatcttgtctatagtcttcaggtgaggaattcggaaagtccgccaacgcaaaaaactcgaaatcttccagagctcgaaagtctcatgttaatgacgatccagacgcgactccaaaggctaaaggaaagacgggggctcaaaagagacgcgctaggggctcaagagctagtggcaaaggagccggtgggtccaccaagaagccaagagttagcaagagcggagctgggaatgatactgcaacgactggagggatcagaaaggtatcagcaaatacagaagtggagagggatagcgttttctttagtaagctttcttcgtcaatagtggcatcatgtcctggtttcggctgatccagtttaatgctgaaaatttcctatatcttatgtttgtagacgcgttgattgatggccgtgcatttgaacctgtgatcgagaactgggcggaaacctacgaagaggaacaggaccaggcgttaggcgacttagtcattttcctaattagagttagtctctttcttttatcaaatccggtttggcgagagaagaagtttgatctagaggtcgtacccttcgcataaaggctgctggatcatcgtcaactgtaacacctgatgaggccgtcgatctagatggagtcgttagcagagtagacgatttagagaaagatgtgagtactctagacgtaaatcttccttgcgctgatatctgctgagctcagtcgaacgattcccttttgtaactcatacagaaatcccttggatcgtaccctctggtctcaagggataggaccttcaagcgtttccgaccttcccttgcgtctttcatttcagcttttgtactcaatctatctcagacccccattttgtactcgtccaccacgcacaagtctgaaccatcaccgatgatcgaggtcctacaatcatggctcttcacgctctcacactcgccgcttcgaagctttcgacacactggtactgtcatcgcgcttgagaccatgtcagctctatgtatcgttgcctctgaagtgagagaggagctcagcgtggctagtagacagcgtgaacaggagaagcgtaaagctggaaaagcgaccggtccggcgggcaaggctgccaaggagcgtttagtcgagttggagcgaaaagtaaaggaggtccattggaagaaaggcaaggttgacggataccttaacgagctcttcaatacgtacgtcgatgctctagggcttgtcgcttgattaggacatcacactaattgtggaccatgaatgtctttcttcggcatacagcgtctttgtgatgcgatacagagacttggatccaaacatccgtaccgagtgtgtgaagcaactgggaacttggatgacgactcttccagatgtgtatcttgaatcggcttacttcaaatacattggatggatgttggacgacatcgtaagtctatctttgaccggcatgcatgtttccaggaacttatttacaactcaacaaacatgtctcattctctctttaccaatcgatgtacaaagaacgctacaacccgacttgagaccgttcgagctctctctgttctttactcggacgaatcacatgcggcaagcctcagcacattcaccgagagattcaaatcccgaattcttgaaatggcattccatgatgtagaactctccgtccgaacgacctcaatcgagatcttgaaccacatcgagcgatcaggtatgcttgaggacgagaaacgacggcaagtcggtttactcgtatttgatgccgaacctagagtccgaaaggctgttgctgggttcttcgaagctcgatggatggaggagcgagatgaaacgattgaggagattgaagctgggcgccgaagggagaagaacctgtctctcgatgaagaggatgataccgaagaatctcaaagggtgttccaaacaagggtcggttggaaatcgctcgcctcgatgtttgttagattttctcaggccttagaggatgcctcaatttcgcctgagcgagacccaccagatgattccgatgccgcggatggtgctaaactcgttcgagacctaggagtcggagatattagcggaaaaggacgggtcgcgctcgccgtagagagcttgtgggacaaggtaggaagcttgagagactgggaagggttgacagaattcttgtgtctggaccattcacagaaagacagtcagcaggaggctagtcttgacagtggtgtggcggaggaggggtggaagttggaagaagaagaggaaggatgtctcttggaaatcttggtcactgggttgaagaaaaccaggcaggaagccgttcgcttggtcagtgtttcccttatcgttctagacactggatcgagaaatgcaaccactaacctttatatcttgtttcaatggaacaccctcctcacaggccaatgaggaatccactgttctgactgatatgactcgactcttaatcaacttcctaccaaagttgattgccaagtatcagagtgacaaccagcacttagtgtttgttctagcgattcctcttgtaatgaacctcgatatgtatcttgatctccgaatcactaccgttagttttctttctgttgtgaatcgtttgctatctgtctattgactctctgtgcgttgacctcccctgtcaaggcttacgaggccctctggaccgatctcattcgactgatcctcaagaattcggatttggccgtcttggatgcatcaatctcggcccttcaagcgatgttagcaacagaacctctagctaataccaacagtttgaagatcgccgagctagaggaggctctttttgctgctcttcgagcgatcgtcgcaggacgagacgtatacaccgccgcgttcacagacgaggaagtgggaagcttagagagttgttgcttaagaatcaagctattgcttggacagagagacttgaccgaggcaatggatgaggatgaaggaggaaaccagagcaatggttgggccgttttactagccttggtttcgagaggaacgctaggttacaaagaagagcgcaaggtgggttttcgctcttcaagctaagagcaatatcagctttgatgctcacctccttggcttctatctatacagctggtcgtcaatgctcttgaagcgttggctcggaatatattctggcgaacctcgaaggcgttagagaatgaggcactgcaacccacacttctcgagaagcgctcagcgcttcttgagttggtggaggagtgtgctatcggtacacagtctaatgccgttcaactcgttcgggctgctgtaagtgtacaactgaatttctctcaatcaggaagcaaacaaatgtccgttatagatggagataagtatctgatcacaagagacgttcttttaaatacaggctttcgatctgttacttcggttccacatcttgtacaaccatcaacccaatttgactcccgcagaacggaaaggagttgtgtatacggtgcctaaaccactgcaattatctctctccagtgaagcccaagccaagtgtgctgactacgttcgattagagatcgagcggtatatcgaggaccgctccgagctcgtcgctactcagaaggacgctgatgagtctagcgatgatggagacagtgatctggacgaggatgaaactggtctttcagactctaagaagattgcacgaaaggccaagagggtcaagcgtagcagagatgatggttcgtactacgttttaagtggtgaaagaaaaggcgatcaagctcaaactgatctctgctttttacatgtcttttctttctctgtttgtcattctctctatactcaacagacatcacgctcactagcgaagcagttcttgtccaggagcatcagttcatctcccttatcgccgcgttcgtgacggcacttaaaacggatgttctcgacattcagcatgcttccatcgtctttagccattacggtcgctttggaactgaatatgatatcctttgccgctcgcttgtggatgatgttcgttccattgcttgctatggagaaggccagcaagacaaaattgaaaaacttgtcctccaatcgctagagaatgtgagtatctttttatttacgctgaatggatctcgaagaataataagttcatttttttcaatccgtctttcacagtgctttgagctcttcctcgacgatcagattgatgaggcaactttcgtctcgcttgctaagctcctcacgagcagccttgtcgtttatggaacccagttcaagatcttaaagcatgttgatcccaaaacgcttacaagtgttcacaccactctgctcgatactttcttccgacgcttgggccagtttcagaagaacggaaacaagtccaaggccagaaaagtctactcttatttccgggcgttgattcccctttctgtcggaatgcagggcagagatgcgttgaagatgttagtctcgtcatctgttccatggttctatttttctctgacctttgatggctgatcttctcctatggcctttttttctcattctagtaaaatgtacttgcatgagatacttaccaagcttgagattgaggtgacttccaataaggtctgggacagctacaggacttacgagaagaaggtcagtttttcgtgccttttccctatcatgtcaacagctatagctcatctccaatggcttttcgctttgttcgacacagttgacgacgacgatgtccaaagattccagaattgcctctggcgctcggcttcaagtggcccaagcgacatcggataatgaagatgctaccaaaaaacgtccggccgccccgtcgcgcgatgtcgcgaagcgtaagcgaacatcatctaggatgattgataactccgattctgagcccgacgaggctgatgttggtaaagaggatgatgagcggaccaaaaagaaggctagacctaagccaaaggttcgaacagccaaccgaagtgcctcttctgacgatgaagaaagggctggtgggaacgaggaggtgtttgatgaggaagagttggtgatggatgctccatcgccggcttcgtccgaactctctgatcaagattccgagccgtcggctggttctaaattggcctctgttccgatcgcatccgagaacacagatgtagacgaggagatgctggacatgacccaagatgtggaaggtacgcttttatctatttctatttcctgatgtctgatagatgagctaaagttgttatcatgctgtcttgggttgtggctgtagaggaggaaatcatcgtgaagcccggaaagaggaccagaacaaagagatagtttcagatatcctatcgttacgagttgttcgtatttgtgtctatttccccttcattatatatacctggcacgcttttcgtttcaatctacatttggtagttgctttcgtgctcggttactactcagaattgactctcgtatggctcgatcaatagcacgattgtttttgtgtttatatttatacttccctcttctcgttctttaaatcaactttcatgattctttacgcagtatcgttctcttgatctattaaccgaagtcgtctccatgttgttttgtatgactgtatgctggcgatatctgcaacacaagacacttgaaccagttgttcggtcggtctaacaggtctttttcattgttgccagcaatcaaacgaacggccacaccgcttgatcgttgtctctttgagatggctccttcggcttcccctctaaaccgaaaaacacatattccgtccccatgccctctctatcaaccaatctctccgcgccctgtctgattctcttaccagtttcgtctggtttccctcttaccagaccatctaccctaggtatcaaacccatctgttcaagaaagtcggcctgagatatgggacccagcggtcttatttgggagccgaacggagaggccagcagagcagtacggaggtgagaaaagttgacatttgtagtcagatcagatagaccaggagtaagaaatggggacaaagcggcatgtgctttgaaagcctgcgtttacaagatagggaagggaaggagaagaaatggaaaagttgaggttacaaaagagggtcagatagagtaagcaggatacatttaggggaaacagggggacagcataccctgaagctttcactataaaatccatcctttccatagtcgatcactagaccgcttcctccaccagcatttttg

SEQ ID NO: 1505 - DNA, 13425 bp, Xanthophyllomyces dendrorhous
tcataattccaaacccaaccgccccgacctcgattctctgcccgatctcgaccttctcgaactcggcgcttgttgtggggatatatgttgaatatggggtcggctcgacagagagggtgaagtggaaagcaggcgaaggcggagtgtaagttacgaggagttcatggaagtgaggttttgaaagatcagtattctctggagaaggcgaggtcgttacaggagaaggctctggctcaagaggaggaggaacgcgctcgaggagatgaatgggtagagcatcgaaaaactcgtgtgcgctgaagagggtatatgcatcggctttgaatggtagatgcataaggtagatgagagagaaatcagaacggtcagtgtataagattatcagcgcgaggccagttgacgattaaactggagtttcacaaaaggactcacacactggaacttcctcgatccgatcaaaccacctgatctgaacatggctgccatccttcctctttagatatggttccaaagctttcttctgggcctctctcatgacaggagatgattcgactagatcgactgtttgaatcgtttcggccatgaatgaaaattgcttgaacgtctattccgagagaatgagatgagacgaggacaacgcctgaacgaggaggcacgatgcaggacaaggatacactcactcgaaggatatcggccatcaatgttcctctccctggtcctaattccaatagtctaacacttgaaggcgatccattggcttgccatcgagtgatcagccagatggcaattaactgtatgtattgggatgcaatcaggtacatcggtcaacgccgctgatgctgcttaaatgagctcaacacacaagtcaagagggatcaagtgttacctctccaaaaacttgcgagatttctgggctagtgatgaaatctcctttctctccaaggacgtcttccttggtggtatagtatccatgttctggatgtccgaggcagagtgtcatgtatcttgctagaggcattggaccagccgcctatcggatagaaacaaagtacaacagcagatttaagcttacggagagagatgaagctctagattaaaggaagcttacatcgatcgtcttgcgaaggatagatcccaaaggggtatcatcttcgggtataggcgtcggaggaggtttctgaaacgaccgagtagtatctacatcgagcgccgatgcggctgattttgagaacgagttgaaagaggagacatccgaagacgaaggaagcgaagagtacgatctgacaagattgcaaagtactctgctcggcctggatgatttctgtgaccggaggatagtgaacatcgtatgcgagtacgtgtatgtatgtacgtgtgtccaacgatcaagagatggaaactcgaagaggataggcgatcgcttacgtaagtcagttccacttgatttccatacttcgtcctcatctattcgctcactcgacgcactctgtacaaccacttcgttgatcgtcttactccatctgccgttctttccaacaatggtgagctcaggaatgagatcagggatatgaacgaatgtgcttctggtcaacagctgacttgtttgcctactctcttttgctcttctcattagtccacagcctgtcgtcgacgacttattcgagatttcaagcggctctcgtcagatccaccgtttggagtctctggtgccccctgtgcagataacttgatgttgtggaacgctgtaatctttggtccaggtacgtttcgtctaattatggagaacatgacttcaatttagccatagtctggctctggttattttgatgattgaagaccgtccacgagagagaacgaacattcctgtcccttgcacccatcgaggcacgagaacactgacatgtagtttccataccgaacacacagccgaaactccttttgaagatgggacgttccggttgattctatcgttcgaagaaagttaccctaacaaaccgccgacggtcaagttcttgtccaagatgttccatcccaacgtgtatgccaacggagagctttgcttggatattcttcagaatagatggtcgccaacatatgatgtggctgctatcttgactagtatccagagtcttttcaacgaccctaacccaaacaggtaagtcacagcatgatacgaaccaaccttcttgcgtacagaaatccatcgacaactgcttacttggacgcgtcacactatcatcgtatgttccccaatcagtcccgccaacgctgaagctgctcagctctatcgagacagtatgaaggagtatgtccggcgagtcaagcagacagttgaggcatcttggatggaagggtctgacttgaccggtgatgatgacgaggatgaagacgaggacgacgacgaagagggagaggcagaggaggagaatggagaaataggcgaggcagcaatgagtggagtagaaggcactcgttagtctccaggcaagtccaatatctattccttcagacatctgcttccatggtctcacgattatgtctgtccgtctcactaacgtctattttgatttcaggatgcagaacgattttttttaaaacttccctctcgtttgctctctgttcattcaactgaggtttcttcttctcttcttctctgccctgacgttcatttccgtctcacgaccatattcgcatacatcggactcggttgtcgtcgagttcgcttgtcgcattgttcaaaccatcacatcacgccctcatcatcgagtctttctctacttaattcattacttgatcgctaccatgttccttactctacctaagcttttcgttgtttctcgcgcccttctttctctcgtcctattcagcgtacgagcttatttgttgtaactctgtccgactttccttcattatgtctctttttcttcttcgctgcgatatgtgtgcatatatgtgtcgtgcagtgagatcttaggcttcgtgcgttgtagccaacgcatgtttacataatcggagcgaactttctttgtctcgtcaccttctttgtctttcaacagtttatcatcgtcctcctatatcatctcgattaccttcgaagttcttcacgcaacgttcagctgctatcatgcagggcacgcccactccgagcacacggcctaagaagcgatcccttctctcccaggcggtcggttctccaagcacatcctcttccacccctgtctcgacaggaacatctccttttatccgatctcaccaccttccagataccgagtctcccttacgagcatactcttcttcgtcttctttgtcatctaactcaacatcgaattcgaatcaggctcacatcccggcagtccatgcctcgtcaccgaggtgctcctcagcctcagcagtccaaacacctaccagacggccgatctttcaacctcctacccctgccagtctcaccagaggaggctcgaccgttccttttgactttgaaggaagcaggagagctgcaaagaaggcgctggctaaagaaagcccggcagcaaggggatcgagagattcggtcggtggaactccgagtggacaaaaaccaaaaagatttgtgagaaagagacctttgatggacaggtgcgtgaaactctccttggccttgtacttgaaaccgatggttattctttcctaccttgctgattttgaaaatttctcgtggaccaaccatcggcgctccgtcagaattcaagacttgcctcatgacgccctcaatcggatccaagcttcctttccagactttataaggattgcccgaccactaggcctcattctaacattcttccagttcttgctaagggcgcctctgttctcaagttctcaatacaggaaaccaaacattcttagaaacagatcgataggggatagaccactgggaggaaggtacgatgctgatttggagcctgccactggtagatcatggggctggggtcattgggtatgttgcctttctcaacactcttcgaggtttcgatctatatgttgatagtgctttcgtagtccacttggctatcaattttgttcttcattgtgggagctctaaatgccatgtatctattcacccgaacaagatcatatcgaatgcatctccgtacggtaagcatcagacaccattctacattctctgagacttctgccgtacctatgccgaccaccgcacgcatctttctcaatgctgcacgcgcatcttcttaccaggacccgatctcgagtccgaatgctaaggctgtggaggaagatgaggtcatggaggattccgaaggaatcagccatcttaaatccgctcaattcacagatccggctttgtatcgagccggacttatttggatcctgtcagtttcctcgtttcttgtgtgggcactatctggcaaacttgggcactgaagtttgtttggctgattcatccgaaaacacatgttgacgtgtgtcctttaggaaacggctgaacccgattcctctacttcgattcttgatttctctaccagcggcttcggatacggataaacatcagtcgcaaaggaggcgaaggatggtccaacagttggatatctggtcgcctccggatttcaatctccagttcttttcgttcgtcgttctatctctctcagtgtctacaacctcgatctatcagtttatcttttcttcttcatgggcatgtatatctataggacatacactccaccggcctctttactgcttcacctggtgaccccctacgcgcctttctctgctcttcttgccgcattcacagtcaattttacagtctatctactggtggccaagtatacggagatggttaaggacagagaagtcattcatagtgaggtgatgcgcgagtacgatcagcgtgtgagttcctttcttctcccacttcttgtttggttcgagccgaacacggttcttatcaaagggatttttcttggacatatgggtggtagttcgtatacccttcgcttttcaaacaaagaaaagaaatcggcgtgatgacacatcaggcagagattgtttggtagttgcaagccagcgagttttctctatcttgaccacatcttgaaaatcgcctttttgctatatagatattttagctcaaggcatagtgcgcatcttcgcttcttacaaactttgcctaattgacatgtataacaagggtcgagctatggacagtgagatagatgaagagtgtggcataagcaaaaaagaaaaagaagaaaagaaaaaacggaaaatatatgtaaatgagagattctatgaatccccgcgtctgtctttttcattcctacaacctacgccatcacctctccctcctttagcaagcacgtttccttttttcctaattttcctatcggacgatcaaggacggtctcggcacataaaatatgatacctacgttctccaggttgaaacctttaccgttccttcctcgaacgatcaagcaactcctccagacgagcttccccccggctgttcagccgacgcggccgacaggcgatcaaccttcttccgttctttcgacttcaccgtcgccgatactagcatcagcatcaacgccgctgtcagcccagagcgacacaacgacagtacatggatgggtgtctaacattcaagtcaagaaacatgtggcgtttttgaaaattagagacggaacttcggatgaggctctacaagtcgtcgtgtcggggaagaaggatgatctgtcgtctggtggggaccttcgaaggttcattctcgttcgcctctatctatctatctattcattcgtacttcgatggctattttgtatattatttggggctcagaactgatcgcttaatcattatatctgacaggacggtcgaatcattaacaagaggatcgtctgtcaagatacaaggggagctgatcccttctcccggagctggacaacctgtagagctccaggccaagatcttgacggtgttgggcgaatgtgatagccaggtaaactcaaatctcggtttgaactctgaacgactggccatctttgatctgagctgataggagggcgatcttctgctttcaatttcttgttgtgtgtgtgtttaaacatgcttaatccaagacatatttaattgagccatcggtagtaccgagttctaccaaagaccgatcaagaccggtcaagacaactaaccgaccgacggttcatcttcgggagctcgctcatctgaggatgagggaaagggaaaacgcagctgtcgtcagagtgagagatcgggtagcgagggagtggagatcgttccttgaggtgggtgagtctctctgacaaattcctctccgctcttaattgctgaagaagggacggagtgaaaagagggactaatgtcctatgatgttctcttttgggcgcgagggtttgtgaaggaaaatgactttgtgcatatacatacaccattaatcactagtattgattgtgaaggaggcggcgagatcttccgggtaaccgcgccttctttgaacgagaccgtcagaacggataagccgccggaggcgttctttccggaaccaccgggtgcgagcctgacggtctctgctcaacttcacctcgagacgtacttgccggtctgtccaagggcgtacacactctcgacatccttccgggccgagccttcacgatcgagtaggcatctggcagagtttacaatgctcgaggtcgagctcgcttttgtcaatcgggtggacgagttaatggatttcaccgagcaaggcgtcaagagcgtgcttcgaggtctctcgagaggactcagtttaggcgacggacaaacggaggaaatggcgaagaagatagaaaaggaagaagacccggacgctggtgccgggataggggtattctgggcaaagccgggaacgacagagaagattcgatcggcaatagagaaaccgttcgggagactgtcatacacggaggcgattgagctgctgaaacgcgctcacgcggagattccgtttgagcttgagcctgtggacggacagacccttcaaacagagcacgagcagtggctggcctcgagagaaggtgggccagtattcgtatacgattacccggccagtttcaaggcattctacatgttaccgaacgaagacaacaaagcgggcacggtggcctgtttcgatctgttggtaccaggggtgggcgagttggcgggcggaagtctgcgtgagcatcgactggatccattgttggatgtgatgcggtgtgtacttttctttcatacgatagttttcttctctcgagtctttagttcctactgtatctgacgacatgtgtcaacgtgcttgttcttgcagacaaagaaacatgtcgaccgaaccgttagaatggtacctcgatcaacggcgttacggctctgtcccccacggtggatttggtcttgggttcgatagaatggtctcctgggtcacaggagtgagtaacctgaaggatattgttggatttcctcggttcaagggaggatgtgtctgttgaggaacgaatgaaatgggtagaccgggtagaccgaatagactgaatggacagaactaaagcgtgtttgaaaacgtgaatatcaacatgagtatgatgcgcagataatcggtatcggggcgaaagcaagataacgagtgggcggataagtagacgatcagaatgaacaacacagctgattagaataaacactagaaatttcattacactaaattccccgcgcaaggccgatggatgaatgatggctatctgctcccttcaccttctcggtgcgataatcctcggtgcgatcgacatttttttctccctcttaaacaggccagcctgggatagaacgtcttctttccttttccctcttctctcttaccatcgattacctcttctcctctccctctctctcctccttcgatgctctcctcatccaggctctcggccgtcgttcggcggtcagccaaacagcaaagtcatcctctcgccctggttagcaagtctcttcaggcacgctcactttccatcaagagcacctctcctgttctttcttccaagagaacggtctcccagacgagtccggctcttccttatgccactcctgtggactcgtgagtgggcaaggtgctctcgatcttatccattgtgcaaccctaacaattcggcctatctttttccaaaaacacgtctttctccatccccctcatacagtatctttgctccgcttgaccttcaccccgagaggcacatcggtcccgatgcacacgagactgagcaaatgctcgctcggttgggctacgattcgatggacgctttcatcgccgcttccgttcccgaatccattcgaatcaacccgtctatcgtgtcggacgagaccatccagccttactcggattccgagttttctaagcgggcgagagaagtcgctggaatgaataaggtcttcaagagttacatcggaatgggttaccatgaagccgtcgttcctggagtgattctcagaaacgtaaatcaaacttcaccgctctctctctatatgcgcataaagcctaccgatcttggttaagagctgatcacctgcccgctttaccatttgctctcatcatttaaacatccgaaggttaccgaaaaccctgcgtggtacacttcctacacaccttaccagccagagatcgcccagggtcgattggagtccttggtcaactatcagaccatggttacctctcttaccggccttgagtttgccaatgccagtttacttgatgaaggaacggccgcggccgaaggtttgtctcccatccacctttgccctgttcaattcaactcagataacgcagtgactgactgaccgaatgattgtctgcctcaatcaatcaagccatgattatgtcaatgaacgctgccaagggaaaaaagacctatatcgtcggctctggtgtggtgtgtacccacgattatgagtgaatcgcagcttttgaacgcccttcagctgaccagtcttatctattcgataccttcttagctccctcaaacattatctgtcatccgaactcgagccaagggttttggtgtcaagattattgttggttcgcccgatgagcttctcgagaagcccgagatcgccaaggacctctgcggtatccttgtccagtatccagacgtcaacggagaaatccgaaactgggaaagcaccgctaagaaagtccacgagctgggcggaaaggtctcggtcgctaccgatctgttggcgttgactttgctcaaggtttgtctgcttttttcactctgctctcagataaaacttaacttcttgctgatactcatgcggctgctcatgtacctgattctatagcctccgggcgaatggggagccgacatggtccttggaaactcggctcgattcggagttccggccggatacggtggacctcatgccgcgtttttctcttgcaaggatgctttgaagagaaagatgcctggacgaattattggtcttagcaagggttccaacggagagagagcctatcgactggctttgcagactcgagagcaacacatccgacgagagaaggctaccagtaatatctgtaccgctcaggctttgctcgccaacatggcggctatgtacgccgtttatcacggaccggaaggactcaagcgaattgccaccaaagttcacgggctgactcatattttgagagagattctggtctccttcccctcatcgccttatcagatcgttaacaaacacttctttgataccctcaccatctcggtctcttccgacctgggcgctgaggccctgcatgccattgctgccgactcgtcgatcaaccttagaaggatcgacgagcagacggttggtgtgacccttgacgagagtgttggattggttgacctcatgaagttggtcaacgtgttcgcaaaggctgccggtacagagcagtttaaggctcaacagctcatcaacaaggcaaacgaagtcggagcaaccggaattgctggcgaggttttcatggacgagcagttcagacggtcgagcccatttttgaccaaccccgttttcaatactcaccactcggagacggagatgctccgatacctctacttcttacaaggaaaggatctatccctggtccactcgatgatccctcttggaagttgtaccatgaagctgaacagtaatgcatccatggttcccttgacgcttcccggctttggaggtatccatcctttcgcccctgcagaccagaccaagggttaccaggagcttatcaaggaactcgagcatgaccttgccatcgtcactggttatcatgctgtttcccttcagcccaactcaggagctcagggagagtttgccggacttttggtcatcaaggcctactttgattctatcggacagagccagagagatatctgcctggttcccgtcagtgcgcacggtactaacccagcttctgccgttatggctggaatgaaggtcgtttctgtcaaagttttggccaacggtgagcttgatatggccgacctccgagccaaggttgaacagcacaaggataggttggctgcattcatggtcacctacccgtctacttttggtgtgtttgagcaaggtgttcaggaggcctgtcagattgtgcacgacaacggtggacaagtttacttggatggtgccaacttgaacgctcagatgggtctcacaaaccctgtcgcttgtggaagtgatgtatctcatcttaaccttcacaagacctttggaattccccacggaggaggaggaccaggagtcggacctatcggtgtgcgagagcacttggctccgttcttacccggccacgccatcgtcaagaccggtggatcccaggccattgattccgtctcttccgctccctggggaagtgcgtccatccttcctatctcctgggcatttattaagatgcttggaggaactggattgaccaactcggccaagacatctattttgtctgccaactacatcgccaagcgattggaaggcgcttacaaactgagattcagcaatgagaatgggctggttgctcacgagcttttgttggacctggccgagtttgagccaacgacaggcttgaaggtcatggactttgctaagcgtcttcaagactttggaattcacccgcctacctgctcctggccgatctctactggaatgctcatcgaaccaaccgagtcagagagcctcaccgagattgaccgattctgtgatgcgatgctccagattcgaaaagaagttcaggcgattgctgacggaaagcagccaaagggaaacaacgtgatctctcacgcgcctcacaccgtcgccgtgctgacgttgcccgacgacaagtggaatcgaccttacacccgagaggaagccgtttacccgcttccttcgctgaggaccaacaagttctggcccacggttggccgaatcgatgacgcctttggggacatgaacctggtctgcaattgtcctacagttgaagaattggcgatcgatatcgatgcctagatttagcccagctcggtttcctcatcccatactttcttctaccttggtcactcttagcttgtgattcctttttttcttcttcctcttcctttttatgctttcgtcggtattgtttcttctttcggtttcttaggttcggatatagactagatttcggttcagggtcctcattctttacatttatcatctttctcctctgcattcaactcttactcgtttcaacaatcgagatctgttggctcgctttaatttttttatcttctcggcttatctctatttgcatttcgcgtcgttctcctttttcactcttgtatatgcattctgttcatccagacaaaccgaacgccgatctcatacgcgcgatgccttgttcgtctccaggcacgtcttccagaaccgatcctcccaccaatcaccctcgaccttcttcgggcgcactctaccgctccgtttacctttcctcacatgagttgtagaggtgttgtcatcctcactctcgaccgatgacgacgaggacgagtctagatcgtctaaagagagataccaaagttcagaaatgtcatgtgcgcgcaagtagtcgtgtaacttgtgatagttcaggccgacggcctgaggtccatgggagtcatctgagagacacagtcgacctttagcagagacaaccaacttttaaagaagtcggacaggtatagatgttagttttgtactcgaaagatggagaaggagaagagaaggggggattgaaagatgtacctcaagaatctcccaactcgggtatgcctcattccatcctttcctgaatgcggcagcgttcaactcaaacaacgcgccataatcgacagcctccttgacgtttcttttgactttcgaccagatggatccctttccaagcgtacgaaggctccatgaaggattccatagtttgataaggtcgaaatggccgataacctctggtcggattgttcgcatgagctcaaactgcccgtccagataggcttcgatcaagtcgacgattcgctcatcttctgtgacagtatcaggatcggacccagatggaacacatgagcgaacggcatgtaggaaagtgggctcatcaaagtcgatagggatctgatgaacgtggtgtagactgccaacgacatagtcgattcgagacgcttgtgcctcgagtagagcggataggccagtcaggtctaacggagtgatcaaatcggtttcaattcctatgagaagagtgatttctgaagagtagattgctcgaagtcggtgcgcttcgtcaagaaacgaaagatagatttcgtgcaaggctgtcggactcaagtcggactggacgagttgaagaatagcagaaagccggggtcagtagcgcgagacgatacgttgtatgcagagaaattaacagagctctgacttcttcaggatagagatcctgctgacgatatctatggagagagcagagaaagcacagatagattctgacatcagtctttcatttcagaagaagagaagaaagaaacatctggacgaacctgggtgcatgctccgataggccgaaagtggtgaacccctgcttgatggcctcttgaacaacttgttcgagtgtacctttggcgtgtctacaaaactgacctgagtctaaatttcaagaaatgagacctgaccgaacaacacgaacgtggacaaggggagaagactgactaacgagaatgatgagattgaggcattgctgaactagctgactgaccggctggctgatggtagtcggcagttgatggacgagatcaaatccggctcactttctcccatctccatcatcgtcatcagctatcgatatcatcttatccacagcgacatacgcaacggaaccagcagacacacatatacacatatatac

SEQ ID NO: 1506 - DNA, 9846 bp, Xanthophyllomyces dendrorhous
catatacacatatatacagactactctgatggataccctcaaggctatccagacctatctggatcggatgctcacagaggtctctgggatgaaggttcttctgcttgatgcccatacggtcagctgcgaaccctcttgatctcttctctatattgccgtcgacgaacagttgattcaagatgtctccctttctggacctacatagactcctatcctctcactggtggccactcagtcgtctctattatctcatgaggtttatctcacagaccggattgacaagtacgcattcaagtctgtctatccggagtgttgtcggagtctaaccgcggtttctatccctttatcccggatccaaatcaattgtttaacagcccaaaacgagacaggatgcctcatctgaagtgtatcatgttcatctcccctgatccagaaaccttagaatgggccaaggaggaactggctcagccgaggtatggtaactactggctatgtgagtgcttccgttgcattcattcatgattcactgaggatatacaacatggtcgcgaccgctgacgctctcagatatatgttgtgcttgatgggtgggtagacttttcgaatgtgctgacaaagtcatcgattgaactgctggctcaagccgatgagttcgaagtcgtcaaggaagtccaggtgcgtgtagccatgttgggttctccccttccatgctctctatttgattgcctcgtggttaatcgcttctctgcaactccctccttcaggaatattttgccgactatctctccatccttccgaacctattcaccttgtctgcacctccattatcttcctcaccacatgtgtgtcctacctccactcatctcatcttatgtttgaccctatggcttaatcatctcttacctttcactgtctactagtcttccctaccgcctgttccgctttactcgtccactcctcacatcttcaatcctccaatgctggacattcatctacaaggcctgctatctcttcttctatcgctgaaaaagaaaccggtaattcggtgggagcgcatgagcggtgtcgcgaaaaagctagcggaggaagttggctcggccatcacagaccagtcaggaggggtgtatggagatttgtttggattcaaaggaacgagcgggccagcgcctgtactgataatgttaggtaagtacttgtgaaatttcttcctcttttccgtatgccgagtctcagcgatgttctaagcgcatgttgttttcatcccgtgtggtcgtctggcgaacgaacgtctgtacagatcggagaaacgatcctgtcacgccgctcctatcccaatggacatatcaagctatggttcatgagcttgtaggaattgttaacggtcgagtccgtttagaggatgaaactagaccggaacttaaggttcgagaattctcctcatatttgaacttctatctcttgttctgcccctatttaaacaactttcccctacgtattttatgcaggaagtcatcctctccccctctcaagatcccttcttttcgacccacctgttttccaactttggtgatctgggtgcttcccttgcgacttacgtttctgagtttcagaaacggtcgaccgtggcatccaatccaggctctatcgagaccgtggctgatatgaaacgttttgtggaggagtatccagagttccgaaagttaggaggaaatgtcagcaagcatgttgcactcgtgggcgagcttagtcggattgtagaaagggatgggctacttggaatcagtgagctggaacagagcttagcgagtaatgagagtcatacggcggatctcaaggttggttttcttgttgccctgtatgagtagtgtcttgtttttgactctagtgcttctgcctatcaattgttatgttatccctcagaatgttcttaacctgctctcgactccatctatcccttcgggaaacaaactgcggctcgctattctttacgcgctcagatatcaacggttctcggccaacgcaattcctcatgtggtcgatacgttgattaataatggattgaacccggacagagctcgtgtatgttatctctcttctcccttttatgtgttgtatctcagctcatatttctctgttcacctgatcccttcgctctctctacagttagtgtatgctatgctcaactttgcgggagcagaccaacggcaggacgatctgttcatgaacgagaaccttttctctagaggaaaaagtctcgttaaagggttgcaggttcgtttggtttatatatacattttcttcttcgttcttcactttcgatgatctcatatttacatcgagttttctctttgattctcatcgacagggcgtggagaatgtgtacacccagcacaaaccacatctccttcaaacagtagatttgctcttgaaaggccgactcaaggaaacaagctatccatacttagaagtggaagaaagtggaatctctgcgagtgttgctcgaactcaacggtccgttgtttccttgacacttggtttaatttcttttattcgcgagtagagatgaacgaagcaatcctgacgctcctggatggtcattttggtgaagagtagacctcaggatattatcctcttcatggtaggcggaacgacatacgaggaagcccgggctgtggcgttactgaaccagcaacttcaagctagtgcaaacgctacctctggtaacccaagctcagctcctcggatcttgctcggtggaacatgtgttcacaattcgaagaggtcagtctcaattttcttctttcatttggctctttcacttcttttccgatgtttcactgactagaaatatttctttgtgttgatctacgacaatagtttccttgatatggtcgaagaatcagctactcgatttcctccttcgttttattctcccccttccacaatgacttctgttcctacgcctctcggtcttgggcttcctcaattatctcatcttcttccatcttcttccaatggatcatctccttccttgcctcaaaactccactggcaacaacctgaacacatcctctctcaaccctacattaccgacaacaacaacaacgacgaacgcctcaactccgacagtaacgagttcagctccatctacgaacacatcctcaacattcctagcaggcgcaccggcgatcaacctccgtctaggaaaatacgaagtcggtacagccggcgtgtaccgaacttctggtggttcatcgtcgtcttctggcggtctacagattgatggaaacagggtcaaagaagggttgaccaatggtctagccggagccagagatctgggagggagtatcttgggaagagtcaggcaggaggttgaagccagacgaggaggcgcgacgtaaattgatatgggttaatgtcacttcgcacaagtatctccctcaacgcttgatcttcagatcgagaagtaagcgaatttttactaagagtaagagaaatgtaaagagaatgcatcatcacatatcgtaagagccataagatgagagtgtcaacatgcgaaaaagaggaacgggaagattgtaggaggaaagagtttaacggatgaggaaactcatgcaaaattgcggagaaagatcattataaacatcgtaaaaatcaagagaatttgaaaaattgagaggccaagaaaaagcttacatcaatgtttatgaaggagaaaaagtgcaacttagctggcaaagatgtaaagtacacatccgcagaaagaggatgtaaaaaaaacatgtcggaaacctgaagacagagcgaaagaggattttgaagttgaacgggtgcgctaaccctgtgatgacagacaatccaaggctgcgtcgttatcaagcaaaactgcgggctgatcctaggactgagattggtgttggcggtaccacttcgatagatacaggggttggtctcaaagtagggatgctctcatttgattcccgaaccgaacctgtaggtagagtcttggtcggcgatattaaagatgtcgatgatgtaggtaagactggtgctggtgcaggcgaggaagagagttccaaagatgggagtggcgaaaaggagagtttcactccgaggaaatcctcagggaacggatccagccgttctgctgatgtcgttgtcgtcgtcaaggatgaaggttcttcggatgtttttggcgctaatatggagttgctagaggttgtatattcttctgatgagtcagcattaagacgtgaagacggaatagtcaactcagccgggatctgtgacgatggcggcggcgacgtttccagcgagacagaaggaggaggaagatcaggcgatagggacggcgacgctgatgaggctgaagacggaactgggggagcatcgagaccgtcgattccagaggtggagggtccttcagatgtaatgtcgaacgctggaggtggaacatcgggctctatcgatcgtcgacggtcaaaagaggctctcgaggctgattcgccaaatggtatagctagtaaatagtagaacaaaaaaaaagcgaatggtgagaaggtcagatcgaaagaaaagaaaaaacaaaagaaggaaatctggaagcctaccatatttgttgagattctcggtagaactatcattgcggatttcagacggaaagactttgctcagcgcgtgtctctttgttgcgatgaaggaaaaaaacgagtactgcccgcctaacttacctgatgaatttcatctctatttcaaggaggaacatcgcatagcaacaaaatagtttagacgtgtttgagaggattatacgaaagccacgaaacccccaatgaagggatacggaagagatggaactcacgatcttgcgttaatcccgacctcggaacctcgtacactgatcctctcaccacactttctggtaacggcgccgaaatacttaaagtacttgggctcgtcagcctggtcctcatatcgatagatgacctgctcgtcgtcgggtgcaagaggagtgagatattcgatgatctgaatggattcgctgatcctcctccggtatctatagaagaagccgagtttctacttcgatgttgctggtaaggttgtctattttgttgatgatccggccgagtttcaactcgtgccccactcgggcctgaactcgcgcgcgcatcatctactgagagcgtctgatgatcgctcgcttgtcttgctgttcttccgacgccggctctcgagaaaaatgctctgtacccagactgtcgtctcggttgatctgagtcggccgtatttgccgctgtagttgcgttcagaagttcaactgtacctgagtgagcgggagcagaagaatcatctgactggagagctgtaggaggtacgccttgttcggtatagagtggtgcctcgccccaaccgtttgttaggatcaaccgttgagtactcgtcgagcctcctatttgaccttctgaatgactctcatcgctcgctatcgtaatatccgtcaatacggtagagacagagtggcctctgttcctacctactactagatctccagctagatgctcggccggaagagctatgtgattcgaaagaggagattcatcagaatttgacggaagcgagtcgacagaagctcgacggtatgtgtcggtggtagtgatatcttcttcgtctgctgcttctcctctaaagtaagattgaaaaggataaacaagatacatcaggtcaaaacgttacaacactgtgtgcgcttgatgcatggaagacgattagacctacttcatcaaagccctggttaacccattcaaggttgagaaaacaacacacatgatcagcctcagatatatcacctcactcaaattcagtcagaagggaacaggatcggtgagaagaagaaacgtacatctcgctttcatctaaatcttctctatatcgcggcaaagtccttacactccttaacgaaccgtgcgtcctccttctttctctctccgccgctaaatttctcctcgcatccctcaagtttatctccgcctgtgtcaatactgtaggtcctgatgattcggcagttccgcttactgcttgtctagatctagtcgtgacactcataggtgttgatgattcgtcggttcctacaggggcggatgcacgtccagagaacagttggcgaacgaacgcattccatttcggacggcgctggacttgaacgactttagttgttccagaagatcaagaatagaagaaattccagccaggcagatgatcagctcacgaaaagctttaaaatctcacaataagaaaatcgtgagcaaggagaaagacgaaaggaggccaaaccaagaatgatgacgacaaagagcgagacgacgaccacaggaataactatgctgattatgctgaccgtgcccgagttggagtcatctctacgctgaatgtgatgtgctgccgttcctatctcgagatcttttgggcacgacgagtccaacgatgatcttgacgaagaacgagacatttcgccccatagcacaggtctagcagccgacgttctcatccctagagaccctacaaacccccagacggaccgacggacaacttggcttatcatttcaatcgactctgacgacgattcggactctgacaggttataacttccttgttcctgctcaacgtgttcgcgttcgtgcagttctttcttaaatttgtgttctttgacgatcgcattggagatggtgaccactcgggacgagattgctaaagggaatgctcattaggtaatcactgcgcatgacaacacacgtgaattgattgtcgtagaacagcctctttgtgttccttctcgcttagatgtgtccgacaaggaagaaacataaagatcaatgaagagaggaaagaggccaacccctaggccccaaaatgggatgaagatagaacccgaccatgaagaatgagagcgattacaaaaaaaagaatgcaaggagggtgggagggccgacgtctaatgaattggaaccccagagcccattctaaagcgacccactaaggaaaagaaggaaacgaaatacgatcgaatagagtcggcccaaggaaaccaagcctgggttttaccttgtgccagagagccagaaagagaaggaacagagaagtagatgaaagattacaaaaagagacgataaagaaagcttaagagcagagatatatatagagaaccttgaatgaggacatcggacagcctactgaggccatccggatccaatctggtggacactgaaaccgatctttcgaagggcaggagcatccaagatgagtcgtccgtcgaagacgaaagcaggcttgctcatcttctcgtagaccgaactccagtcaagagtcttgaactcgtcccactcggtggcgatgacaatagcggcagctccttcacaggcatcaagtgccgacttggagatggtaaccttcttcttgtacttggtaaggtcgtttcctccctcctcgagatcctgccaaatctgggcctcaccaacctgaggatcgtacaccgaaacgttggcggactcgtccacaaagttgtggatgagcttgatggaggcagactctcgggtgtctccagtgtccttcttgaaggcgaatccaagaacggcaatctttttgttggtgacggtagagaacaaggtcttgacgatgtttccagagaacctgttcttctggtactcgttcatgtcaaccacagccttccagtaagcggcaacctcaggaaggtgcaagctctcagaaaggtaaaccaagttaaggatactagtgacagattcaagaacaaggtcagtctcttcgcaaccaagctcatacaagggagacatatcaaaggaaatgaacttactctttctggaagcacgatcctccgaaaccgacggaagccttaaggaacttggctccgattcgggtgtcctttccgacggcgaaggcaacctcgtcaatgttggctccagtggcctcacagatggcggaaagggcgttgacggaggaaattcgctgagcaagcatggcgttggcagcaagcttggaaagctcggaagaccagagaccaacagtcaaaattcgctccttgctgtaagaggcaccggtgcaacgacagatcgttagaaaggaagcgttggctgcaagaaaaagctctgaaaactcacggaacccagttggcgtaaacatcggcaagagcctcgcaagctcggagaccactctcggtctggagggatccgatgagaactctgtcaggagcaaagagatcggcgatggcggttccctcggcaaggaactcggggttggaaagaatgtcaaagttcactccaggcttagcgttggcgtcgaggatggctcgcatcgactcagcggttcggcaagggacagtggacttctcaacaacgatcttgttggaggtggcaattcgagcaatctgtcgggtggcaagctcaatgtagctgagaagcgagatggaaaggcggtgataagtatgcgatgggaaggtgagaatccggaaataatatgtactcacttgagatcggcagcgaatcccttaccaactccgctcttcttggtgggagtctacatagtccaatataaagttaggaccaaaagtcaagataaggattggcgtggagagtactaacgttaacagactatgaaatcacaaagaaggaagcgaaaatctgattagtccacgttacaaacgacaaataataaacggctgtatacataccacaaagatcaagtcagcctcggcgatagccttgtcgacatcggtggagaagaacaagtttcggcctcggcatcccttgataacatcaacaagcccaggctcgtagataggaagatcgaacgactccgagttccaggcgtccactcgggcctggttgagatcaacgatggtaacctgactgcatttatggaagagaaagagaaagagcgggagcgaaagggattgtaaagtaaaatcaaagagaaacaaggagaacaggcgagaaagttgcagatgaagataaagattaaaataaaaacagaagaaaaaaacaagaacagtcagacgccggtagagtggggaaagcggagaattaaaaaaagaaggataatttgagattaaatgatctgacttacacgtgaggggccttgagcgcgatggtagcagcagtgggtccacctatatgcacaagacattcagtatagaaggaaaaccggtaagtaccaagcgacagagaagcgagaggatacaagatcacagaagagaaaaaagttcccgaagaaaggcgaacgcgggaagagcacagagatggataaactgaccgacgtaaccggcaccaactaagaggggaagaaagtcaaacaaaataggtcagtcaggaaatccataagacacatgtcggctttaaagactacaagctagatgacggattttcaatgtatacgatacaagaaaagcgggaagaacaacagtgaagattgacacaagaagcggaaaagaaaaacaaggtgggaaagaatcccaaaaacacgaaatcctgcgggaacttactgcagcagatcttcttaacaacagtctgggaaggcatgttatgaatgagagtgggtgttaaagagaaagaagagaacgataaagggaaggaaaagatagaagaggatgggagttgatggttgatgggtgggaagggaagggaagggaagaacaaagaaaaaggagaaattccgactttaagaggtggcccgtgcttaagtctcgctcgggatttgcctaggggatttggtgcgcagttttgtctcgcgtcctgatcgtctgaaccgctagcggcaggatgctcgggccaaatggtgtgat

SEQ ID NO: 1507 - DNA, 17794 bp, Xanthophyllomyces dendrorhous
ggccaaatggtgtgattaggtaaggagaacgcgtcgcgtcgtttggcgtcgcgtctttcgcagatcacgtgattcaaactcatttaatatacccaatcttctttctctcactttcctccgtgtttcagcatatgcacacacacttgctctctaaacctttcgcaaatggatcgagcatgtcctacagacagaccgttcatcagagtgtataaccctcatcaagtcacgtctgatatctctcaggtaacccaaactgttcatctgcatcgtgaggtctaccgcgatgatcgcaacctccgtacttgtgccaaaaacaaggataagtgcaaaggcaaagagcgagcacagaccgaagatcaaccctatccagtaacgtatgctctacgaaggatatcttcgccgccttcgcgctcgatatacagatacctacctcaggtgcccatccccacgtggggtctatccgcccagctgggagaagagatcaaatctccattagccgaggaagagcgctggtggttcgagcaacatggtcatcattcctggttgaccgccggtgagaaaagaaaacgtcaacgttctccctcgttgctgtcttcaccgccgaataaaaagagatggagacatgactggtccgttatcgggcgtgcttttgatctcgttgatttggtacgtgtacatctctctggttcttcctcttcgtcgtgtccgtcacgttgatctgtcctcttcgtattcctttatatttttctttcccttcgcacgtcctccctgaacttgatctagcctcatgtgttctacccgagaacacacacatttcctccggtttccgatattcttatctctccctttccaacatacaaaacctatccaccctctgacccgtccctacccctgtcactcgtctcatctgggccgtctagatatggggagaaacgagtaaaatggctggtaccgatccacggaccagtttggggtcttcctaatgatgatactgccagccaaggccggttggttgttgacactctagacggcgataacgatcaagtcggagaaaagttaaggaaaatccatcaaaagatgtttcgtcgaatcaaaacgttctcctcatttcatcccgtaacaacttctgatattgaacccagtcggtcatcacatcatcgttcagaaccaccaccgccctcacttgattggactccgacgattctttcttcgttccatactgcacttcagaaactaagtgagaaaaaccagcttggcccaatctcggtcgtcctccatcattcgacatttccatctaccttcacacatccttatcctcgttctcgttcccatacacgttcttctactcgctctcattcttgtgcttcttcgcttccttcggcctcaacctcatcgtcaacctcatccttgacagagccgtcacctcagcaaacgattcatatcggggaccactaccggatctacgttgacctcacatatgcatctcatgttcgatccattcttgatagcgtcgatcttcgattcggtccggattccagtaaagaccgctgtttgttcttcaagggtgccagacttgtcttggtggatgacgtcgggactctactctgtctggcttgagatcattcatactcggggagggatctcctctttctcctttccctttcccttccattccctcttcttttcgttcttcctcttttaggtcgctctttcggctttagcatgaatcaagtctagaggcatgatgtttgtcatcaaagtgtatgcagtagaattgtatgaaaagaaattaaaattcccaactctttgagaagaacactattcaaatttgactccagtcaccctctcgaacgcctctctgtatcgtccggcagtccggctgacgatatcctccggcaacgtcactccatcgacacccttctttccctcggcaaccagccagtccctaaggaactgcttgtcgaaactctcttgaggtccaccaggcgcgtaggcggcaagagaccagtatcgggatgaatcaggagtcagaacctcgtcgatcaagatcaactgcccaggactggagggatcagctgggttgggcaagagtccaaactcgaactttgtgtcggccaagatcagcccaacagactcggcgtgcttggccgccgtggctgattgaggggatcatcggtgtgatatctgatcaacgtcgattctcaaaaatcagtgtcaaaaggggagtaggcagatactcactgtacagagcaacggcaacacgctcaatttcggctgccaactgaggtccgtacatctctgtcactattggatgttgaggatatggaagaaaaattactctactcaatccgtgtacaagttcccctaatccgcgagagatgagaaggagaaaaggagaagacatgagaccaacctttgctagggtggatgttctcatcgtgatcaccctgatcagccttcgttgaaggagtgaaaagcgcctcagggagcttttgagactcgactaagcccttggggagctggataccatgaactgttccagacttcttgtactctgcccatccggagcctgtagaagaaggttatttcgttttccatacatgcagaaacaggttggataacttagctgggccctagcttcagtgaggaagaaacgtcactcaccggtgatgtatcctcgaacaatggcctcaatcttgatgacctcgcacttttttacaatcatactccttccctcgagctgatccctgtacttctggacggaagccgggaagtcatcaaacgaaccagagctaggagcagctgacggtcgaggaagcacaagatggttcgggatgatggacccaagcttgtcaaaccagaataacgacaagttcgtcaacagcttgcccttctccgggatcgactgctcgtcaaagacacacgttggattgggatgatgagaagaattcaagcaaaagaggaagaggtaaaaagtcaagagcacatcagcaactccgcagccaaaaccctcagttcaagtcaactactcaaaggaaccaagagatatgtacatacgttcccgagaataacatcgtaggcactgattctatcagtagcgacaaagagaagcgtcgaatcatcatcaggaatggaatagatatcccggactttaccccgagcaataagcgtcaggtctggacagttggtttcaatcattgtggtaatctagtacgaacgaaaaccctcaagatattgaggacatgtggccgaaagacatgagcatataatgtatgatgcttacccaaagaagtgtgtttcgagatggataatgagcgaactcgacctgaaattgaaattcccaagaacggacgaggtctgtgcattcagggccagactcactaaccctaacacatctatgtcgtctgggacgacatcttatatcgtgttgaggagaactacgtgtccatcttattcaacgtaactgtgcctatcaccaagcttgtgcctgtatctttcatcgtgtactgatcaggaccaaactgatccgataaacacgggcggacagagatcttgttggccgtgtctgtcgctgatggttcttccgattgttgtatgtatgcagcgtcgctcaccgaactgacactcgctccttctagtgcttggtggtctgaacacaaaagtaccctgatggctcgatacttctactctttggtctcgccatcttctgtgctccataaaatgactatcagactgattggattagcgttcactgcttgtttgaaccgctaccgctgctgccgttaccgctgatctacataccagatatagagagtccaggaacaaaccgaggtctgctggtgcttggatgtcggccgcgatacctcgcgggtgtggtgctcagtcgagaatgggccgtcggtcaggcacgatgattaagggctaattcaggagtttcggtgttcccatcaggtcggctgtcgttcctgatcgtgcagagcgttgccatgctatcttctctgtttctttcctccttctttcttcttttctttcgctagtctcgtgatcccttttattttacagcatgctatcatcctatcggtatcatccagtgatagttcggttgacttgcttctcagtgaatgatgacggctgatatgtcatatcttgtctgacggctagccgtccggccggttactccttttccggacgcgccggctactcctaatttttgtgacctttttcccttgtccgtgttgatcgttctctgattcctccggtgctagttcgtgctctccaagcggcctgtcgactgacttctacccgtcaacactaccatcaggcgggatgttatgcaagtactctacccgttagcctacctacctgtctatccgtgcgtgcgctcgaccgtttacgatatttctgtcgaaatataaaaggaatgttatcattcttcaccccaacacgctttggactatcacccgccacctgtcacctgctgtatccattccacgtattatattataagttaacctacctacactactcacgaccattacctctatcaatcctaggcggttgttcatgtctaaaaccactaactctgcttgtctttcacgcatatctcgtcctttgacgccatatcgactcaagatgtctaccgcatctggcgcatcgactgctctcgcagccgtgtcaactatgtcggtcgttgaccgaacacccgctcctcagagactgcaccgaatctcgaggaaggcccctcccaaactggacctgaaagatctggaggcagccgaggccgagcaacgacgtgtgatgggcactaccgaacaatccattaactcttctcacttagtcgcgcgatcgacttctccggtcattcctgtcgttcctaccaatcccactacgtccgctatccggaccgtttgcaccattcctacgatatttgacgcattcggtgcgcctgtcgagtgtctcgacttgccttcatggattgcgaggatgactgaggcccagatcgccgccttgcctacaattccgacgcttccaacgttacgcactgttgctggcatccctaccattcctaacgctccgaccctctccaccgtctcaatcgtaccgacaatttttgacgcgttcaacgtagctcccgagtgcctcgatctaccttcctggatggagaaaacactcaaaagccaagttccctctaacctcagggttcttaccatcccttctaaatccgttgcgcctatattgaagggtccagggcggttaagacaaatggtgactgtcaaggaagatgggaaacctgatgttgactatgtgagttgcttttaacattcttgtcctcgttttctttgatctgatttggctgttctttgctctctcccacattttttcctttccttgttttatcgtacagatattcggcaacaagattggaaggggacagttcggtgtggtctatcgggcgctcaacatcgacaccggtgagacggctgccattaaacagattcagcttgatggtctcggagaggaggagatcgatcggctgatgaaggaggttgatattctccgacggctggaccatcctgctatcgttaaggtcaatagcttcttcttcccattcttgtcacttggcatgcccaactgatttagctctctattttccctctcttctctcttcatcctcccgattcttccgaacagtactcgggggtagtccggaaccgggatactctcaacataatcctcgagtaaataccctttcatacattctcttcttcgcttctctcggctttctctgttctcttcctctctccgcccctcttcgttttctttgactggggctgacgttgccttctgctgtcgacagatatgccgagaatggatcgctcggttcgactattcggacatttggaaagctcagcgagaagcttgttgcttctaatgtaatgcgaattcttgaggggctgcactacttgcacgaccaaaaggtctgtctttatattatctcatctgagctacttcgacccggtcactcaaacatacacttttgtataccctcttctccaacacaggtcgtccattgtgatctcaaggcagccaacatcctgacgactaagacaggcaacatcaagctgactgacttcggtgtctccctcagcttgacggccgtagagaagactaggaggaacgaaatggctggaacgcccaactggagtgagtccatacttcttttttcgtttgtctcttgtttacttttccatgcttttcttgccgttcgatacgttgtgtcttaattgacttcctttcttctctctttgcccctaatttttacttcagtggctcgtgaagtaatcaacctagagggtgcctctccggcttctgatatctggtcgcttggatgcacgatcatcgagcttttaaccgggcgacctccgttccctgcaatcaagactagcatgggtggtacgtcttgttcctatatatcagccctctttctctttgagaacgtcctcttgcagctttgcctggtgatatttctcttacatcttccttcattgttttattcttgtagtcctccgtcatattgcggcaggaggattgcccgagattccgagtgactgttcacactccttgcaggccttcttgtctcagtgctttgagcgagacccaatcatgcggccatcggccgaggttctatttgagcatgcgtggctgcaagagaacgctgagtatcccaaggtgcgctttccctccttctcctttcttttttatcttctctgttgatgcctcaggccgactgtcttcttctgctccttgtctcttccgcttctcgacagtcataccagaaggacagcattccttatcttcgtcggctcagcctggaaggtctagatgacctcagacaagctggttctgtgagctgtatgctatcggacgagtgtcttccggcattgtcgtctcttctaccggccagtccgccccgacgaggctcgcctggtagacgacttattcactgggtccgttcgcgttctcaagcactttctgtgctttcctcgagacggtcggctcggtcgtctctcgagcttgctcgatcgtctgctagtttcatccggtcattcgaacaggagttggaggttgcctcgagctccgttgctgagtcgagctacaacccgagcgagattaggacgaaggatcggcagaaccagcatggcgggacggatctgacggcctgtcccagatcaagttgctttggtgcgccgggctcgtttgtcttcaacgagaccgccttaagtaaggagtttggaagggatagctgttgaggaagatgcaaacacactgggcgatggtgggacagttggcgtgctacaacgatgacgcttagtatagctttttgcgatgtcttatgtcttggttcttggttcttgattcttatttctctttcctttctctgccttttgtattctcttccattctttcttgcttcgattatgactggcgctttttcatttttttttccttccttctgtctcctttctgcctctgcctcattctctcagcttattgtatctctaaatatgggttttctttcactctctcctcattttttaatggtataaccagtacgctccctttggtggccgtcatcctcatgtctgccttatcgtttgaaaagtcctgcgggatgtgttcgttcaagaggcttatacataattagcagtgtatcaaacaccacagatagaaccatgatctctttcttttgtttagaggaggaagcgcccaaaaaccccccgaggaaccagcacaccgtcgctcaagtttttgattctacagattcgtcagagaagagatgtgtttgtattggatcggtttgggattctaggagagcatgatcctgggtaggtcgctcggcttgtacaagttttcgaatccggtcgagctctgagtgaaaagaataggtaggaaagaataagaaggtcggtcggtcggtcggtcggtcagccagccggaggttggtcaaagtggaggaagagagatcatcaggatccaagcgggacgaacctcgagtaatttcatgaacctctttccgtaagacatcatcttctccttcagaccgagcaagcgaggaccggacctcatccagagacaagctgaggatgtcctcgaacgagtcatctatctcagcgcgatcttttctgatgcgctctgtagactcttgggcagatctagagacaagatcagatgagaaacccaaatcagtaggctgtcgtcgtacgatgctcggtcgggaaccgaccagtggatcggtgcgtactttagctcttcttctgcggtcctttttaatgaccgttttctgtctaactctaaactctgcgcctcgatctggacagcacactctgccttgacgccttctagctcttttgtccaggccgctttgagaccgtcggtcgctgaccggagagatgtatattcgttttctgatcgaagcgcccgcgcttctgctcttgccaaggaggttttgagagtagccgtgttggcaagctagagggccaatttcagggttcgtacggatcgatcagagggaacaagaagaaggaagacgatggacgttagatcggttgctgccggagaaacgaaagtcttctttctagagatttctctcttcgagtgatctctcacctcttctgagcgagctctcttcaggttgatagcctctaactctgctgtatgcactctctccaacgtctacaagatgcatgtgttgagtatgatggaaaccttctgccgggggaacaccccaaggataaatgagaagagggacttgcctcttgaagctgacgttctttccgggccaccacagagttcaacccatctgtctcgaccttgtatcggtctcgctttcgagatcccaacgaaataaataaataaacaaataaaatcgcaaggagccgtagttatctcatcagacaaccggcgcaagaaaacgccctatgctgaaggcagaagttagaaagcaagagaaagaaagaaagaaagaaccaaccgaacgttccatcccatccagcttgttctcaagcgactttatcgtactctcctttgctctcaactctgctttcagcttttcgtaccctatcttccaatcatcgacctcgccttggagtccggcgatgacccggccggagacttgtctcgaacggacgctcaccggagaatctggatcttgagggacccccgatgagatcctagggtatcctttactttgttctgctctgaacccgaacggtgagggcgaatagacagttctggcggcggtggtagtgatgatgtgtgttgaattggatcccgttggggaacacggcgtaggagatgcagaagatcctcttgtagtccgactttgcccatcaccgacatcgccatctgtaaaggaaagagagaaagaacccatcaataaaccattatactcaaccgacgagctttctaaggaaaaaaaaaagagacccttactcgagtttgagtttcgtgctcctgtagacctcggtgtattctcgtcctcgcccgccggcgtcaacgaatcatcaatcgaaccaactggacggcccccccgcagatcttcatcctggttctgtgagacctggtttgaatccgagttgggagatttgataggtgtggacgcttggctggcgagatcagaactggcggacgtgcgtcggatattggaagccgtatgggttggaagcagagatcttcgatgactttctttcgtggtagtcgacagagacggccgacgtgacatacttgcacgtgagcacgaacacggacaaaaacacgaacacgaacacggacacggatagaagaaggagaggtaaagagatgatcagagcttaacaacggtctgctgtggtgttgatcgttcgagagaggatgaccatcatcagacgatgtgcgtcccagagcaaggaaagggcgatgttgactagagtcagatcaaattgcctttgcaggccaaataagaaggaaaaaagagacggcctcgggcttgcttttgcatttctctgttccgacaagaatgcttgaaagacgccgacgacggtgacgacaaataagagagacacaataaacccatattttataaattcgcaaaggtaactaggaaagagggaaagactaagaacaagataggaacgcgcgaggcggtaaaagaaaagattgatgccgaaagagaacgtgggagtatgaatagcagagcaagggaaaagatgaagaagaaaagacaaagtaagggaaagaccagaacgaaagggataagaaggtctgttttaggtagaagcaaagagagcaaaaagggggcaaaagagaaggaataggaattagtgtttggggggggggaggggttgcagtcatcaaggaaaccaagccagacgggaaattcatggtagtgttgggattagacgaccggagagtttatctgggctcctcctccctatcggccaacatacttcaactccaagtatcgcgcgacaggatagacgacaccggcaaaccctccggagagttcgaacccgatgtcagctccgtagcctggttctccgatgagtcctccgatcggaccgacaaaccagacctgggacattccgagggctgcaccggcagctccagcgcagaacgcagcgagcgcggcgtatccaacgggtagtaatgccgggcagttccacgactcggcggcgttgtagttggcaaagcttccctttcggaagataaagtgctcttcgaacacgaccatggcaaagatagagagccagtatccaaggacgttcatgaagttctcaagcgcggaggcaaaggagtcggctccggcgatggcgattccgatgtagataccagtgatcacaacaggccagacgattcgtgggactcgggcgatgtaccggtggacgacagagatggagagaccgagactgaatgggttcgtggaaggaacggaagaataagcctgttggactgttgggtgtatacacaagagagagaagataaaaagaaaagaacaggcaagactaacgagtaaacgttgatgatgttgttgctgacgacggaaaggacaagaaggaacaagaagaagccggttccaccttgacctaggtggtctctgaagacggcgccgacgagaccgccgagttcgtttgagagatactccgtgtaccaagtaccctcttggttggccaaggccccacacatgatagccgctccgagccactcgacgaggacgagagggaagatgagaccaccgtaggtccaagagaagaccctcaggctggaggtctcagcagactggtagacgttgtaatcactggcaagactgacccaacccatggcgaaaccaaagatggtaccgatgaaggaaaggcaacctccaatcgcggcctccccagtcgccatgggcacattagagagtcctttggctccacagccgagaaggacgatgaaggtgatagcggtagggatccaggaatatcgctcgtctgtccagggaaaataaaaggtttcacgatatgagattcaaatgttagcgtgcgatgcttctttcctcctcctgagagctatgagaaacatattcaagagtaagacatacatcggtgaacccatttgtagccgagcagtccaacgacgagagtgatgaaggcaatgatgatgattccggcagcgtgagacttgagaagaacaccgcattggtttagtgctttggccgcatctagaaacagactgtatggcaagaacaggaagacgtaggcttacgattttgtcatcggcgacgactctgagagcctgggcaccggcaatggtgttgatagcagaccatccgacctggattgtggccaacgggaatagagagaggaagcaagcaacgagctcgagtcagaacatcctttgacttggcctggacggaagaaacgccatgaacaagagatacatacacatgcgatacagttcaaaagagccacgatctttgcaccatgccaaccccaagcgtatcgggctgaagtcatctgtcggagaccgagcttgggtccaaaagtagcggcgtaagcggggacgatggcggtggcggcgttagtgaaaaagatgcagagtaaggaatcttcgagaccaagaccaaagatggcgggtccgctgttgggaatgaatatggtgagtgagcatataggacctaggtgaggtggctccatggagagaacaaaaatgtgcttacagaataccgataccgaaggttgacaacacgcaattggcagcgagccaaatggtggcggagccagaaatatcattgtctgttcgctgatcctcttggactgaatgaatcgaggcgtgacaagagcttgaatgtcagatggaatgtggaacggctaggaaggcgcaagcaaggggaaagaaaaagaagaagcgaaagaaagaaaagttcgaggctaacctcgttcaattcctcggacttccatgcccaatctgtttcgggtagaaagaaagcgagcggattgtcagccgcttgtgctgataattaccaacgtagcgtgcttgcgctctcgctctgggcatggttctgtgggacatgacttctggctcgaccgtagctatcggaagatgaaggagaaagaaggggaaacgaaagtaacacaaactttgattcaagcttggtactcgcaacgttcattcggtcgaggaacctaagaaatgagttgctctctgggaagaaaggacatagtcagctttttttttcttccatacggacgcatggaaagaagcaagggaaagaaaaaaaaaggaacacaccctcatgctctgccactcttaccgggtggtcgatggagtttggtttagagtcagagtagactcccttctctatatcgtccatacgggcagcggtattaactgaaggtgaatacgacggaggctcggcttcaacagcggtgtctatgggtttcccaaggggtacagtcgaggtaggaagaggactgggagtgatttcgggagagtacatctttttttcttttctatgtgcttattgcgaggtctatataaccctggcaaacggtgtccgacgggctttcgggtcgagaggctggaaggaaggtaacgtggtctggaatcgaacagatagtggatacgataggatcgagagataggcaatgacggcttcagttgggttctttcctccggctaatcttctgggtttcctgttctgcctgaccgataaggcttcctggcttcctggctgtcctttgtctgagcggggtgtggtgggagactggagtatgcgtgtgctggctgaatgtatgctggctggctggctaggcggatgtgcggaaagctcaaaagtaatgaaaaagaataaataaaataaataaataaataaaagacagtgaaaaaattaaactcttggaaaaacattaggaaatcgagagacaaaactactagggaatccggacagagactacaaaataggtgggagcgcagccggttccgcagccgcaggtcccggggtaaaccgaatggttggtgaaattccggggtctatagataagaaagacttcaggcacaaagtaagctaaaattagaaaaagagccatgagttatgcgcccacaagtcttctgggagataacggacgagcccaggatcgagaactcttgccgcgcatacatctcgcggtgtgtaccgtcgggtttagagtacaacacatagggtgtcgatctcatctactcagtatccgctgctggtgctggttctggtgctggtgctgctgatgctgctgatgctgctgatgctgctgatgctgctgatgctgctgatgctgctgctgtcgttgttgttgttcttgttgttattattatctacatcattatcatcaccattatcgttatcattatcaccatcgctattctttctacatgattcttggcagatccatcgtccgtccggatcggatctcctcctccaaggacatcttgtctagtcggttcccgtccttataattctccattcggccccgacccggacggctttcggttgaccagccggtccatcgtgcccttcactccaccgtcgagccaggccggataagtgatagcaagtatgtatgaatctctggaggcgatccctctttcatactgaccgtcacccggtcggccgggcagcgtgccttccttatccggtaaaagtgcccgttgcagtcgaatcctctctggggtttcctggataaatcccagtcggagagccgctttgacagatggcaagtttgatgcatgagctgttcaaacaagatgcatgaaagaaggaaagaaaaagaagaaatctcgtttcagcgctcaaagcttgttttatctattcaaatcctctaggactcatttctcgaaccttgccattgaactcggcgcaacccatgtccaccctcggacgggagatcgaacgaatggtctagcatgagagataccgtatgtgtcaacacatgacttctttgtgcgtgaggcagactttgtgttcaatacaacggagagagagagagaaaaaaagtctggatcagacctgatcaagatagacaactagaatgccagaaagaaagaaacaaacaaaaacaagaagaagaagaagaagaagaagaaaactctgatacacacatcagtacaaagctcagctcagtcactaggtcgaccgcgctcgagttcatataggccaccattccagctaaaaggcccgttcgcttatccacaatcgcgtacaacagcctggtctatttcgttttatttttttccattcccatcaatcacaaagcagaaagtacagattaagaatataactagtgaaggaaaggaagagagagaagaagaagaagaagaagaaaagacgaacaggatcagaccgaacggcctcttccagccaaaccaaaacatctcccaaggtcttccatggcttaatcggcatgtaccgaaagacctctgggcggtcgacaacagcgtcgagaagagcctgcgcgtattcgctaggcttttcagtataaagaacacgccatttcaagaagcaaaccccgtcggaaaagaaaaaaaaaaggtcatggtcaacctacgctctcacatgttccttccttaaccttctcgaatgagactcacaactagaggtacaagcctgacgtctctgcctgatccttcgagcacccgaataggctgtgtcaataaacaataattaaagtcgtattcctctctggtggtatattgataaacgtccctcggcgtctttgccggttgagggggtgcgtatgcgttcttgaaaaaggctatacacataaagcgagcgctttggagatgtgagttgactcgacttgacttgactcgacttgacttgactcgacttgacttgatctgggcacatggcacatgcgcgaaaaagacggtgttgtcctacataactatgtggttgttgaatagctatgtggttatgcgcagccgcccttaattcctaaacctcccccccatctcttaatccttcggcgtcattctcccctcgctgttcgttcatcactccttccgagagaagcaaagacagacaagcatcaatcaacgtaccaccatggcaaagtttttaaagaccaaagaggacatgaagtccatgcgtgcgttcctcccttccttccttaaacagcctcgtcttccagaagtagaccatcactggaaccattcgtgggctgaacgaatcattcggtctttctttccttctttcttcttttctttccttcttcgattcattcagtcgatcagtttgataccattttgctcgattgcgatggtgtacgtcctttcttgctttaaacctgtctgctacagacagaaccaaaaagacgatctgcacgctcacaactgtaacacatgcgtcactcttccatccttctgcctcgtcgacaggtcatctggcatggaaacgagttggttcctgatgtcaaggaggctctggaatacttccgtacattaagtcagtcaactccttgccgttggaatgcgctattgcagttctcaaggatcagccggctgatcaacagaactcgcaattatctccatctgccttcgctggcaacttcacagagaaggacattgtctttgttagcaacaacgcgacaaagtctcgaccacaatacaagcaaaagttcgataagctaggaatccaggcttccgaggttggtataccaaaagttttttttatcagcagagcacatcagattctcactcccttctctgttgccttttcccattcgttgtatacgctcgggcacatcattcataggacgagatctttggttcagcctacgcctctgcagtgtacttttctcaaatcctcaagttcccaaaggacaagaaggtgtttgtcattggagaaaagggattggaagacgagcttcacagcgagggtatcaacacatgtggaggatcggtcagttgggaacagttctcgttctaccgatcaagtcttgcttgcaccggtcgtcctgacgtcctcactctttgggctttcgattcttgtctctcccctcccgttttgtgccggtgaaacgtaaaaacaggacccagaatccaacaaaccgttgcctagtcaggattttagctcgataaagcatgattccgagatcggtgccgtcctctgcgggtaggctgtctctttctttctctcgaatagtgattgcatcccacgctttccaatttactaaatcgaaaaaccatcttctccttctctgtttctctggcatctctctctctctctccttcgttgtgcgcgaattagctttgacactcatatcaactacgccaagctcgcccgagctcacctcgcgctcactttggacaagtcgacagagttcgtcatcacaaacgatgactcgacgttcccttcgaacggcgtactctaccctggctcaggttccctctcggccccgttgaggtactcgaccggacgggacccgatcgtcgtcggaaagccaaacaagagcatgatggattgcatcgtggccaagtgggtagttttctttgtttcttgtttccttacctaaatttgttttgttttgttttgttttttcttcttcctcgttattctttgggagagtgaacctcatgggaaactaaacatgaattatattgcaatcactcaacaggcgacactttgaccgatcgagaaccctcatggttggagatcgactcaacaccgatatcgaagtaagggccttccccttctcatccgcgcgtcgctcgtccaagcccgctgaccatgcttttaactcttgccgctcgttcagtttggtatcaaaggaggaacgtccaccatgctcgtcctcaccggtgtcaacaaggtggatgacatcgagagcagtggtacgacccctagttacatcgtcaacagtctgggtgactttagagctctggcggaggaataagtagagttcggattagaggcatcacgtcggatcaggattagactcgttctttctatcattttctctaaagggaacgacatgtgtttattcaaagagtaaatccttgaaccggggacttgttcgttgaacatgaagcgactgagcaaacgaacacgtcaagactgtgttttatctttgctttttgtttcgtttcgtagttggtgcaaacctgagaaaacaaagaggggaatccgtccaacacgtggatatagatatcgagatccagccagaaacaagcaaacaaaaaaaagaccatccttaagctcaaggatagaaagcgtaggaatattatcaccaccccccccccccccccc

SEQ ID NO: 1508 - DNA, 27774 bp, Xanthophyllomyces dendrorhous
cccccccccccccccccgccagaaactgattttgcgaggtctgctcctaacctgatgtacgagatcatgttggtttttaaaacatagccatattgccatgggcattctctcttttctcgtatgtgtgtgtgtgtgtgttcggatcatttggaaacctcatgtcatgcatatccatttggaaaccagacaaggacaaaactcgtgaggaaaggacaacaaacgcagcggtcgagtgaacgatgccacgagagggggttgaagaaaagggtttttaggcgagggagtttaatcgaaaagtccgaaacccatctgatcgttcggatagtcaacgggtttagggagcaaaaggaaataaagctttggtcagaaatgggaaccttgaaacactacgagaaagtcggcaagcactcacgtcgtcgtcagactcctccttgtcctcagccttctcctccttcttctcctcagcgggggcagaggcgtcagcggaagctccaccggcgacggcggcggcgggggcagctgtagagattccagcaaggacgaaaacggagaaccgtaaataaagatccgatcgaatgccagcagataaaaatcactaacctcctccggctccggatccgacgttggaaagcaactccttgacgttctttccctcgagggccttggcaaggagagtggcccagatgggctcaagctcaaccttggcggcggtggtgagagtgacgagcttctcagaggtgatctcaataccctcgtcggcgaggataagagcggcgtaggaggcggcgagttcagactgtgaacggtaagaaaagaagtcgtccatgtaagtctcaatgctgtgaatgtactaccgagtcgctttctaccaacgccttgttctacgttctgaccgctagaccgtgcttccttcttctcatctcccccttttctccctccacgacgctttgtctaccaaagtaccactgctcctctcattgcaagttatgaaaatcctgatgaacgcaccattgtacgaatcgatttaagccggagctgactagtacttgatgtcctaatcgaaaagtggggatggatggacgcggcaaaagttagtttttctcttgtttctcatctttacgacccagacatcccaaccctcatcttttccgactcgacaacgagcccctatgcacacaaaaattacaagcacgtacgagttgtgtggggatcaagagaaaaaggccaggctccggatatcggctgagctcacctagattcgctcggcaaactgctcttgtctgacttttgtctcaagtcagatgggtgacaaagatcacgtgacgtaaatcaactattggctagctaaatggctttggctaatagaaagcaaccctaaccgacggcggtccatacatggcccctttggactggggtgcccttagaccatgaactaccgaatccccatgggtcatgggcttaatgtgtgccagctccagcctcagccctactagcgacagcgtcaaagcccggcattcttgcctcctggttctcctcccggtgaagggctaggtgcagcgtgttgcgcgacgcgttcacatctctgttctatcaagtctgagagtaagcatcaaagagacagaaagacagaaagacagaaagacaaaggaacagcgaggcaccgtcagcttcctcgctctgtctgtgaactcagagacttcctctctcgtggtggctggagatgctttgagagaacgtcatcagggcaagatgttgatcgcttgtgtgcctgctcgagttttgccctgaattctgtcctgaactcaaccggctgtgcctgcgaacctccctttgacggctgaacacctgtcgaccgctgttcctgtttctttcctgtcaacgctcgtctatataacgttcttcacaatatatggctttcctttgtcttcttcatctcatcacatctgcaagtacatatattatcatcatatgaaatgtcccacactcgaaacaaagcacaagtccctccgagtgacgtgtgcttctttatgaggtctagcacacttgaggtatcaactgggtcgagcagtgtcgatagacaattttcgactctaacccagagcgttgagatcagcagccagtaatcgactttcatggttgtcgagtatgtatcatcccatgcgcattcatgggatgatcgtagccacctgcgagacactctcatccaaagaagtaccaacaacataccgatcacagtcatcactatcagtcctgagcgaatgactcgtcgagaggacgagatcgacaagattctgtatttcttttctcagcatgacatttcctggtggtccttcggcatccaagataaggatcaacccggactcagagcgcggctagtccctgtcagcgcgcatgtacccgttgtacggcaacagatgttgcatgggcgcttgataacatcgggagcgtccaaatatatgatctgttttcagcgtacggtagcgtcatacaagaagctatcgaacgtgttctcaagtgtgaacgacaactcacctgagggccacgaggatgaggacgacgacgctgaccttaaagttgaagttgaagttgaagataaagatgatttcgagtacgaacatgaagacgagagtgatgaagtccctcttctcatcccactggccccttcggtcccgttccctcctcccaacggtccacttcaacttgccgcaacatccaaattgtaccagttccagagtttcgtccagcatcatatcgaagctcgccaaatcgagcgcgtcgtcgtgctcggccgaacatctaaattttcagatagtcgaacatcgttggacgcccaagtaggtcttctacaacatatgctaggcgacttcaaaggagatacctatgtgctggagtgcaatggaatctctgcatacaaggataatcatctgctcaaagcatgcaaaggaaacaagaaggtatgtttttgcctgtcctacctttatccgagtctaagtgtcatgctgatctaccttccacttgatgtcgtaatccagactctggtccttgcgacctcggttgacagggtttgccgcaacccagctcttatcgaagatatcctcggaacactcgatgtgatgacattcgtccattgtgataccggggcgaactgtcgaatgctcgcggatgagtggctgaacactctagatgaaatcgaccaacaaacctggaggcccatcctcgagaggcaattgtctcacaccacctcggcaaagacagcagggatcactttcccatatctctggaatacaccatctgtcagccttagggagcaactcaagtctagggtaaccaaagactcagcgttctgttcctcacgaggaacctcacatcatttctcaaagcctcctctccttcctggcttggccagctacactggacgcaggattggcttcgatgatcatagggtggaactgtggaaacagatctatcaggagtacacaggatgcgtactcgacgtacactacaagaacaaaggatggacttgcgcatgccatggagatgtctgcagagacgattgcctttgtgattgcggtccttgtcaaaaacgagccacaacgggatgtgtctgtcgtcttcaagagcgttgcgattgttggatcttcgagttctgtcgatgtccaatttgtgacccggagatagagaagtggaagcttgaggcacaggagcagatagagcagaggaggcagaaggcagagcagaagaggctgaaggcagaggagaaagcagaacagagaaggctgaaggcagaacagaggaagccgaaggcaggtgagtggaagcttgaggcagagaggatgcggagggaattaaagaagcagtttcaggcgcagaagtattccggggtccaacaactgatggcagctgcaaagctagccgaccaacaacaggtagcggcagatatagacgcagtcgtcacggaagctgcaggtaaagtatcggccatagtgggacgcaatgaaatatacaatgcggtctatcagaggacggccatagtcgcacggcagaagatctacgagggaatatcttgtcggataaagactttcgcagagagggctgcccaacgaacgtcggatccggtcgtgcgacggcaagggattgcagtcgtgcgggacaggacgatcttagagactcccatgcggctgagtctggaggctctgaagcaggagacattggagcgaaagagactgtggagtgagatgggatggatggagaaacatatgacgtcagatgagttggatggaagatggacagagggacaacgactgaccaggctggtagcttgtgtagagatcaagcagttgctggatgagaagggatggagggtcgaagagacgcagttgagaggggtacgtgacttttggggggcagcagacgccaagtcggaggcggattcgaccaatgtgatgctgaaagagaaagggcgagagctgcacttgatgtcgatcaagtacagggaggaagaagagaaacggactagggagaaacggcagagagaagattacgtccagatcgcttcattccttctactgacttgacggctgtcttttccttactcttcctacgcaggttggatgagcagctgcgtgagtctccttggtggcggtctctacgacagaagaccacagcggaatgtcttgagcctgaattgtaaagtatgccggagatttgatttgatgagtgataaagtctttgaacgaggcaaactgggatcagcaagaatcgagtcagtcatgacatgtttcggaaacaacgagacatctagccgagcgtcttagatcaggagaagcagaaataatatcgatagccgtagtctaggtggtttgtgtaaaacatttcatcgtgagggtgtcgaaagacttgaatcgtctgttagaaaaccaaggtgaggttgtgatgaactcgatgaggttggactacatttgaagtggaaccgacattctggtctagtctggcacaacgggtcaacttctcttgtctttagccggacacttcatctggatagtttactttaatctttgtcgcctatttactgtcagcactggcaaaggattgctcgatagttgagaggaaagcggaaacgcgtcgctcgaacccactataatcaaagagagaggaagagagtgaggtgatgatggtcgatgggtttggttgatcacatctataagttcactatagttcaataattccagactatatgaagatttcgtgggttcgtggtctgagggcacccaagtccagaagggccatgtatcgactgccatcggctgaagtaactctcaccatgcctaaggcatctgatgaatgtttctctaatggatctcgagttaattcctaataccataaaataaaaagacttcaaatatttctcagaaatattcgagcaaaagtcagatagagttgagaaaagtcagataacctttctccgctcacgagtgggccaacattacacgaaatctccccgtcctagtgagaaactgagtgaagcccaggacaccgtcaagacaattcgtgtgggtatcgtcgccttgtttattttcttttcttctttgcacgacagaatctctatcctttaggtccggcttgttctctcgcacgtcatttcccaatcatcttcagccgtttcgttccgttttcgacatcaattttggcccggtaattgaggattggcggagggttgtcctttttcctccctaaataagcaaagagaaaaaaaagaaagaaaaaaggactactcctcggtcgtccgaggttgcagggtgcatgtagcgaaacccaggttgaaggagaacttatgacggaaacacgatgtttagagaaagatttgaaggaataggagtatagactatgccggatcaacagggatgcaggctggaatttgagctttggaaggagtgccggatacaagggataccaggatcaaccgacaaactctagaaacgacaactacagccattcactcagtatcctccctctcgtagagaccctgttgctcgctctccgctccctgtcgtaatcctcctacatccagaccctctgatccgttcgccaaagcctgcctacacaaatcctgtctttttagcagtttttccaatcagacgaataacttaccataagctcgtcttttttcgactccttcctcctatagtaaaatggcccagcgagttactctccgaacccgaaagtcctacaacaccaagtccgccaggaacaaggtcgtcaagacccctggaggaaagttggttgttcacaacttgaagaaggtcgctaccgcccccaagtgtggtaagtcttctgtcatatgcccagttttcctatggtggcctcggaattaacggggcaatattaatcttcttccattaaatttcctgcttctcaggtgattgcggaactgctcttcccggtgtatgttgaacatccacagatcttttctcagacctctcgttttcctcaaccaaccaacctctttcttctttttgtcccactatcgtgttcctctaggtccccgccctccgaccccgagagtacgccaccctttccaagcgacagaagaccgtctcccgagcttacggtggatcccgatgtgctacctgcacccgaacccgaatcctccgagctttccttatcgaggaggccaaggttcgtactctctcatttctaccacacagttccctcaagtccgaccgtttctcatttgttctgcatcaccctgttcggtcgcttgtctactgcaaatacagattgtcaagaaggtcgtcaagtcccagcttgctgcccgaaagtaaacgtgctggctgttctttgatgagagtttcggtcatgacatgcgcttttctctaatcttccgtgcacattctttcgctctacgcatcttgagacaatacgacggatctggaagctttcttagccgattacgaatcgctaacgacttggtgaatggtcattggaatacacgattgggattctttgggacatgaggttaatcagagatagaggcaaggaaagtgccttcatgagaaatcggatataatcatgaagtcatcgtcataaagatacacattgcacaagtcgccaagggagccgttttgaaaagccattaatcttcctcttccgagtccatcacgactttcttcttagatgtaaccttgcgactggaagccggtccttcgtcttcctcatccgaatcgttctgataatccttctcggcttccgactcggatcggaaagtaggactggcttcggcagtcgccgtctcttcgtctgtttttgatcgagcggatgacttctttgttcgagccttcggtttcctccgaggtttcgctacggacgcgtcagagtcttctccttggtcctcatcgtccatgtcctcgtcgtcttcgtccccggaatctgctgatgagctggttgcacgcttgggtttcttttttcctttgttgactgacgaagaacgcccgtcctcccgagaaggttttcgtttcttgactctcgaggaaagcagggcgaaatcggatggttcctcgatcggggcctctggcaaagcagccgtgccctttcttgcccgctgaaagaaagtgtgtttcgcgtccgatgtcatcagtcaacgagagagagagagaagagaatgcgcaagataaatgaggaaggcagaacactcaccagggcttcctcagccgcatagaaggcttcgtctcctgcttcatcgtcagagtcctatttattttaaaaaaatattcgacaaacagaacggtttccatccggattcaacactttcagtttgtcagggttttccgtaggaacggatacggcagactgagataactgacctcgatgaattgagtcgacttgtattgaatcctttcctctgcaactttctcctttctcttcctctcagctcgagggagctctagatcgtcctcatcctcaaccggtgctctttgctttcgaggcgcgcgcttcgcctttttcttcagctggttcacagccggttctgcgtcaaacttcagtcattttagaacgcgaaaacgaagagaacatatatctcaagatcagtcactatccagtccgtcggtctggaggaagataaatacgacatggaagatgcttacgtcgagaggctctctgataaactgagttaccatatccgcctgccgatcaagttctgtaggatgctgacgagcgggtatttcccatcgaggatcttcggctagagcaatcaaagatgcataatgagcgtttgtcctgtggttaagagagaagggggtgcttggatatgagacagaactataccttcgtcgtcatgttggaagtccagaagagtaaggatcagtcgaacgtgagggtcggtcgagacagccgttttcttgtcatctgtatcaggatcgagggctgtgagaacgtacgaatcgaagagacatacaaaaagattagattatccttctcaagaacgacgtcagaccggtttgagaaagaaagacagagagacgggtccttacggtgaggtgtaaacttggccaaggcttctttggaaatttcctttctagcggcctgagcgcgtatgtcatcatccgtcatgtcctcaccatatatcgtaggtccatcggtattcatgacaatctcgtgccttgcagcagcggcatctcgtaggacctaggtagccagttgatgacagatacatcgcatgctggtcaataatcgaaccacctggtggcgctacagcaagatacaaggataccgcaaaagaagaattcagactcaccgatatgaaccatgtgatgaacgaaatcttgccttcttcaagaagaacagagaccgcaattccaagctgttgactctgagttaacgtcttgtccctaatctgaacatcggctttccgcttgatcttcttgagcttgggtttatcgtcatcatccgttgagtcatcccctgtaggtctacttgaaaactttttccatccggtccggtttttggggaagaaagcttctaccatgaggaatggatgttctgccagtcttttgaagaatttccgaagaataaagtggatgagcgcaagaagatctttactcgaagggtctttgggtagactaagttcgttgtccaggatttgctggaacaggtccagaactgaaacctgctcggcgaccagcccgcacaagagaaaggagaagtatactggttcatcagtacatgtggacatacgctcacttgaaagaggggacacagaatgtaggcgactgagggcttatacgatacgaaacgaaccttgaagaaaatcccctcggcctgtaccttgacggccagccgatggagtagactgacgacccgcttcatcttctccggcgatttaaactcggagtaaccttgcagatacgttagcaaggtatgcagcacgtcttcattcgccagtttcttttagggcgaatcccattcgacatacagcgcgacatcaatatgacagcatgagaacaggcaagcgatcagcagagatcactcaggatttgagacgaaaagcgaatgccatgaagcttaccatctcaaattcagtgaattggaaggcatgttctgcaaatttagaagcaggatgaagagcctcttcttcatcatcgttctcttccccttcttcgccctcttttccagcagccgctaatcaccattcagattccaatgaggtaagtatcaggatatcagaccatttgaggactgcaccaacgcttggagcgaagagttaatatgaatttatacgaatgaccaacctctctttcttttagctctctgcgctttcttctttcggaaaaacatgtaagcgttccccttagagtatttttccaacattcttagcagcacacatgcaaagtgaatgaccgagtcgagataactgagagacagagaaccgttgtgaccgagatagaaaggacgaggcgatcagttcttgaggaatcaagcagagatagaaactaaagaaaaaaagaaaaaagagaagtcgaacgaactctcgagattggagcctgtaccctgccatgagtttgatcgacagttctaggatatctccgttatagtaaatctggttctgcaagatctctgctgcctctactggttcttcctctctactggttgacatggcgtccaccaataagagctagatatgaacccaaagatcataccgtaagtctagcggccaagttgatcatgttatagaatatgagaagaggagctcactatctgggtgaagcagtttaagccagcccgaagttcgacccatcctggaggctatgacattgagtgttcaatgacaagcgtatcctacaaaaatatcagcgcaactgcgacaatcaaacaaacagtcatcgaggagcacgtacagtatcctccaggacaagtctcatccgagcaacaacccatctaacagcatcgatctcgcagaaatcggctacatacccgaaatcccatgcggtcttgactggctttttgtcttcgtcaggctgtactccaacagacttacggtgggcttgtatgtctagagttctggaagagaggaaaaaatcgaggaagaatgtactgaggaagagcgttcgaagattgtctgcttctgtcaccttttgacgttccatacgtatgtcctttaggacagaagcgaagaagacttaaaacccaacaagaggaggaaggcgttgtgagccaattgagaaagaggatcgagactgagggagatgaaatggaacggactattgaatgctacttcaagaaattctcgagagaactgctgaagaacggtcatagcttctggagtcaaacatgatcgaaggcctgcttcatcctgaatagattggaaaaacataatgagaacgtcagcttttcggcaagatgtgcactgtctgtatatcatgttaagcgtcgaacctgctctcttgttctccctgatcttcttttcttcttattcttgtctagtagagcaattgcgtttccgtttatagctccagatttatgaacaacaacctgttgacccttcagtccagctgactgtatggcgattgttgatccaaaccgagaatgcctcgaggtagattgtctagaagcagctgctgattgaagagattcctgctccaggagagaagatagtgagtctctgattgcctgtggtggagaaaaaggcgcgcgggattcaacagctcaaattagtttcagaagaggaggacaagaagattgaactagaatggaggaaacgaacgactgtttgatctttgaccaacgtagatacgtcgacacctctaaacatgagatgtaagacatccaggaccaacatattaaaagagttaaattctttagttgctgctgatgaggccaaggtgatgaatagttggaggaagtgtgaatcatcgagttgaacgatcaagcgagactagttcatgacacaagataaagatgaagaaaggagcgcgcagcgttagaaagagagacagacggaagagcgtgtggagtgaaggaactgaggcaatgcaaaagaagactaatcccacctgtagagtggatttctcgtagctgtccgcggtagcatgcgttgaactgacagagtccttgatggacagaagatttcgaattaaggagagaaccaatttgataatccgttcatctctttcagttctctcactgcaccacacgatcaagagacacaagcgaagagaatttcagaaacttcaacatcatccaaatcaactcgataatcaacctcgcagaacggataatgaacgtactcgatggatttagccagataagggaggaccagactcattattctttccatgaagactcccgaccgcaagatggccgctttatactctatctgggctttcaggatggatgaataatcggtattagtgtccggctcgtcctctagctcctttagctcggcggccatatcgattggccatgtcaaggaagcaatgagctcggctgaaagtcaacaaataaagtcaatattccaaagcgaggttcattttagatatgattgaaatggaagacagaggatgtccagcttgaaagaatcgaacaactaacctgccattaaaccgactttccgaccgaaatcacctcgttcgctcacttcctcaacaatcgtcacgagttctcttataagacccgttttagcaaagattcgggcgaccgttcgttcgacatcctcatcgtcgtgtcgccatatacgtttaagatccttgagacatccgagaatcgagtctcctggtcggtaaactttcgtgatttctcccgtaggcgaatcaacatcctgtcgaggagaaattcgtagtgagatctgtcttgtgagtcaaagaatataggggaatgaagaaggtccgaataaaaatgagcagtgctcacctcccaaccacctagggcagcaagcaatgtctggatgaccggcgtcaacacggcttctctatcttcttcttcctcattctctcctccttcatggtcgtgttctgggtattcatcgtcctgagtgttcttgagcttgtttttacgcctagcctccagcagttgaatccgttcaagctcctctatttgaatgtgttaccaactgtcctaccatcagcaagaacagacacggaccgagacaaacaagctagaatgcatacctttatgtccataccctcccattgtcatatcctctaggtcgagctccatgatggctatcgctcctagaagtgtgtgtgagtataagtgtgattgtgagtgtgagcgtgagcgtgtttgtgggggagaacggttgaaagatctttaatgacgcgttaaacacgcgacgcgttagctgacgtaagccaatcaaccctagccaccaccttctactcccatctttcccttctccacgtatcctgaccagaccaaggcacaaagacaagtataccagcatacatcttatacacacacacacacacacacacacacacacacacacacactctctctctctctctctctctctctctctctccgttcttgaccatgtctacatctcctgaaaactccactattctctacaagatcctcaccgagaaggagtttgatgctctctacgagaccgcgcccatcaaaggagactactggctcgggacttcccttgatctgaatgacaagtttattcacacctcttcttctcaccaagttcgtcttgctctttggtcgacgcgtcgaatagtcctttcatgttccaaatgctttctacgatgatagtgtcttatacgttctgttcaaactcaactttctaaagctcgagggtacacttgaccgattctttaaggacgtagagctcattcatctcttggcgattcctcggtcgaacgagcgaatcgaaaagactcttaaatttgacgaggctggcaacggagaaaagtatggccatttgtgagttctttctctttctctctctctctctactcatcgtatgtgacttgggaaggttcttggtagcttggttaactcatttcttctttatcaaatttctaggtacgagggactggatctggttgctgaagtctcaaagaggagtcgagtaagaaaggagaacggaaaatggcagctgggcgaccttgagttctagtttgctatcaaatgactgatggatcactggtacccaaaaccagccacattggagagagcgagcgaaaggaacagagttcattggggtggttagtcaccattcgtttgacgtggcacagacgaacttcttgaatccatcatccttaccatcaccatcattatcactatcatcatcatcaccaataggcaggctccgatgtcatgcctgccacctatagcatccgattccatgcttctggtttctggctctgcttacttctcgtcttgtccatctttctcgtgatcagtccggtcttatcgtcttcccttccctttccaaagtcatcgtcattaccgtcgcctcctccgtcatcgtcgccatggtcttctcccgattcatccttgctcgcaccatacacgcctttttcccctcacttgagatcgagcgacattcatgtttctcctttggtcctcgtctcgaccataaacggtgatttacacgcgctcaatcgagtaacaggggagaaactatggactgttcagggagagggttctatggttggttccgagcgaccgagacgacggagaagcaaatatcaaagaaacccagagcaggttgagtctaacgaaagattcctggtagatcccagaaaaggcgaaatctggcttggttctttggatcaaagcgcgtccgacgagaaagacagaggttggaggttcaaaaaaatgggagtgacggtaccggatctgttcgtctttgttcttctcttgtttctttcaatatcttcagtgtcatgagctaccaaacctgacacctagttgcgttgttacttacgtctttgtgaattaccactgaacacagggtacatgcttcgttccattcgttacccgttcacttccgacaagacccaaacccctctcgcgtattcagcggaaagatcgacacatctctcatagcgatcaacttgatgactggcaaggtcgttaagttcggagacgaggctggttctgcagctacgtacttgggcgaacattctttggttggtagtctcgagggtcaatctgaggagcgagatcgattaatggatctgttggacgagcttgagggagaggaggaggagaaaggagatgtaggagagctattatacctaacacgaacaggtccgtaaatattcaaactttctcctttcccccgttgtctcttctgtatgctcttagttctgctaacaatacgtacctaacacatggtttccataatgaacgatgcgtggccacttggaacaataagattacacgctcagaatacatcacccacctacccccgactcggttactaccctcaaatattcgacgtattcacctccgccttcatcgctcgacccactgctatcgagcgcgatctggggacatggtcgaacggccgacggactttacgctatgtttgcagctggcactcagggagcgctacaagccgagaaagatgggggtgtcgttctgggttttagagaagtcgatcagaaaaaaactgctggagcaggaacagggggagggctagaaggcgtctgggctgtcaacatggatagtttaccgttcgtctgtctttctcatcgttgttcccttcaaattgttctcatcgagcatttgctgatctctcttcatccgtcttttggaacatggatcatgcatcaaacagaatcgccttctacgacattctctcgatcactaacatcgatgctcccccatttattcttcctcaaccgatcccatctctctccaccctgttctccacgccccatggaccaccttctcgactccctcaaatcctctttattggacagacaacttcccacaacacaagttcctccctctttgccctatcaagagacaaccatccattgatcggatactttcagcctctcagcagttcagcccgaacgagcgagctcgaaggatatcacgtactcgatggagtagatctcattgatgaagaactatctctccgaatgccttcttcctcctcctcgacagagaaaggtgtgaaagaaggatggaaagagaaacaagagagaattgggattgaaggcccacccgaatgggcgcaatcaaacggaagggatcttgtaggagagaggcaacgatggtggcatagtagatggattggtgtactagggacaagtgcaataggctttttagggtggtggtggggccgaagatctagttcaggtcgtagaaactccaatgaaaaactaacaaaggagatcggccatgcttcaggcaggtcaagttcgtcggtgaaagaacagggtcctatagtagaaaaggacgaaggaaaaggaggtggcgagaggacaaacggtgggctcgaggaagcggagcctgaacataagaagaaaaaacgacgccagcggacgaggagccggaagaaggatataggaggagatgagcacgaacaggagcaggagacggttcaaggacaagaccaggacacatcgcgccaggaagcgaagaacgaggaggaggtagatgaggtagaggaggaggaagaggctgaggagatatcaggtccagtgatgatagcagagtcggaaagcaaaaagacggagagggagttagttgtctcagataaattgataggtttgttctttatctcgccttggaccaacttcataatctattatctgatttatttggctttttcaatacaccgctcatctactgttgttgctcttttaccgttcttaaggtgtcggctcacatgtgcgtaattaagtcttacctcgtttgtaagattatcatctctgccagatattcaaaacccaatgctcatattgcttcttgctcttattatcctgtacagggaaccatggttttcgagggcacattccagtctcgacctgttgctgtcaaacgggtgctttctcatttcacaactctggctacccaagaaatcaatctactccagtcctcagatcaccatccaaacatcatccgatatttctaccaagaaacctcggacccctggctattcattgcgctcgaactgtgtccagcatcgttagaggatctcttcacgaaacacagagaggttaaagaacttagggataagctgatacccaaggacgctctgcgggatattttcggaggcgtaagacatctacatggattgaaaatcatccatagagacatcaaaccaccgtccgtcctgatcgtcgttcttctgcagctctctgatcttttcattcatgctaaaagcgcgctttgccttccccctcctctccttaaactataggaacattcttgtctctctaacagctaaaggattgaagatgttgatctctgattttggtctggccaaacaaacgacacttgatcagtcatctttcggaggcaccgtcctttcctcttcgatcactcatctagcacccacaggtacgactggctggcgagctccagaagtacttcttcatcgagggactgagagtgaatcatcaggggacgcatcaagctgggacgattgggacgtcgtgagaactggcaagggagcggctacgtcagccggattgaaacagatctcaaagaggttgacaagcgcagtagacgtattttccttaggatgcctgacctactggctcttgactcgaggaggtcatcctttgtatgtatccgtcttccatttctctcctcttacaaattttaaataagtgctgatgaaacttggtgttcttcgttctgtgttttgatgactgtctttccttttctagcggggagagaatggagagggatcggaacatttgtaaaggccgatctcagctcaacggattgcccttatccgaggaagaatgtagcgaggcgagggatctggtttcaaaaatgatctctcaagatagctccaacaggtatgtcgtttcacaaccttcttttaggcagagtgatgtctccttttgttaatcatgacatctggaatgaagaccttcggtggatgaggcctttctccatccatacttctggagtcctgcccgcaaactgtctttccttgtacgctatttcgccatactcgcttcttcctctcttttctcctaactgatgcctcttgacgtacctttggggttccgcctggaatatccgtgctgatacctacagcaagatgcttccgaccgattcgagatattcgttcgggatcctccagatccaatgcttcagttattagagaatgggtcgactaaagtcattggttcgcctcgagactggatgagactcatggatcagtcgtttgtagacagtttagggaaataccgtaaagtgagtctcagtgaccaccgttgcttagcggaggacatcttccttttggaacaatggctgatggatctcattgagggagcagtacgatgttggttctcttagagatcttttacgagcattgaggaacaaacgccatcactacctgttcgtctcgttttgtgtttcatccgtactctttccataaacgaatggttttcttttctgatcatggcattctgtgaaccatatgctgaccaacttgtatcgaacagagatttaccggctgcagctcgggaagctatgtctcctcttcccgaagggttcctcgcttactttaccaaagtgagtcgatatcactttaaatccgcgataccctttctttctagcctgacctgtcctctctctctaatagcgtttcccgctgttgttcttacatgtgtacggagtcatctcgagcacagagctccgagatgaaggaggttttcgagaatactttttagacggcgagcgataggtgatcttatttatacctaaaacagaaaaactaagggaatcgaggatttcaaacgtcttaattaccatatatatatatgtgacgttaatctcgtatgagtgtatagcgcagcgattgaagatgcaggctcagtcattgacttcttgttagacaaaaacatctacccaatcaccctttctacctttcataccctgcctaaccgtcctaagcatcaaatctttcctcgcctcaccccttgatgtacattgcgagagatctccgggaatcagaccgtgagctcgaagaacgagaagagacgaccagcatggcgaggaggaggatgtccaaggaagagaagcgagatgagttgctttcagcgcggggattgtgtatgagatgttaagatgctgtttcaaggtatcaacaaaagcggtagcgatagggtatcccagctcggctagttagtacagtggctgctgacgaaaagaaaaagaaaaaaaagaaacgagtagaagaaaaggagagatacggacctgtagcaaggggacggcgctagcgaattttcttagcatgttaatcactcttgattctctatccacagtccaccaaccccacctcgcgcactctccatcgccttccttttcggcttcttcttctccttctagttcccattctgtgccccacccaccagggatgaaaagcttgatcccttgaaggtcgagaactctcaaatgggccgggaatactgttatcaggctggggagtgaatggttcaccagattgctcagacagagcgaggtgacaggggtaagggtgaccggctgggtagggagtggtcggagaaggagttttaacatgctgagcgacacggtcgagttgggtaggtagagagttctccatcctccggaatatccaggcctcccaagatgattatcttcccaacttttctcgttctcgtcatctattgacgtggacgacagaagtgagctttcgccatcatcatcatcatcgtcgtcgtcgtcatcctccgagttttcccactctcggagatcccacatcaacatttcgattccttcatctttgagtccgggatatcccgcctgtgcggctctcgtaccaatccaccagccgaggagctctcgaagatgttgtggtaataaacctagttcttctctaaccaactctctatcgatgactgaggatgacatcttgctcgacagacgagccatacagagcgcgactagcctaggaatctcctgtcctttatgtctatcctcgatcgaggctgacgagctagattccgagacaggaaaggatggagggtaatacacctggaggttgggatagactagttcggtaaacgatctaaatgaggtgagtgcctcggccgaaagagcgaaagaggcgcgtgttttgggtttgtttgatgatcttgccggacgaacggaagattgatttcgttctgtccatgatcgggggggtggtggaccggctggacgccgaggttgagcttgcgccggttggataacaggcggtgccaccgaagctggaagaacagccagacccacgtcagtctgctgatgtaacctggaaggaacggcaagaggtaaagctgacgatggtgggataaaaggttgatcgagactcgatcggtcgatcgaccgtcgttcttgttgtcggagaagaccaagaagctcgttgacgggcaatcgagtctttggcttcggttcttttcgaggttcaagcgtcgttgatgctagagatttcgtcaaggaggccgctttggacttggctgatcctttggccatgtgagatgattagatcaggtcgagagagttgatccgatcttttgtcttgttttgttttagtagaagatgtttggaaagaagagatggtgagaaggggaaagagatggtggtgatggtggttggtcagtaggaagaagagaaaccatctgagatggacaccgttcgattcatcatcgttctcgtcctctatctgcacgtcaaacgcaactcatcctggagcacagagatgagtgcagaagcggcagttctgacaactgcctaaagtctaacctctggaagaagacccgagagggagaaacgacgacaaaggaagaacgcgattaactccaagacattctatctccctacaatctcaactgatggagaacacacaaaaaaaagcttacccggagactggaggcaagacggccaccaccgaaccctcgttaagcaacactgtatccacatcttcatctggcacgagttcctcgtcgacagcccatgttgaggtttccaataccttgccgagcttcgggaacttgatggccaggatgatcgacagctgagtgagtgaaaaccctgggtctgctgtagctgagtctacaactgcagggagagagacatccgttcgagaacatccagctgcatcctcggctgaagcaaaaaagagtacatggacagaacacatgatgacggcgaccaacaaagagggagtctggctttttttttcagctagcagatgatggatcagattcagctcgcgttgggtttcattctcattgtgttcagtcgagtctgtctgtggatgggtttgctcagcatcgtggattgctttcaagaagattgtgtcaagagagttcgttatcagctgatgtcactagtggttgtccttatgttctcccttctagttatcacaagagcgaatatggggttttaaagggggattgaatccagagtcaagccacaggcagaggaatccaagcttcgtccaccctctatccttcaaaaaagcccaacagcccgtccagcaactccgttatctccatacccatacggtccgcgttcgaggaaggttccggggggtttaagtccgaaaggtggtcgaccgaagagagacgattacagaggagagatgtttcagagagattggtttaaaagagttcgagaggagtccgaggcaggtaagctgaaggaagaggatgtcaagatcaggatttttgttcaagctggatatactttttgaaagaaaaaaagggagggaaaaaaggtacgaacctgcgagttgatcacttggatctagctctcatctttcttctcttctttctgagccttctcattcgcttcttgcgccattctacaggaggaaagaacaagagaacaattggtgagtttgatattcaaagcatggatgcatgcacaaaattgatcaagaccctttttcccctcttagtcgcacgaccctcgcctaaatcttcctctgtcctgtccaagcaagcttgacccaacggacaaaggtcgagaaagaacaagaccggcgactagaaaggaatcaaaggcctgtctgctcaacaaagcctactcactgtctctcatgttgggcgaatggtgatggaaaggagagaagagagaatccagccaactacatgaatttctttttctgcctgggcgtaaccctaacagtcacggtggccggttcagggccagtcggatggctgagtcccctgagtgctgtgtagacacacgtgatcaaaactgagattagattagatcagatcagatcagatcagatcagcttaaactacaccgctcttgtgtcgtctgtatgtagcccggctggtcaagtaccgttcgtcgatagccatctgttcatgtatcatacaggagctgaagcttcttctgtgtttttgtccagcagcacatggacggatcatgtcgagcgagtggagtgtcttatgttctttctgctaacctcggattatctgcagtgtgctgtcgttcttcgttccctttgatccatgaacagctttccgactgctgaccgctttcggttcggtgctcgttccagattcatccttgtgctcggagagtcgactataagatacgacccttgaaatttctctgttctcctcaactcctcaactccttctatccaatctctcttactacttggaagaatggtccttcacgccctcaccaaagcgtacgtctggcacaagatgaccatagaaatgattgcgcggctaaagtcaaggaaggcacttcaagagtcaagagaatggagggtaaggtgggaagagatggcatggatgaagaaacacctgacggcagatgaggcaaaagagagacaaaaggtaggacggcgattgaaatggcaactggtgagcctgcagatgaaggaaaataaagctaggcttggagctgaggtgaggtggttgaagtttagaagaatactaaaaaagactagatcaagacgcacaggtgagtagttgatccagctagctcaggccttcctgttccatcttctgaccaggtgtgacttccttcctttctgtcttctcatctagactagaaaagtaaccattctccctatataggtcgaaacctctataacggctctcaaccgattgtcccttgccctttcttcatcgactcaagaggctacctgcggcaaagattcttacagggtttctacaagttcttcacccccccctttctctctggaatcagttgttcagctcgaagtacatttgtcaataccttacgtcatgcatgttatcgatggccgcttgaacgaagcaaaaatggtcgcagtctcagattaacagaaagggcagagagaccaatattatgtgtaggtcattttggtggtcgcaggtctgacagaaagttcggaatggccagcactctgattacatatataagtagagcacgaatggcagagaagaaagtaatctatggtgacaacataaaggatacaactcagatggaacctcctacactctccatagtaaaaggagaggcggtcgggccatccaatatagcaagctcttctggcgtaaaaggaaggcgcggaatgatccatatcctgacaggaataagcaaggagatctatcgagcgtttttgatcagaatacgaagaaagtaaactgtttagtgacgttgttcttcgcaacgaagctcatcatacaggaaaaaagtgacgagatggtgggaacctactacgatagggaagccaatggctgcaatggtctgtgtgatggcctgatgagtttatcagaaagaaaggaagagcacacgatcagttctctctttgcctttgccctttcttcatttgtgagcgaacaggtgagctatgacgcgaaggaggtagactcacgaacgtcgctgcaaatccaatcagctcgagtgccaaccacatataaactcttgaaagccggacccgtcttaatggttcatctgtaggaatgagtgttctatcctgaatacagtataagatgagcgccgtcacacccgatcctgccagtgcccctgagcccatcaaccacttttgattaaaaagaggagatagaaaagaatcgtcaatcatctaaatgaggggcaatcgaattagagaggtagaaaaaacatacgaaaagaccggctagaactcctttgggtacccagtggagtaatttcaagaatggacctgtcatgagaacctagaaaaaggatgatcgcaaagagtcaagacctgttagaagtgaacaaacgcttaagaagcataacactctgaagaagagacaaaccagacaagctgagccttgcagcaagttcgatactctctgctcaaccacacccaccgatctttcctcctttcccttcctagcctcccctccaccgttggccttctccgcccctacgttcgtccccgaagccggatcaggaacgtctatcccgctctccacgtcatcggtgtcttcatcaacatctatcttcttttgacaaaagcccatgacaacgagtgactgagtatgcataggtgcttgagggattagaccgttcggcgctggaatcccaagtaggccagcaatgaacgtcgttattcctagcaggaagactttgatgtcagatgtgataaagaggtatctgattaggacatgttgtgcgcaaatcgataaggaataagagaagtataaatcgatgcctacaatcccaatggaagccgggaggcttcttcaaaggaaattcggagccctgagcgatcaacgaagagacgttatgatcaaatgcaaagagcttgatccatccaatatctcaagtcagcttcagcacacaggatacgagagttagcccctagagctagacgaggcgaaaggacggaccacaaacagaacgaatccaaaaggaaacgagaccccaacccactttccctctaacgaccagaatcgaaccaaccattgtcttccctcagccggcatgaacgccggttgaaagggtagcctcgtctcctccacgtcgattcctacatggaatctaccccagtaggcaagcccgctgcacgcgaccacagagattggcattccgtaatctgcgatgaaccgacggacgtgtcgatggaaatagggctgagtggacacaagattgaatacatgaccaaccacgagagtcaagatagcgagaatgatggagaggaaagaagacgaaagggggagaggaaattgacgagtgatgactgttcaagaagatgggtcagcagtcaaagggttaatcaagtcctttgttgtctaagtcttgcaattctcctcttacataccttgaactccgtattgaagatagacccaactgaatgattggattgaataaaatcagacacggcgatgagcgcgaagttgtaaaaacacgtaagagttgtaagagccatccaaagaactctgcatatcatacctaacgtagaacccaaatgtctcacagggataccgggtaacatatttcaaaaagttgcatcccccaaagacagcaaagacgatgtgcatgatagctgcccagaggtaagtccatctaagaaggagcgagaacggcagagacatgatcaaaatctgtgcgcggagtatggtataattctccgaggcaagtaagatttacccaataaagttgtgataatccggtccgctctccatcccattgaagatatcataaatgaccttgttaaatacagtaatcgggccttatccatccagttgttgcgcatcaagaaggaggtcaatcttctcagacaaccagaaaacacgtgtagtaagagacgagaacaaacctgttacccccaaaatacacaacggctgggcaccaaatatcgaaaaaacaaacgcagatatgaaggcttttcgagtagtatccgagcacaggcagaaaacaaacagatcagcgcttgatgtggtttagcatagcagaccaaagatcaaaacagagaaaaaccatcttactggagagcagcacctcgttgactccatatttcccggtcgtttctatcaaatctagactaaaagcaatacccggctagacaacgacaggcatccgaagcgaggatggggtaagtccgacagatcgaacgcgttagaaaggaaataccaagagaaagactgactaggacattggagaaaaagacaaaggcagtagctgggacgacccgatagttgtacgcgtccacccacttgcaggtccgaaggagaggacggagaaaccgaattggcaaggaaggaatcggtaagagtgaagtcaaagactatacagagagtcaagcgggtcatcgagaacacgcacgtctgacacataatatggacttctctgcagtcagtcatcaggcagatagcagattaaattaaatcctttattagcatcaaagcaggcaaacagaaagaaggtatggtaggccgtagaagatagagacctaccgatttcaagtcgttccacatccctctacctggataacccagccgcccgtaaagggatttcctggttcttctgccatccaacacatctccctctgcagcgcgttcgctcgaatagttagttatcctcgagtggacgacagacggtctatcggatgatctcctgatcatggctgtgtagaatgatgatcgaatggaattgggcgtagacgttctgggagctttttgttataggggctgaccgaagctatgactaaccgagattccttacccgccaacaaccaccaccaactcttctcttcgagtatacttctatcaagatgggaaaggcagctgctggaacaccgtaggttcaaactctctgtacttctattcgatcaggactgacttgtgtttgtctgtcgcgttttaaacgaaaatcactgaaaggaaacaagtcgcgaacgccatgaaggccaagggcctgggcagactcagatggtactgccaggtctgccagaagcaaatgagggatgacaacggattcaaatgccatatcgccactgaagctgtccgtataacttcatctttctgctaccttcacaagaggagagaagagtatggacttgatgggcctaaaactgattgcgtctcctttgggcttgtggcaaatgtgctctttagcatctccgacaaatgttggtcgttggagagaattctgggaagcacattgacgagttctctcagaatttcatggacgagttcattgttcttctatctcgtcggtttgtgttgtttctcttggtctctctgcctgtcttttcgcgttcaaacttctgatgtgtttccgccttcctccggcaatctttcgaatctgaatagatacaatactaagcgtattagagcgaatcaggtttatcaggaatatattcaggacaagcatcatgttcacatgaatgcaacaaaatgggttaccctgaccgactttgtcaagcacctcggaaaggaaggaatcgttcgggtcgacgagaccgagaaaggattctttattagctgggtggacaacagtccaggagcgttggccaggcaggtgcgtgtcgtttctttttgtctctctagaccgggaagcttggccagaaactctcttatctcaatttacgagaaagtagctcgccccagaagttcttacacacattatactctgaatctgatcacatctctaacaggaagctattatgaagaaagaacgccaagatacagacgatgaacaacgacaacgaaaactactggctgaacagatcgctcgggcgtctgcctccaactcgaattctgaagatcctaccgctagtgatggatctacagctgggccgaaagttgaggaaggcctgaaacgtcctgctgaaggagggaagattgcgttttcgttcggagcacccaaaccagtagctgctgctacaacctctgctgcatcatcgagctcacctgcaccaatctctcagctatcatcaacatccacaaccacttcaccaatgcccccgcctcctcctcccccactgtcaacgtcagctcctgtatcaaacccactcaagatgacgatcaacccgctcaagcgagcagcaccttctaccaatgtcttcaaggcttcttcatcatcttcatcatcttcatcctcgaagggaatagccaggccaatgagtgcgacagagaggttgat

SEQ ID NO: 1509 - DNA, 5810 bp, Xanthophyllomyces dendrorhous
gaggttgatcaaggaggacgaggagcggaagaaacgaatagctgagaacggaggtcggacgccgtttggaggagccaaacgggtcaggctctagagaaaaagactttctcttcttcaaaatctctggtcgattgttttgactctttactctgtccggtcttcgtctagatttcatctttatttttctctttccttttcaccggtctgttagcgtgcgctgcacaaacatagcacccacactcagagaactatactatgtatatatatgtgctcaacggtgtcccttctgtctcaacctctgttagctacattctgtcaagagtatgtgaacatacgcaagagaaaggatgttgatagctctgtcgtgggcgtggctgaggtttgctgagtcatccaatgttgccttagtcgttctttctctcgcactctttctctccctcggacggtcaaccatggatgagcatacaaaagcagatctttcccaggatctcgagtctttcaggtgggtctagctgcactgatcatcctggggttgtgtgttctttcgaactaatcgcttgaatatccagaaaacaatggcaagatgaggttgttcatcaccatcagcacgggaaccaacaatcgtccgctgttcaaccccgattgtctcctacgacacgaacagtaccgattcctccaccatcaacgtctacaccgacctcaccttccacccagaaagctattttgaaatcgcccgtaacatctccaaagtcaaagtcaaaaatcgtccctcctacgtctctttctggaagtgcccaattcaaacatcaccaaccgctcacttccactggaacactcaccccctcatctgaggcttctgcgctcgacgtgtatgcactcgccatcgatgccgaacgatcaggtcagcttggtccggccgttaagctttatcagcgtgctttccggatgaacgatcagatagacaagttgtaccagcgaactcaaagggagctcgcccttcagcatgagaactacccgacggcctcatccgatcctctcgatccgccgcctatcgtcgagccaacaggtgataatcggtccaaccacgaagctcaggatccagtgggttcattggtgtttgatttcaagactcacttccagctaggtccagactatgttccagccgaacaagccgtatcctcttcatcggcgtcaccagtgtacgcctcgatcgcagacgaacacccaacatttgttcaggcggaggaaacagagccatacgcttggggggttcttccagaggagatcgtcatatacatattgaccatcatgatggaatctggtgattggaaaacggtctccgcgttcgaaagagtttgtcgaaaggccttcttgttgggaagagagcaaagcgtttggaagtatgtatccctagttcttctcactgctcttctctgggtcatcaatatgttcagttcgtgcccaacttaccgagtcgatcttcttctctcctctgtctacaacagaaaaatttgcgcgctcacgtttgtgccgccccagatagaacgacatataagtttacaagcgttggtcaaaccgtatcattttaattaccgagagacgtttataaatcaccctcgagtccgaatggacgggctgtacatatctgtcgtccactgttcgtcattttttctctatctcactctctcttgtcttcgtagtctactagataggctgcagctcaatcgaatgatactatggatatggggcttatgatagatcatagacagggtatcactgagaattcgtggtacgacgaagttcataccggtatgttctcccttcttctaaacgtgttctagccagagaagaccaagctgatcgcattttccactgtgtgtgtgtgtgtttcctatctgccagtcacctatcatcgacttattcgattttatgcggacggaacggtaatctccctgctttccaccgaacagtatgttgactcttctccttcttcttattcattcacgggtggccactcatctatttgtcctttatccatcctgtctgtatacgctttgaatgtagcccttcaacgctagttcccttgttgaatagatcacttcggatgaaaggtcttcatcatggcaattggtctctgacctcctttgaaccgtctcaccacaagaaccaagttcatcttcctggagcacccagagtagtcttgaccgggctagttgatccagggctgatggagggcaggatgaagaagggaaacaaatacgagttcgagatggatctagggctgagatgtacacagcttgggaggttcgccatgcttctctctgtctcttttatccgttctcagctctcttggagcatatctcaacttatcaatctctctgtctttcttcaacggatcacaaaatgacgaaaacggttaactgtggaaacaaagatggaacaaattagacctacacacttatttctccaacaatcttctgacgggcgaggttattcctattggcatggccgttcagaaaccgttctacttctcaaagtatgtattttacgcttcttttcttctgtctgaaatcttgcatttcagtcgagcggtcatgcagttcatagaagaaagaaggaaaagagagactgaccagatgatttgcctttctccatatgatcgattctcctccaccagagtcaaatcctggcctccattcggctaagaattcagctctgaaacatcttggtactttagtcatattcctagattcctctcttgcttctcaagtcccagttgctctccatctcctctaaatcacactatatcatcatcctcctggacacagttctttcctttttctcttatcttgtctgtctttgttttcagatctttatattcgaatcttatatattcaactgcatcactttgcttcaatatatattgcacgtacatttatgttcaatacacttagctctttttgtctctttgatgttattcatggaacaaaaatgaacaaatcatgaaccgcttagaggtgtctccatttaggagagaaaacatagcataagatcaggatagacatggttggaaccggatgtgactgcatatacatatggaggggtatctctgttcttacagcacggatggtggaatgattcacacgactgaacgttcttcctatccgactggaaaagcagaaagaaacgaacgacgaagaagatcttgaatggagaaggggaatgaaatgaaagagaataaaaatggaaaaagaagatatgaacaggataaatacaaatggcctggatcggggtgatttgggctcatatgtcatagcatactcgagctcctacccatgcaaatgggtaattatgtctgagtagcacccaaggcgatataaacaaatcgtctgtcagccttgagagataacataggatatgaaaatgtgtggattaaactgactgataaaagtttcgaacggttcgacgacctgcgaagtaagggagggtaacgaaggatcctcccaactgatccgcgctcgacgtcaaacgaattgagacagaactacgagtcagctttcatcatgcggttgattagtcaattaatcaataaatggactcacgacgacatgatggacctcatcgaagaaatccgagctgtaccctgggtagagctccgatgggacatagcccccaccaacaacttgttgggctgggtgccctttcataggtgttgatgtccattcccagacacctccattatggcctggaatagtcaaacctgtcgagtctgtgtacgacatttcggctctgatggtgaagaaagagagagagagatatcacaacagttcagaacgagtggaaaatcaggaaccgagggaaaagaagaggcaacagaaaggtcttctcacggaacaggatgccagttcttcaatccggtgttactgccttcccaatcagtcctgtctccctctggaaatttatctagccaaactctgagttcagcctcggtgggtaacctgccgcctcttgatttggcaaaagcgagatgctcgtcgtacgacgccatcagtggccagtgttgagcgattgcaaaggataccgggccatacaccgtctttaccttccattctccgtcggtgtcgatccaactctttggaatccttccactagcgtcatcgccgccaaactcttgcttcaagaaagatctatactccccgttggtgatcccttttcgttcaattcggaaagcgccaacgttgatggtatgtaccccgttctcgttgtcccacccgaaaacatgatctctccagctgtcttgatcgcggtactttccatcttcttcctcgagatctttgtggccgagggtgatctctgtggcagggatattagctatagtcgagtgttgagcgtctcgttcatgttgggcgtcccataatcgggcgagagtgctaaaggaaggagaggcgaagccaggagggggaagcgtcttgggagattgaatgagcatgtagagcagcgtttcggcgtgcatgacttcgtgttcgtctaaagagagagagagcatgcgcgcacgaggaagaggagtgaacctgtcatcagctagccattcacatatcaaaaacaactactcaaacacacttcgaaagtaacgagaaagagaacacgtacaagtcatctaaaaatcgtgtgaaaagacgtagataaagagccacgatgaacaaagctgtgaaatggagacagacatgcgaggagtatactatgagactcacaaagatgattcgaccgagcctcctgtccatctgtcgctttccagattgacagtcctcatagattttgatcaaccgttctctcactcggtttctaaattgcagaatatcctccaacgaaggccaatcttcgtctttctcaggtacgatcgaatgggactgcagtaagggatatatcagccggtcgagccattgccgtaatctcttggttcgtcatcaagtttcatgagaagaaatgtgatgtacaaaaacgagggacatacatgacactgctcggggtcatccacatttggatcgatgcctcgctcgaatagatccttgtaatactctggctctgagtgaggttccttcaagtgtcgggagagaaatatatccaagaaggtcggtatatggcctaaatagaacagacctgtattggttttttttaaggaggaagcggaatcgatgtggtaagaaacagaaataccagaaagaatataggattaacgaacacttgtgtctcaagtcaattggcttttcatgcagcacctcctctctaatcatcccgatggttatgagatcccagaacctccacagatcttcccaatcgtcgaccgtcgggattcctgggagaccttttccatccggttggcccaaactggtctgtcctccagattcagacttgagtaggatgcggttggtcggagaaaacgttacgacaggtcgttcgagcacccagaggttgtatcttccttgagagtctgggaatcgagtgattggtcgaaggccagctgaagcaaatactgataaagcctcggtaagagagtacttttcatcattgatgagcaatatgtgaagtaaaagatgagaggtcagaccctggacgaataggaaggtataaacggagtgaccccaactttgtagctccattcgatgttgacaagctcgccagcatcgaactgaacgctcatgcggtcgccttccttcgacgcaggaatcgtgatcgtttgagctatgttggatcgaaagtaagcttcgtggcggcctgtatatataattgttaggagcgaattagtactcgtc

SEQ ID NO: 1510 - DNA, 10204 bp, Xanthophyllomyces dendrorhous
gcgaattagtactcgtcttttcgaatcagcttgagaacaaatcgttttgaagtgacgagcgcgcacctttcgggacattgtaccgtccttcatacgtccaggagtctttcattcttccgggtcctttccatccaatctcccgctcgacaccctaccaatggtataaaaagaggagaacacgcatcagttctagacaacttgacagaacaattcaagacaggaaatactaagaatgagataaaaactcaggaggctcacactccacatattttcagcccaggctctggtaacaccctctggatcattgtaagccctctcgaccacctctttctcatttcttccatctagaccgacaaccaacctgtctccgctacccggtcgaagcggaatggaccgaaggaactcgatggctccttctctgtcaaagttgcctaaactagagcccaaaaacagataatggattggttctccatatgtatttgaattgaccggattagaatttgaggttgaatccatagagtcggccaaatgaccgccttgttggatccactggagaccgacatcatacgttccacacactcctccggttgtcacatttccctgggccatgattggacccagtgaagactcgtcaagagaggaaagcgttcggtctagttcggcctggtccaggtctagtgcaaagtacttgacctcggatttttctccatgagagcgctcggccagggctttaagaaaatgactattaaaaaaagccgtaattaaaatcggtgcatggtgcagggaaagtcaggtaggcgtaaatcaattgagacggaggtgatctaatatatataaaagagttttgagcctgcttaggaagtacctggttttggaaagactacctgctccgagctctaggacgacgccgcctagcatattttttgattttcgcccgtccttctggccgttaacgtgcccgttgacacctccgttatggactccgacatccgctgacccccaatctgcaactctccatctctttaccgggccttttctgagcggatagggatctttacgattcttctccggctcttttttctgttcttcagctgtgtttggaaagagcaatgagacaatctctctggaatgcgccttgagaagggataattccactgggtagagatagtaggaagggcagtcggtcgtgatcctgaccaggatgagcgcagaatacatataaatggccatgccagaggaaaagcaagaatgaagatatatcgtgagacatcaggtgtccttcctatacaagtctggatcaagtttgaacgggaacataaaaatacacacttttcatagagcttgaggccgacatcgtcataaaacaacattgtcggcagactcctcctgtatctatacccgtcttccaccgagcatccaacgctatgtccgtgattctctccatccgaattgacccactgggttcctccgaggccgtttcgaatttgagcgagcaacgatttggacggcggcgaacgatctctcaggtcatgaattcggtctagaacggaccgttgctgggatgatgatgataatagaaccatgttgcttctgttgttcgtttcaaaatttgttcagagatattgatgaggacgttgttgttaacgatgatgatgagaaggatgaaggcttcttaacgtgtttccttaccgaaaatgaaatgtgtgatgtgatgatcgaaacagcagacgggtcagttgatgaggtcggtcaggcacacgcgtggtcaggcacattcatgcatacgttcgcccggtcatgtactcgagcccgggcaccgtcagggacgctcaggaacgttctatccgcagcaatcaccgtcaaggtccgatcgaggtcgaatgtgtatgaatcatgacgtggctacaaggcactctattaaccctaactgtaactccgccttcgtacatctctgttggtattccatctcctaatactaagctgcatagaggagaattggactccattgaagatagacccgcacgaccttcgcaaactcacatatactcacatatactcacatatactaacccaatgagtgctatcgaagcaatcaaaaaacaatccgagtacgagcttatctactggcctgggattcctggaaggtaaactttcctagatctttgaaccattcttggttgataagaacacaagccctgattgtctggtttcaattaaaaaaaacacctctaatgcacttgaaaagaggagagcccgtccggttagcattcgagcaggctggagtggcctacaaagatgtcgcattagaggaggaatgtatggagagattgacgcacatatgctctccatcatatcaacctcctcgtatgttttatgtatccttcgatctttccgtcttccaacctgcccggagaaagatctacactgatgacgcgctcatggttctgtacatcatccagcggacaccttgccgccgtttgcaccgccgatcctggagcatgacggtctcgtcttgtcccagttgccaaacattatgttttaccttggtcccaaacttggactggcccctttagatgaaacagctagattgaaaatcaatcaggtgtttctcactatatgtgatgcacagaacgagacgcatgatacccagttcgttccgtctctattctaccacattcgtccgtctttcatcgagctgattcttctccattgcttgatctcggatccgaaaataattgttggaacgaaaacaatgcaaaaaaagccatcctatagcagtgtcggattactatgagaatcagaaagaagaatcgctccgccgatctatcgatttcagacgaaataggatcccaaagttcttatcgtatgtttctccttccttgtcactgcctggggaccctgaagaacgagagaaggagagaaagggcatgttgcctgacgatgtctgactatattttactcccttccggataacaggtactttgaacgactgatcccagacgaatcgacaccccacgtcgtcggctcagacctcacatacgcagatctaggactgatgcatcttatcgacggtctcctctttgcgttccctaacgccatgtccgtccgactcaagtcttatccgaaattgaagaacctctacgaacagacaaaaggcttggaaaggatcgaaaggtacatgaagagtgaaagacgagtcgagtttggaatggggctatatcggagatatccagagttggatatcgaagatgatatcgagcaggctcagcagaaggaataagagcatgatgggtcgggttaagtctaccacaaactggtatgattcgaatttgcccttcatcatgtcgattctttctattgtcgcccttttctcttacatatcctcccagctaacttcgcagtcgtgatcgaattctcatttttctgttctatccttttgcctgatagcatgccgttttgtgttcctccttcttagcttagaaatcctaaggaaaagaagaaagagagagcaagagagaaaaagaacaatccttcaaacgagcatgaatcgagaccgcaagccacaaatcttcctgggtttacttagagtagctccagacgttcttgagcactaaaatttcataaagaataagcgaaaacacaaggcgggagacacgtcagttctcgatcgactcgacaaagagttccggcctcgagagaggagggaagaagacaaggaaatggaaaaaatcgagaacgtacaaccggccttggtggcaagtcggttgatggagtcatcagcctcagcctgggatcggacctgtccgacaagagcgatggtggttcctccggtcttgatggcctttccctcgttgtcaacatcaacgatggtgatctggatggaagcgtggtccttggcgttgataagtcggcctgcaagagaaagagaaatcagcctatttctccaatggaaggttgatggaggagaccatgacagaaaggacgaaccagtggcagagcactttcgggggacgtaaaggtcaacgaggacaccctattgatttaggaaacacgtattcgaatcgacaatggaaagaagaatgataaaaaactatgatcagtcagccaaccgaaccttctatgatatttgaattatatgtttcttttgttgggtaggacagtctgaagagggcatgggtagcagaagaaaccctgagaagaggtaatggaacgattgaaaaatccagagatctcaagaagcggcaagagagtgaggatattcggctgtcggttattcttgtcttcgatcctctacacagactgacaatgtcttcagacacctaggtcttgtatcgaacacacacttcctttcttctgtactccttccatctcctcttcaaagacctctgtcctacagatcttcgtggtcccctgtccagacacctccaagaccggctttttccagcgggaaaataaagatagaatataaagagctaccaacctggtcgttctccattttgatcgatgtaaaggaaaaagggaaggtaaaaggggaaaggttggaagctgtgagaggaaggtttccgggtgttttgaaagatttcacaaggatgtttttttttgggttcgccgagaagggaagagttcagggtgaatccgttcgcagacgttggaatatgatgagacgattacgatcagggaaaggagagaggtccgaattttttcatccagaggtgaatcgtttccccaaagtcccatccacagccaaatccacacgacacacattccacagattccaatgtagagaacggacgaaaatgccattaaaaaatcacaaaaaaaagagtcaaagactgtcagtatatgctcaacataacaacgcatttctcctcatcaatcatcaagaaagccgaaattaaccaaggaaaagaaaagacacgcacacgctttgacgagagaagtaaaaaaaagaaaaaaaggagtcccttcacaggagggaaacggacgcacagagcatgcgaaaaaatttgcgccagggccagtttggtgagaatcacgtgtctcaacttatgtagcgaagagatttccctatcagggcactttaattgttctatgttttctgtattccttctctattaacctttcctctatcggctctaatgaatgacccttcatcttccttggtcctgtgctttgtctgctattgatcttctctgatgatatctctatatgttcttctgtcaacttgctccatcgccacatttcggtcttctcggtcactcgttatctcttctttgtccttccggacgtgttgtttcttgttcccgacgtctacttcagaaatcggagccaggtgattgagagtgagttttgacgcaactaagggcgcgtcaatcgcttctcatctccgaggcacatcccctcgccatcagaaagcagctcaaacctatagcgtttaaggaccatgagttctgtttctcgcgaagggtttggcgaggaagacaaacggatgaagacagaaaaaaagaaaacctgtaaataaatagagtagagagtgatctggacacgaggaaactacaggacagagataattgatcaagctaagatgaagaaccatatgatctgtttgtactaataacatatctacatgtcacaaagatgactttgaacgtgtactgaacagaaagagtgctctgtgattcatctttgtagacggactagaccatcttcataatccaacattagactccttcctaatacaacactataacccgtgtctaatacgaagttgctgcgtacagtgtgttccattaatcgagcacactcctcctcctccgatcgaacgcccaaccgttcctgacccgttcccgtcagcaagcactcagggccgatcgagactgacaggatttttgatcccttaccttgacttccacgttgacaactcttctttcccatctctcatccatctcatccaccaatccactaggtagataaggccatgtccgggttcgaatcaagtccaaaggacgacgatgacgaggaagacgaggtcgaggtagcacagacagctactactcctggttcggtggagacatcacccttgctctcatctcactcaaccaatcctacttatgcgtctacttctgtttcatcggcccatccaccacctgttcttccgtcgcccaacttgcagactgtcaaccgatcctcattccggtccagacttccatacatctggacggtcctcgccgtcatgttctatctctcttttaccgccatcatgtcctcctcgctcttcaccctacttctcgcgtcctccttcagacctgcgctctccgataaagaaactcttcaaaattccgttgtcgtcagtggtccaagagatatcaagctcctcaatgtctcccaggacggcacgatgtggttcgagatggagatcggcctcggggtcgataccgatcgtgctctcggcttcaatcaccacgatgagagaggtatctggtgggaacgaacgaggagaacctgggcaagacgcgccgtcggttcgtagttctatcaaggtctcttacttcttttcatgttcagcgcatctattgacagacgacgtccaacatcctatccaacaaatatttagactcaatcaataaggtttctgtcgcgttgacatccccgatcagaatccagacggcagatcaccacccccttgtgacggttacccccgatccgacgcctctgcttgtccccttaacatcctctctacaaaagtcggctgaatcttcatcgaatttgtccggccaacaacccaagtatccaaaatggctcacaactttcaccgttcggtcagcagttagcatggatgcatcgccagaggtgcttttgagcttcttgaaacagacatggaacgacaaaaaagttgacatcgtggcacgtctacccgacgacgccgttacgatcgctggtgttggggattggctgggtcggttcacgattacgccagacttggtcaaagaaggaatggatgtcatgaacgttagcatgcctcgtgagtacccttcgggttcctatctttgcaatcttcaaacggtcgaccttattctccggattaagacctcgggacaatgccagaggtaggttaatctactctcggtctgtttcgacttgtcggatcgataaaaatcatactgtgagaatgcgcgttgacaacaagaatacctcttttctccatcagttccagaactaccttttccaatgtcaattccgttgccctctttctgaaacatctgcttcctttctctcactttgtgggcggtagttcctccgattcgaaatcttccgtcaccgttaccagaaaacctgacagacttgatccacatggaagactacgttgtgtacccatctaacgaatccacttctcgtcttctcctcgacgccgggtcgaccattcctaatgtttttaccgacatcaccgcctactttcccttccgctttgctttcagcgccggcgtcgtcttacctaacaatgagcttcccgataatgtgattgctcatgtccgaagcttaccggtcgagatcaatccttcgttccgtcgaatcgctatgaatgcgtctggcgagatcgtcgcggatccaaagccagctgatggatctccctcggctctctcgaggtttatccaagcatacttgatcaacgaaccctactcacttttactccgtccattacgttcgcctggagttcctaaacctatttgggatgtcgttgcagcacttccacccctcgtcatgccgatccccaagatggatgaaccattaaagctgatgagatccgttagaatcgaagggatgaagattaacccaacaggcaagatcgtgttggctactggtacggtcaagaccgagatctttgtacccggagtcttgggtgatgtagatgacgggctagatgttcaaggagttttacctgaggtcttgatcttcaacgggcctgtaccggatgatgacgatgacgatgatgacgacaatgcccaagccttcagtacttggggagcggacaaatacatcaggagcgatcaggcaagaacgcttgcaggcgaccgaccgcttccagatccgttgcctaaaggtgtatttggtcggctcttaccggacgatcatctaccgtcgacctcggagaagcacccgactgagcctagggtgctgatcgtcacgtctcccttcaaggacgctcctgtagagattctagatagtgctcagcttcgtagtttcgttgctaaggtatatttactctcttctccctcatgagggcaatatctcgattagactaacgttctgactcggcggttgtgcatgatccagcttattttcaaaggcggagcattagcaggtggtgagtagagtttcaattgtcgtttgtgcgatatacttctcgatcataatattgattcaatatatgctcgatctacagtcaaaggaacgtgtgattgcaggacgctcatcaaaggccttggatctgacgtggtcgaaatcaatggaatcccattccagggcgaagtatacatgggtcgtcattaaaaaggttgtcccgttatccttctgccaagctttgctctctttcttttctttctcacctcttctggctttcaaaacatgttgtgtgtatcctctttatcatcattccgtcggttatcattctttttatcctcttctctagaggaatcttttctttctttcttctctttcttgacttctcgcatcagcacacgtcagttttccttgctcaagagtttgattttacgaccgactgtcgccgctgtacaaccgttgtatctctcagagcatactctcgcactctcgcactctatactctttgtagtcaaattatgcatatatgtgatcttctttattttgtttggcaaaactcataattgcagacgagaaatcgtgacgccagataagataaagaatgaaaagaagacccgagacctctgctgttttataacccacaacgatcatcaaccctcaactctcagcacattgtatatctacaattacatcaatatctacataatcgaaggaaaagaagtgttcaaaagcacaacgagtcggctgtactaaaagggaagaaaaaaggatggctactcagttcatgacatctagtctagcaggtttcggactggtttgttctcctccctctcttcttcttcctttgtgtttgaaccgacttgaagctcactcgatatcattgtctcatcttcatggtgtctataaattggaatcgaaactctgggctctacggattcgggggagaaacaggtcgcgatggcttattattcaatctcaagtgaaatgcggaaagaggcagaatcaatatctttctcgttcgttctgatctgtccttccgtctactttctgttctcatcttctgtccttctcttggagtttgctgtgctgaatcctggctcgattcgtgtcctggtgtgtcttcctctttgttcctggttattcggtcttggggcttgtttggaaaagacttgcccagacctcacatttgatcaacaacccccctactccatcgtctatcctcctgaatacaacgatccctgcttcggagagatatgacctcttaccactaagtgcgcatatcaaagctcgctggaacgaggatttggagagtttggttaagggtttgattaaggggttctaaaaggaagaagagtaaggcgtattttttcttgggggagggggtttcgatgggtggaaagtaaaacgatctcctttcctcatcttgatctgtttctctctgccgaaggtggaacgatagtgaatcgcagaaagaaacaaaaagtacactcaaagttgcacatatcacgtcgaaaaaatctgatggttcttcccgccatatcggagctacgtcttgtgaggtttcgtcgttcaacacgaatcgagtcaaactgagacaacgcaagaaagatagaaaagaatctgtcgagtcgttgtctgctttgtggtaaagcaaataaggaccagaagggtagcatcatgttcgggttattctacgcctgatctctatttgctaaatgatccagcagccggtcccgttcatcttgttggtcgattagattgaagcaacccagaacttttctaaaagctcgagattcggggaaggaacacaaaaaagagcatagatacaagaagcatgagattgatcaacaacgtgaagaagagacaa

SEQ ID NO: 1511 - DNA, 8771 bp, Xanthophyllomyces dendrorhous
gtcctctacgacaccctttttgttgaaaattccatctccttttttgaaccgaagcgacttgtatccaatctcgatcaagtaattgtccctatatcgttattgatattcaatcagtgaactagatgacttgggttcgatcaatggaaaaataaactgacgaaagacgtccctcggcattccaagactcgaaaatatcggcaatctcatcattactgaggccggcttgatgtcgaagcaacgaccagatctcacatagaatcgaaagttgggcgtgttctaaacagatttttccgcgcgcgtggggtcagtctcgagaagaatcgggcaatgcgctcatgaaaaaaagaaggaagcacacctattccattatggatctacataataaagtcgccaaacactaccagcacgtcagatcgagatacaccataccagaaagaagctcacagcatcaggacgtaccatcttgacataatttccagagccgcccgggccgagataagcaacacagggctttccatctttgtccttcgcagcccatttggcgagtagatgttccaccttatcatacgcttccttgtctccaccggcggacatcgaaggacctctccttgccgcttggtctatgaaggggtttgccaacaggagacacacgtaagcaacaggtttcgggttgaaagcatgaagaaaagaacttacagccaccactgactccgcaaccaatgtagtgaatacccttctcggccgcttcccctaatcgtctgttcgtatcttcgtaccattcgtttccacagtcaatgatgatatcacctttatccatctttggtaggaggtcggataggacgtcgtccactggtttaccgtggggaagagaaaacacgatgatccgtggttcgttgggcttaaacgccttcaagagcttctctactcacaaacgaacacccaaacgcattagaaactccagagataaatgtcattcgagactttcttcggagaccaaaaagtaagcttgacttgaggagcgtacgaaccggcagaggaaaacccatgaacatgttccgcagggacgtcatcctcatctctcgctcgcttcagaagcgcttcagcttgttctttatcgtaatcaaagaatcctactacgctctagaagagtctcaaaagacgtagaacaatcgcggcaaacggtcatcagtctgtgcaagcacatatccagcgtaaagatcgaacaaacagaggacagcgaaaagaaggagaagagagaaggaagaacaacagagagaccaatcatacgtttgatgaagcaggagaagagaacaacaaggtcattcctccacccatagaaccacctccaataattcctacttctacatctttgatctgttcgttgtcgtaatctgccattgtaatgtgatcaatatatctatcgtgtgtccggatgagcaaagaagagaggatgtgagagagtgaggtgatagaagactgagacaaatcggagaagatgagagaagtacgtatgctatatatgatcactccgatgtatgctgatggaacagtcggcaggtataatgtgattgcggcatatacgaatctcgttgtggcaaaaacatgacgtcagcttgcccgcacgtgttggcacagacacatccatagtatacgatattaatgtctagactgagaacgacagaacccggcaacaaagatggcaagagaacaaaacagaagagcaagcaaagatggaaggagatggtatctagaagagaagagatataagacagaaaggcttgtagaggacagaaagaacacctatggctgggcgaccgtgaacacgggagacaaccaagattctggaatcacacaagagccgaagaagctcggtcagtttgttttcccttgtcgttagagatataacaaggacataccataatcttcattcttagtggcatccccgaagaacttgagagctcggacgagaatcttgtatgaaccgttagggactttgttcttttttttttttttttgcaatcgaaagttcagtttcaagcgagcgcgagcgttgagtgcgatgtttcccttttgatcaaccaagagcgatgatgactaacaatatttctggatgaatcaacccaagtgaatccgttagagtcagacgtgagatcgagtagataatctatgaggaagcggggaatgccaaaacacagcgaaggaagggtaagtcagagacggaataaaatagaaagggtatcatccgaagaaagacgtacatccttcgtagttctccgtagagtcagggatatttcgataattataagtgtactaaatcatttcacgcaaagagaaggggagtgaaataagagacggttccattcttctgactgttcgaccccttcatccacgctcatatctgcatatgaaagaatgtacttggatcaagctgccaagagattctggcgcaacgggtacggtcacaccatagcttaattcaccctcactccgtcgattgattgatgaagtgaaattcgtgtcggctgcgacaaggtctacgaccaggctaggtgttccaccgagaagtcttttcatttatttaaaattcattcaagaaaacgacatcggtcaggcctgaatgttgcctggctggttttaagcgacgccgaagaaaactcaccgaacggccaaaaggggaacgtctgtttcgcacgaggcatgaaaagaagaggaagacggaatgtttatgatcaaaaactctgttcaatgcagaatagcaaaactgcagctcttaacaaggaacggaccgttcccgacaaaggtgtaagcagggtggtcctctgtatgaacgctaccgtctttatcaaatacgacaggcaaggaaacattgaagtagaaatccgaaatgttttttattgtttttattaaacccagaggtccggaagaaaatgaaaagacttcatgtcagattggtagactgaagggcgatcagaacacaaatacgaaacaaaatggacttgcgtatctaagatggggtaatcattgtacatcgcaccggcgactcctgcgtatagaatctggagggtttggtcgtctgattgtacccgaatgtagccctattattttgattcgtatccaagaatgtcagcgagacacagaaaactccgaagaaagagcatacatgaactggagagaacacccacagaatagattggaacgctcttcccattcagaaccggagcttcgaatccaacagtgacttgaccggcctcaccggccttgatagtgatggactgaacgttaaaccagacagttgccccatcgttggtgacaggtacatcgaggttaggttgactatcaccctgtttagcgccattcaaaagagaatccagcaaaaagaagatagggtcagaaaaggagtaaacaacgcccgcgcgggtgtgtatatgcgcgagtctatctgagtatccttgaaacatgacatacatcagtgaaagtataaacggtctgagcaggaacatgcgagatttgataagtcaccgcgtttggtcccttattagtgatcgtgaaatttgcgttcgtgatcggtcggtcggtatcgttcaacgcgaactctgagacggagagaacggtctggtagtgaacggcggcgtaggcgtcgatcaagcctccgccttgttgaacgacggtgtgaatctcggtggtgtccagactcgagggaagtggtctggcgtgcgtctcaaaaatcgatttaatcgtctttggtttagaccgaccatttttactgatgaacaaagctgccacgccagagactgcaacaaagataggtaaaaggtggggatgagattcgaggcacctgctttacgaggagaaagaccagggagcaaaagaccaatcgatataaaactaactgtaaggagtagacatcgaggttccactaccaacggtatagcctcccaaagcaagcggataggtcgagaggatcttcccaccaggcgcgcctacagaaggtttgacgtacagatcattcgtcaacccgtaggcttacgagcgaccaaaaagatgggaatgaaccaagatagaatccggtttagactgaacccaaaacaatcgaaaaggagcgaacgtgctcgacggaaacgcactggtaaagtaagagaccaagccaccggtcaaatcgtttgggaactcaacgtaaccctcggggaaagagattttgattgtcggatcgttcacatacgcagcgacgatagccagcccgtcggccatcgcaatggccgcaccggtgtagttgactgttggaattccggtaagccgggtgatcggtgattcatcattgttgtagatcaacatgatggatcctcctgcctcttgaacattctcggctttgacagcgtacgtgcatgaaccccgtttgataacagctactttgccagtgagagatgtgttaaaaggataacagccgtcgtcgatgatagaagtatcggtgttcgagataaagagtggggaactgatcgtcggatcaactttaaccgagccgactagagaaatggatgggtatctctcgggagaaatcagctcagccgatttagaaggagtgacgatgctgtatattgcagacacataggctctgtcaactcgccgggttcctcttaagacgaaggcgagagaacactgaggaagatcagactcaacttgtcaaacgaggcgacagagatcacatcgattccagacgaaggagccgacgagcttatgaaagagagccaaaagcgaagcggatcagaattcaagtctttgatgatatgagatggaaagaagaagctcactagaacagaccctcggtaccgtcgtttccagcggcaatactcatcacgattccacgctttgcgatcctggcggccaacacagattcaggatcggtcgtccaaccggcaggacctcccaacgacatttgaatgatatcagatttctgttgaaagagattcggagattatcactcagtcgatcgatacaatagtcacttttgcgctcaatgggcaacccagacaaacctcctcggcagctcggatcatagcggccatgacaacatcacttttttgaataaagaaaaagaagacgatcgtggagagatagaacagaaagtcagcataaaacccaacaacatatacccactcagacagacacaaacgaacttttgagaacctccttcgcatccgaatactctgtagatccttaacgttgcttcaggcgcaacaccggtgctgaagagcgcacaatggagaataagtgaaccgtcccactgacaagcgacttatgaaaacagaaggttcaagaaagagtggatcccacaagtttaacgggtttgcattggctccaatgattccagccacttttgaatgaagagaaaaacgaggcgtttcacgcgttaggaacaagctcaagaataatcacgaatagcaagcttgaatgtaccatgggttccgtgaccgccacagtccatcggatcgtttccggacacaggctcatttctgcagtgaaaaattgatggtcaggaccgataccgaccatgaaacaagtcgaccgtgttaagaagggaagaaaaaactgacgatccatcataatcatctccgacctgaacaaagaaaagttcagaggtaaatcgtagaacaagagacacgataaaccgtcagcagtagctcgacactcacgaaatcaaagcctccctctactttgcaacctggtccgaaacaaccaccgagcgcaggatgattataatcgatgcctgagtcgatttctgcgattacaacgcccttgccaaggataccttcagcatgaagcctatctaccccagtcatcatatgggttgagctagaacaatgtacatgaaatatagaggtttcatttgacttattcaggatccgacagatcgtgaggcacaagaggggaaaaaaggtaatagacgaggtcttactaagagtctgtcgcgggctgtccgtcgagatttcggcgcgttccactgaggacatcattctgtccttggaacaatctcggtctggggaccttccgaactctataagcattgatgactccagggaatgatttgatgatcgcttcgttctaagcaaacagagtgagaagaggcaatagatatgagctgatagaataagacgaggagactaagcattggataagaaagagagaccgcacggcatcgtcgacgttgatggaagctccgacaaagaggtcggtggtatcataggtgtgaacgacatcataaggaatcccggatttcctcatgttttctcgaaagtgatcatgcgggttctgaaggtagggaaacgggatatcttgggtgagcggacaaagagaagaccgaagagaagacaagacgagtagtacacgcacaactgttcgttttctggtcttgggagcaaactcaacgatccacttgtgaggcacgtagccatccttcgaaggcgacaaacggatgatgacaataaaccagcaaccgagggtgagcacaagagtcagacgtataaagaagagagaatgaacaaaccgtgacagctttgtgtaaaagctgagagctatctacaaccttggccgagacaacggagagcgcacctgagaggaccagggctgcgagggtataaaggttcttcatgagaaaaactagacaatgcgaggagaaaaacggccgagagagaagaccagcgagcttaaaaagggagggaagtcccaagcatggagagcccataggaaaaaagaaagaaagaaaaattaagcagagaatcaggtagcagacggtctatcattgaaccccatgaaagggctgcaacgtgagtgtggggaaagcaaaaatgagccatgggatgtgtgccgatgtgggtgtaagcatgccacgctgagtatcatgttgagtgtgcgtccaacagaaagtacactatagagcgcttgtgctgtgttcccaattggcttccctctggtcagtgttctctcctttgcaatctttctcgcccggatcaacatcgtcaaagggagctgatgaaataaaagtgtgggtgtgagtttgaaatctgagtacaaatgtgggtgaacggtatacgagggtgtgtttatccgggaatgtctgtatgttctgtatgttctgtatgttctgtatgttctgtatgttctgtatgttctgtatgttctgtatggatgctgtatccgctgtgcgagtgctcgtttcagatcatcctcctcccatcagaaatgccgagagaatttgagagatagatacattgtgagggacacacctcgtggatagcttgcccatcaacagacgctaagagggaacagaacatgtgctgccattagatcgtctatctgcccttcgctcattagtatcctccttgtccattcccacatgggctgcccttggatttgggttttggctacacatccgctcacactttgtactcgtctgatcatcggttggagttctgtctctttcctttctttgtgctatctaccatacagtgtacggaggaaagcccttctgatagcatgtttccgtctttcatactcttcttcatgcactctctcgctgagcattaatatcttgatcacattcatatctcatacggagatctcacatctatcgagggttccactaaagtacatacacatatatgtttgtttgtccctccgtctcttcagagctgacctaacgcagcaagcgtcttgagatcgggcacaacacccttttctataaagtagtcaacaatcggccggttcttgaacttgaccgctaccgagactgtatccgtccgagcgagtttgacaaggagtggtcgtattcaaagaattgtgatctgtccgtcagcctggtgctcacgtagagatagacaagagaagcacaagaacacttacgcatcttgctcgtcactttcgtcctgtcctctgtccgcctccgtttagcgtttcccccgtcccgacctctggccgagtctcccccggactgacactcgatcaacatcttgaccagcccaagatccttcttccccaccgcgagctggacggcatacccatcgttcaggcctggactcgctcctctagctagtagtagctccgtcagcggaagagaaaccggatggttcgtgatcgaggcgcatagagggtaacccttatgggaggatggtgaaggggagtaggtctcgaacaggtagttcagaaacggaagtaatgtcggaggaagaacccgacgggtcggagtgagcaaatttcgaaacaaccgcttcggcagttctaccagttcgagaggaggtggtgcaggtggtgacgacaaggtgggtcgaacgacatcgattgccgacgactgcgacgatgacgacgacgacgatagtgaccaaattcgttcaatcgcacgcacgacatcgagagtgcatatcggatgtcggagacaacgaccgagtagatccctcgatgaggctgttgggtgaaatgctatcaaccaccgggcagcaaacgaagaaggtggatgggacaacatgtcgtgcagccttcgattcgtaagcgcaagtgacgggttgagcgcatacagaaagatttcgagcagcagctgaaagggggaggacacaatactgagcttttgattgatagaatgacatgtaaagataaatgttctcacctcctcgggaagatcgtcaagtcctgcaagagtggtattgccggtgttgctgatgatagagcatgaggatggcatggtccgctgaaagaacctggaaattcctctcaaagcgcctcaaaaa

SEQ ID NO: 1512 - DNA, 6166 bp, Xanthophyllomyces dendrorhous
tccctcctcctccctcagtaaaagacctagagaacaaaggtctcccaagagactgtgcgtatgtgagtgtacgatgtatctgtgtcgtgtgtcggtgttgctccaacgttcaatggaggtcgaaagaaaaaaagaaaagaaaaagaaattacatccaaacaatttcaatctttccttcaatcgtcctcacatccacatcgcttggtgagctttctcgtcctctctcatccccaggcttaccgtgtggagatcgcttgatgaagaagcaaaccagcacaaatccctttcctgtcccgtgatgtcttcctttctctacttcaagagaccggaaggtgtcttgtggatgggccgagggaaatgtcttgaacacttgcccgacccgctctttctttcgtctagaagatgagaatgggatgggatgggatgcagaataaatcagatactcctgagagagatccttacacgggagcctgcgtcgttcatgtgtcttcctacgtgcttcgctcaatctgtctcttcgtgtggacagagatctcgaccgagttgctgattccgtttggttctgttcttggtccggatgaacgaacatagtcgacaactcttactcgaccgaaaccttctgggactatggccgaccctcgatacccaccgccaaatagaggcagcaataacggcaacaactatcgtttgcctcctccaggctatatgcctcctggacctcaacaaccgcaaccatcgtacggatcacaacaggcgttctctgggtacaacacccctccgaccagctactctactcctcccccttcttcgtcgtcttctattgctgctccacaaagaaatggcttccctgatcctcaacaatatccatcaaacaaatatccacctcctccgtctgcccaaacatctccggcgtatcctccaacgtacaaccaacctccttacgccccattccaatcgcaacaagcacaacagcagcagcagcagcagcagcagcaacaaccacccccatcaatacaaccggcttcactcgcccaaccttcagctcaaccgtttgatcctcgccgtgctcgacaagtctcggccgcacaaggatccaatcagaacgttcaacccgggactggtacgccgcctgctggaggaggaccgatgagagtggatcccagaatagctagagctcaagctgctagcggtccaagtggaacaccgacatccacaccaccacctccttctgtctctgcctctgcctctgcatctatctcggcacctcttcagcaagtagcacaatcttctcaacaggtgccggccgtcaacacggaggctgggcctgctcttccaaagagcccgtcttcaaagttactgttttgtgttgtatgcgcgtccaataatgtgggttcttctttatcgtcatctcagagctttttatacgcggcaagtccggcgtactgattttcgagtgttgtttcctctccaattcatccctttcggcgactaaacagaaccggtcgatgtcagcccatctaacattagccactgccggtctgtccgtagtttcctctgggacgggctcggccgtaagattacctggagcagctatcgacacccccaacgtctaccaatttggaacgccctatgaggatatttaccaagatcttctgaaaaaggataaagctttgtacgtttcgactttctcgcctttgtttcttctcccttgccttcggacgcgccctcatgttgtgatctttttggtcttgtgcccttctctccttctcctgacctgtgtcgcttgtagatatacggcaaatggatgtttgaacatgattgacagaaacagaaaaatcaagcgggcaccagaaaagtggcatgatgcaaggtcgacgcccgatgtcgttgttacctgtgaagaacgttgttttgattcggtctgtgaaggtttgtcctctcgttccagatttctgttgaacgcttcgttctcgtgccacttgtgcggacgatagttttaatgtcttatgttttcttcaacgatgattgatgaatagatttgatgaatcgtggaggagacgcgtctagagcggtgcacgttatcaatgttgagatcaaagagtgcgtcctctccttctccttattcttttctctctgaagtttcttttcttttttctttttgcttctttcttttgtccatctatattcgttcaaatatacctggagaactggggtattaatatttttcttctgtctgcatctgggcataaagtaatcatgaggaagcgctcatagcgggaaaagcaatcttggaattatgtcttgctgttggtcccctccccctttctctcttcttcttttctttgtactcttcattccagtccagaaaccatgtgtctgatcacttgctcatctcgaacacatccacgtacagatcgaagcgagcaaagacccggacgaagaaatcaaagagatcatcgatcgacaacgccggactcatcctcatcagatcttacacgccgtcgctttctattgaatgtatccataccgtctctgtttcttctctcttctctcttctgtgtgctttactttcatgatatctttaaattcggagggagacattaccaagaatatgggtagaacgagtacagcttttgtggcaagctagagaatgacgccatttcccggctaattgtccacacgcgccccagagaaagaagcaaacatgatgagaacaccggaagaagcacactcacactcacaccgtcgaacgaccaacgagataccgttctgacggaaatacaacacagagggaaacaaaattagggaacatgccggattcttcgtttttgtcgttcgtttctggagctctgggttggctgtaagtctgaactcgaaggtcgtgtggaaggatactcgttctttggctgacgaatcctgttcttggtgacctgtacatcgaggacatagatacttcacagcttggtcggcctcgttctatccccaggtcattctcaactatcagcgcaagtcgtatgtcttctccttctttccttctgtttgtttttgcgcagaaaagaaaaggaagagtcaggctgaacactcttatcgtttcaattgtgggttctatccgggtgaatcagtgtggcagggttctcacccgatttctacatcggaaacccagtaggccatctgtcgttagctatattcaataccgttctcttcttttcccaaaaggcgaggggtcaatatgccgaaagacatcatggatcgattcctacggtggaaccttcggatgtcgcgttcgctctccatgtgagtttatctctttttcctctcttgcttgacctttctatgctaaaaggttgagataggcagagctgaagggagaaaaaagagtgagaagaaaataaaaaactgacgttgtgttttatcccgttcgtgaaaggcttcgactctggcggtcttcacattggcacaagcgctttactacccggcacctgcttctcaaaaactaagtatagtcaacaggattacacttcctatcataggagttgccatgcttgtactcgccatcgtcgtaggtgcgggatggacatcactagaattgttggattggctctatgggtttagttacatcaaagtatgacgcacttcttcctcttacctttcttaacgtccgttttggatcatgcgctgacatcctggttcgatccgttagctctatatcaccgtatcaaaatatgtcccacaggcgtacttgaactaccgtagacggtcgacaacaggatggagcatcggcaacgtcgttctcgacgtcatcggtgcatcgttgtcgatgatccagttggtgttggactcgtatagatatgatgacctagttggtggagtattcggaaatcctgccaaactgtgagtctcttctggatcttgaacttttccatttggagtttctcagtagcttgctttttttgtctatctaaaactgaaaactttcttcggtcaactcgctctcgcttcaacagaggtctatcattctttacattcgcattcgacggtctcttcctcctccaacactacgttctatatgtagatccttcagagaaggatttgatgaagcgagtcaacgagcgggatgtagagtctcaaactcgaccaacagaggtcgatgagaggacacctttggtttgaggatagataaatctttagacttttcttcttcttttcccttttcttcctcttgtattttacttctcgttgtcccctccttttgatctgtttccatacatgtacaacatacatatatatgtgcaacttttcctatcgccctccaagcaagtcaggattgaacagagataatcttgcgctacttcttttgcacagcttttgaacttgatcaccgttaaccatcacacacacgcacatctccctcggcatatacccaccctccctctttcagtccagaccgacagaagtctacacgtgaagcagaggcatggcaacgttcgagatagatgaagaagctttcctagctagatacagactccgaacaacatcgcctactcaatgggaagatgaagatcacggcacaggccccctggatggtccaacagaggcagaacaggattcggccgggctcagagtggtcgaactagaaggctgggccggtgagccggatccgtttgggctaagaggatctgggtgagttcgaaaggtctcttgtctgtctgatttctgtgggacgtttgcgttggtgaaccttcgtttggacgtttcccgtttcagtgggccgcacacgagaggaagcacactcttctgtgtccacaagtgtatgcgtctttctttctgacccttgaagaactcttttattttcaggaggaagaaacaagcaccgaacgaagagagatcaaaagcacttaggacactcgttcaagagaactttgacagattcgtctcggtcaaggctagtacagacggtgcgtcattgtggtctttctctcgatcttcaggaccaagtcatcaagggaacgatatgttgattcgtatggactttcggatcgtcatgaatgggatctccgctggttctctcagctgtctatcaagaaatgaaagatgctttgttgatggaaggaaacgaatatggtactaaagacatcaaaacaagtctacaaggtctgcccgtaacccatccatcttcctttctttgccttgttttgttctgtcctaattgctcgatgttatcccggcgcggacaccgacgttttagattcgtcttccatcgcggatgaaatatatctgccaatactcgaaaatacgctgagagctcaaaaactaaggtcgacgttgtcggtatttgagagatcaaagttcttcttcaacctgccaggctcgattctttcttctattgatgctgtaagtagacctggtctctccgtctgtagctcgttctatcatgtcgtctagccagtactcgcacgtatcctcagttgttctttcctttctcttcttaccagaaccgaccggaccaagcgctctcagcctacaaaaaggtgctctacatcctagagacccgacccggccagctcctaccaatctcaactaagaatgctactcaaagggatcaacagcatcggatagttgacaaggtgtggtctcaagtagaggcgatcatcgggcggttgagaaatgatctgttggcgctcttgaaggatggctcaagggggtgggaggatcaagaaaagactatcgagtacgttgaggctgattcttttttctcttcttttctatcctctggttccaaccaagttggttgtcgagagcaaaccttctgaccggcgctcattttctctttctgggtgggcaggattctactggagttggatgcaacggacgaaccgttatggacgtattttgattctcaacacaaccatgtccttggccaacttcaaaatgctcacgatgagtttgcagaacgcgtcaacagtatgtctgggttcacgtgtaccgttcttgttgaaagaaaatctcgtaatcttggcttgtttcttccgtttgtcgtcgaacggactttcttttattctaggtctgcgcacttctacggaccaggcgttccccaaaggagaggaggccttagagaaaagacgagcgctgaatttacagagatgtgtgttgtctctgagtttgatga

SEQ ID NO: 1513 - DNA, 9391 bp, Xanthophyllomyces dendrorhous
aggttcgactttgcttgttcatcgatggcacaaatattccaactgactctctctaaccacttggacatttattttttattttttattttttattttttattttttattgactgttttcagaaaacggagatggccatgaagtatggaaggcaatgctcgatctagtcaagaacctgtcggatgtccttttacattctctaccaaatttctggaggatagccaaacatttcctagatggaaagtacgccgccaaggtgagtcgggtgtgcttctgaaagattctcttaaacaggaacgcctcagagactaacaaagagatttacacatagacaaagaatgctaccccttctcgaacacctgtatcccctatctctgccaatcgacctccgactcaatgccgaaagatggcagtagacatcatcaaactatacatctctcttcttgcttcattcttcagcttcacaccctcagtatccaacaatcatgagctcccaccgtttgtgcctacacaatcgacatcactcacctcggctgtatatgctaataggatcttgtcggagattacagaatgtgtaaatgacatcaatgccggggagatctcatcagaggcgagagatcagctcaagaatcttttggaacatgctcggggaaaatttatagaagtaatctgtgaaggatggagaaaaggtcagtcgatggcttattccttgtatagggacgaagggaaaggacaaaggtatctgaacgacccttgtgcttcttcatagattccgaaatgatatattctctcgaagattggattccaaatccagacgttccatctacgacaatgtacctctctcgaatcgctgatttccaaaactacaattcaaacgcggcgttcaaagcagcgactggattggaaaagacatcggaaactcgatctgtatgtttttggctcgctggccttttgatcgtccacgctgtttctttgttttcatatgtgtatatactgaagatgcgtgtgtctgctaatctaccgcttgacaggtaatcatccccccgttgttcgtagctagaatcaaaaattcatttttcgactcgctctatttcttgttggacggtatggtccgattatccttccaggattacatcccgcttcaagacccggctacacagaagatgatggtttcggtgggaatggcaggcatgtcgagcatgcccgatgttaccaagattgtaagcgaccttcctgtattactatcatcatgttagattgtcgttttttttcgttttttttttctcaaaaagaattctcgttaatcgacaagtcgctaatcattttcatcgaaccggggatggtaacaggaaacgagaacattgttgacgatcagcaatttcggccatctcaaagcaaaactcctacctcagttaataaagcagtttgagacttcatatggtatcgtcaccaaagaggaccaaaaagtacgtttcttctataggaatagatcatccgagtttagaccatcatgaacatggacgttgacgccaaatttggttggatgaacgtagacactagcagaagtagaagatcaactagacaaaatcttgttcgatgattatgttcgtcgaaaagtggtggtcctacgagaaatcatcagacgtggtatcctcttcagcgggattgattggtacagagcgtccaaaccgacaggttcgttgcgtatcatcgttattatctctgttggctgcctcgagatcatttctcctttcaactgacggtcctctccctttctcttcttggcaccgctttgttcttctccttgacacagaaattggctcgtacatgtatgaagcccttgtcttcatggtcgaagttcacgctcagatcagtgcggtatcgaagcctttgttacatcgaagcctgagcagtttactagaagaaatggcgaaagtcgcactcgaatctttccgacaagtaaaacgattcggaatgggaggaatgctcagtgtaagatgactcttgccgcgttctcttccctcagatcaaaccacacaaagaaatcaccttgggctgacagacatttgttttctctctccatcttctttctctcaaggctacactatctatcgaattcatgcatcagaccttagtcgcacacgtaacgcctgtagcttcagccatccttaccgaagtctacgctgtgatttccaaagcttatagccggccggtgtcagaatcaggtgacgaacttcaaaaggaattggatgccgtcaaaaagactctgtataattccagaaaggcgacgtcggtagagttcatgtgtttgcgaaaagaatcgactctatcggcttcttcttctgcttcttcggcggcgacagggggatccggcatgggcaaggtgacgcaggttggagaacacagtgggtcgtccaccggggggctgactcgaccagaaggacttcgtagagacagtaaagagtagggcgaggagggaataaaatgatgtaatatatcgtttatgactttgacgacttgtactcttgcctgtttttttttctttttttcttttttcttttttctttttaattgcttcgaacctttagagaaacaaagatgagtcaccgcgagaagagaagagaagaaaagatatcgatcgtcacgaattcaaacttttcatgtttcaattatgctatacaaacacaaaaccctcccccaaaactaaaggggaaagagtcctactcctccatatcgacagcgctctccgacgcttcctctgttgtcggcacaggctcagcttccttggtagcatctccttcctcttcatcatcgttatcatcgtcatcgtcgtcgtcgtctgaatcgtccgagtcgtcgaatagactttttccgccagctgctgcggcctgagcttgtttccaggcatgagccatttgaaggaccctgttttaagtttaaagataacgattccaggagaatgatcagataaatagggtcgatgataggtaggattatggttgcgagagcgataagaatattttctttgaaaaaatcagagggacatacttgaagctggctgggttggcttcccgctcgtcgtcggggaagatcatgtcccagtctgtttcaacgagaaacaaggcggaatatgtaaaaggaggctcagtcaaaaaggaacgaaacagtcagaaggagaaaaatgacagaagaagggaacatacactcctccaaggcaccgttggcctcctcgagcttcttccattttttgacgacccgaggcatcttctcttccactgctttcagttcctctggtgttccgtggaacttttcgaattctttccaggcttccaacaaaacgacccgctattgatgcacgcgaaagagcgaaagggagacaaacagaaaagaccggatgtttaatgtaagtcatttagcagacgatcaaaaggatgcacaggtgagacaacaaaaatgcgaacctcttccttgaatcctcggtttctcagatcagtgtaacctctatccaacacctttcgggcaagctccggatcacctccttcgtcttcgagcggttctccatcctcatccgtcatcgcttgaacctcgaacaacgcgtacgcgatccagacctatttaaaaccataagagtagagggatgtgttcaatcaggaattgcacctggtaaagtaaaaattactcaagaagattttcacttaccttgacgtgaccggtcttctcgagcaaggcttcgtagagcattcgagttcgctctcgttcaccctgctcaaactcgaaatcgatccaagcctagaacaacggacagacagagagaccttcaatcacacaatttatagtaaaaagatggcaagaaaaggctcgatagaatgacagacagaccttccaaaggacctcgggcatgtcaagctcttgagttgttccgagatcgaacagatacctcgctcggtcaagatctccgagctcagcctcaaactgagcccatcggacccaggcaccggtgttcgaagggtcgaactcgagatacttcatatagatagttcggacatcgtcgaactcgtaaagctgtagaaattgagtaagagagattagtgtagttccatgagagagcagacaaccaggattggcactaggcaagacaaacggaaagaagatgactatggatgaaaaggcaaaccaacctttgtacggaattcgatgtagaccttgaacaacttctccttggggcacattccaatggctgttcccagcaacttcttcgctgcttgtacatccttctgtcggagctcgaagtaagcgaactgaatccagagctatcgcacagacattttgaatcgaaataacaagaaaggaaagaaataagatgaggtaagtggatcgacagaaagaagacaaggtgtgagagtcatgagtagaacaaaccttagcgaaggtgaaagttcggtgaggaataagttgaagagcggctttgtagacttgtcgggctcgttcgtaatcctatcagagagtgcgcgtagaaaaaaaaggtcagaatgcggagcggatttgatgaagcctcattcacggaaagagacgaaccttgctctcgacttcctcgaacgcagcatagaacaaccataaaaacacgtatcgcctccaatgtctcttctcatttccaggtggcacctgagcgaccgcgcgctcatacacatctcttacctttgccggacttaattcctcggccgaagtggtctgaccatcttccctagcggacctgtaagcatcctcttccagtctggcatacgaaatccaagcatcctgttgttcaaaggagcggagcgggatgagaagaaaagcagaggaacagagaattattgactttggtatatgatattcaacgtcaaacctcagcagaaggaggtaagaggatccactaacgtagttgttcgcgtcatgcgaaagctcttcctcatactgaattcgtctcttgcccagaacagtgctctccaccccagcccgtgtaccgtgctgtttctcaaacttcgtgaaagccgcgtagagagtttgggattttgatcgaggaagtctcgagagggcaaactgtcatgagaaaacgaaagaaggcgataaatgccttgtttacttggagagcgaagagaagaaaacgacaaggtagaaaaggttctcaagagaacacgtaccttgtagatgactctagctcggtcaaactccttcaatcgagtctccatcctggcgaatgcggcaaacacagattgagccttctcaacttcctcctcagagtctccaaagaactccaaagccgtctggaagacctctctggctttctctgtgaatgtttggacaaaccgagagaaacaaccagacgaacacacgcacagtaggcctgtcagtcgtccaaaggcttcgcatattcgaaacccgaagagaaagatgcgcagaggagaagagtacgaaccaatttttcctcgatcttcctcgaatcgactccatacaatccagttctttggctcgggcctgaccccaatccatctctcgtaaatgccggaagccctgtcgaactcgttgtatcgcaactcaagcttcacgtaactaccccatgctctgtcatctggctcccatttcatccatcgctcaaagatcgttcgcgctcctgcgatgttccccaaaagctcctctagatgaatgaacttgagccaaagagagtccactcggggaaggagagtgaccgctcggtcgtacaagtttcgggcatgggcgatgtttcgggctttcagttcctaattggatgacgttccgttgagcaaggtgattgcaacagtatgtggttttagctaaacatgaaccggaacgtgaagggaagaggaatcgacgctcacggtttcacagtagtgggaccataattggatgtccgagggatccacatccaaagctcgctcgaacaccgatcgagctctatcacaacaaatcattgttcgacgcgtgtcccacaccatacggagacggaaaccagatcgcatggcgattgagaggaagatgcaagcagttcgccatgagataatgctttatgaatggccctctctacctgatgaagcacttaccggtcatattctccctgactagcctcccaagtggcgtatcgtctccattcgtgaatctgttacatgtacatgccagaacaacagcaattgatcagatttgtgtcgaagcagttacaatcgaagaaagattgagaacgtacgctggatctggaataacgaattcgattctcatactcttgcctctttcgtcctcggtactcattcagttcctcgagatcctcaaccttttgcttgggtacgattgttccactctcctgtcgctcttgagcctaaggccaggttgtatggttgagtagagtttgtgagaagcagacgcgtcgggaaagtcgagtttttcgaaaggaacgttttgatcagacgaaaatgttttcaagaccagaagagaacaagacggaaccaagctagacgaacctctcgtaaaagctgctcagctgtgatctgttgggaagaacgtgaggatatgaaacatgtgatataatgaggatcaagagttatgccactgagaacgaaagcaagagaaaaaagtaggatcgacacaagagatggaaagcagtcggttgactgcaccgtctcttccggccaacgaacccagctaagacgaaagcgaaaccaagagacgaaagacacacctgaacagcggcgggcgctctgttcttgaccctgggagccctatcgccttgacgggtggacatgatgaaggagaagaacgaggatgggaaacggaatgggtgtatgcggtggtagttaggatgggaaaacggttccaaatcggaaactacaaaaagactacaagacgaatacaaaaatttcctaatggatttccatccatacacagtctccatctcgattgactttcaccttctatccatcctgaccatcaaccgagctcattttagattggcatcattcatctaggcaatgttcaagacagttgctgtgccctctgctgtgagtagaatggtgtggtcgatatgcctgtgcactcgttccatctgcgttcttactcgtttcttgttgcatatatacctcccctgaaatagaccgctatcaaacgaatcaacaaagaggttcgtccggtggtatctctcttgatcatggcttgctacggttgactgaccatattcttgtcaaggcagatctccgctctctccaaggaaaccgatctcggaggaatcgtcctccagcccagcgatcaggatatcactaggtggacgtgtgttctccctggacctatagttagttgcccgatctatccaacgtcattccagaaacggcctactaacttccttgtccttcgggacgatgccacgtacaaacaaggggtcagtgtacgaaggtggacagttccatgtgtccgttcagcttcctccggactatccattcagtgcgccgaaactacagttcttgacaaaggtatcaagctcttcttccctcttccaaatcgatttgactacgaagactgaacccaatgattttggcgcgctcctttgttttgctgcctatagatatagtaaggaccgaccatctccttttctttcttatttgtctatctgttcgaggcctgctcacctttccttctctttatctgtcctccctgtgtggttctgaatggaactttcagtcactgtaatatcgcagagtacgtcccatacgacataagcgttaccctgtccttctgctcgcgtggactgaagcccacatctttctgtacgctcaataactaggtccggcgcgatttgcctcgatatactgaaaaacaactggagtccggctttgtcactgttgaaagtgatactctcactgtcttcgctcttgacggatccgaatcctcgttcgtccacatgttttgagcttgtttgttgtgtatgatagaaaagactgatgatgcgctccgtctcttattgtacctcttctgtgcgtgcgggggatggacagttgatccgttggtaccctcgatagcccaagcctatcaagtcaaccgaacacaacacgacaccacggctagagaatgggtcaaactgtttgtctcgttatatacgtatatatctggtttcatatgcatcatcgtatccgttctaacctggcggagtcctgctcttttcctctatcttcaagatatgcacaaaagagacagagtacacccagcgcatcgtctgccagcccgctggagcttgcatcctcagtctccctcccgaaccgacttgctcgatcggctcggcttccaggtctatggccctaccgttcgtcctccaccgcgtcttcttcctccccgacagaccttacgaccagatcgggtccgacgacgatcgctccaacagaaaccgtgctcgccagaaggaaacgtccgtccttccctagcgcgggaaccggaacgggcgagggtgcgccatcaggttcagaacaaggagcggtcatcaacattgatgactctgacgacgaggtcgatcaatcactcgtcgctgaatccaacgtattaacaaatccatcgtcgacgacgacaacaactgcaacggcaacggcaacagcaacagcagcagcagcagcagcagcagcagcaacaacaacaacaacaacacgatcgcaaccacaaacgcagtcgcaatcaaaacaagaacaagagatagaggcagaagaaagtggaagtggaggaagaaaaaagataaggctatcggagatcgaatccaaagtcaaaggagacgatgaaccctgtccgatcccaagcgctggccctgatgcgagtccgacagaccgagccttgaacagacagatgaacgacgggtcagatatgaacactgacgacacggaagtcatcgtccttgattagagaaacgagagagacttgatattttttatttttatttaaagacgggacagggaggaggaggaggaggaggaagagagaacgtgttcaggaagaaagagacgcaatttttttcggcgaatgattagatagttcgataggtaggtaggtgggtatacatacaaatcgattgacgatcaacagcaaatcaggtagctggatgggacgagatggggcggtagcaaaagaagggaggaacacaagcgcactctactttcgctcagcgcggcccatgtgtgatcgtttgtcaagtaaagatgttgctcttcatcctcttcttcttcttctttttctcttgcggacgatggtaccgagaacaacaaagccatgacatgacaggagtaagagaaaagaaaaaagaggaggaaatccatgacgactaaattgaacagagaaccgaaacaaatcgaggatacgcacacacacacacacacacac

SEQ ID NO: 1514 - DNA, 5128 bp, Xanthophyllomyces dendrorhous
cacacacacacacacacgcagaaaggcagaggcgaagaaacaaggaggacacacacaatacaatgcaggggaagagggggtgggagaaagcacacgaagagacgagaaaagagggccagaagcaaagacaacctaataagaaagaagaaagaagaaaagattgataactagacctgcctattcaagaaccaacaagaaattagaggaaagaagacgaagaacgaagaatcgaggaaacaggataggataaactagatccttttgaaccagatcaaaccaaaagagaaaaagaacagtcgagcagaataaacagagagagagagaacaaagaagaagacacgagagataggaaaaaaagcctgtccgttatacacaaagacttcgcctaaaaaggattgtccttgcctcgatactcctacaaatacaaacacggacctgcatatggtcggatactagaaaatcccaaacatatgtggcgcctggttgaccaactgtccgccttgcgcggtctgaacacctccgaaaggctggaagttcatcaacattggtggtgtaaacggatccgggacggaccacgagaacgggctcggttcagccggggccgacatcgacatcgacattccaatcgccaccccgggttcaccaccggttccaaggttgctgtttccaagagatgtgtcgaaggcgtttgtcgccgagatggcgtatgggtcgattgatcgggcaccatccgacggattctgaaccgacgctttggcctggaacgcaccggataaagagaatcgatgatgaggaaaagaattcggaggatgtccgttggcacccgttgattcgccgatgtcatcaaaagaatcgccgttgaatgttctcggtcgatcgtcgtcgtcatcatcatcgtaaccctcttcctcggctgacgaatgatcgtcactttcttttccatagctactagcgctgacgatcgaatccttccttagctggagccctgccctcggttgatcttcaccattggaattgataccggacaagacagaattgttgcctgatgatttccgtttcttttggttcccggtggctggttctttttccaaagatgcgtttttggccgcttcctctttacgttttctacgccaaattcgtcgaagttcacggaattctaataaaaaggtggatttggaggtcaaaaaagtcagaaaggaagcctttctcgtcgtgtaaaagaaataccatcactcaccagctggcgttcgcttttctccgtggctctgactgatgatatgtgtattgaggctgtacgaagagaaacaaggaagaaagaaggatatggatgatcggcaagcgaagagcgtaaccgtcagccaggcaaagacagggaaccagagaaaaggtggtacgcactggttgagcgtcccgtacgatctcccacaatcctcaaactcgcaagcgtacaatctttccacctggtcgtgtttccttctaggcctttttggttttccggtgacaagcgagatcggcctgagctccaaaggaagtggctcgaacggcttgacgatcgtgttcatcgccttgtgtttcgtcttcttcaaaccaccagtggcagctgcagcgacggaggctgatccgggttgagcgttcgattgggaacgacctcttcggcctagtccgagggttgcctttagaggtaaaccagtggaagaaacggaaggtgatgtcatcggccttcgatggccgtcgaggacagagagtgggattgaatctagtctgtggccaaatggttctagcccgtttgaagaagggaaggtaggtcggtaggcgaaagtaccgtccggtcggacaccggtaggattggtaaatgggtagcaagggaaaggatgaggggaggaggaggcgttgttgttgtcattgtcgaacggggtgacactcgatgaatgcatagttgacggtcggctgatggtcgggacaaacccgtttgtcggatgctcaatagagccaacggcatacgtatgatgaccatagtggtactaatccaagcgagtgaatgtgttctaggtgagaacgaaagaccgaaagcagggcgcatgaatgagaagaaaaaacttacgttttcggatattccatcgctcgtctgcggcctggaggtactggcctcgggatgaccgacggtagacattctgtttcccgcgtgtcctccttcgatcggccatttgtcgaaaggaccgaccgagtccttacttcttggtcggacccctccatacgggttgtatctgacagccggctgatgttgatgctggtgctggtgctgatgttgaagctggtgctgatattggtgtcgaggataagctacttgttgctgctgctgttgttgttgttgttgttgttgttgttgttgtgaatggggttgctgctgagactggagaaaggacggctgggcccgggggatatgctgtctagagtctgagccggtaagatctatcgttggagagtgacctggcggcccgttaggataggccgacgaaaactgagtgttgacattgggttgaaagctgccgttagcttcttggctagcacccatgctttgacttgaatccaagttgaacaagattgactgctgttgctgttgttgtcctggccagatattcgatgtcgccgttgttgttgtcgtcgtcgtcggctgctgctgctcctgttgctgatagaaaaactggggaggaggaccatgaaggtagcctaagcttttggacaaaaatctaggcgactgtccatcggtcagaacgggagagaatccataggatacctggttcgattctgatagactgtgcctataagcattcgggttgagcgccaactgagagacgttggcactactactattactaccaccaccaccaccggcttggtcgactccgaaatcgggatggttatcctgaccaggatttgtaggtatgtacctgatgggacctccgggcgagctatctggatgaccgctcatgacaccctgtctaggtgacggtgccaaagtctgactgctaccacttggttgactcataagcattagtgcggaagcagcaggggccgttcctggtcggggacccatgacggatgctgaagaatctgaagagagagctgacggtggtgaaaaggtggcaggagcggaaggacggccgacaggttggttagcagggtagtacgctggaagaaccgattgctgaggtggtggcagagggaacgagaaggcggactgttgatgaagttcccaggggacggcggcggaggcggcatcgtctccatcaccatcaatgttgttcatactgttgtctgcacctgtatcgatgctattggtggacgacggcagttttgggttaatcgcgatctcggtatcaaacgatgaatggaccggccggacgaatccggtggctgagtttgaatgatgaatctgtccgccggtggagggacgaccggtggtggtggtggtggcggtggcggcaggaaggctgttgcgaccgttttccgtgtggttggtagagctaaaagatgagcactgatcgtctgacggaggcatcaggccggccgacagttgttcgagggacgacggggaggggatgacgaaattcagcgaatttgccgaggtcggtagagaatcatacgcgtacggtgtgagcaacggggatggcacgttcgacgacgagaaggacggatgggagagcagcagcgggtttagctgaccatcaacagcgagttgggactctatcgaatgttgatggtgtgattgggaatgttgacgctggtgttgtgattggtagtggagctgctgttgcgacgggtatggttgttgccgttgctgctgctgctcttcctcttcctcctcctcctcctcctccggcggtttgaacaagaaaggcgagcgatcttgaaaggacatccttctcttcggtttttttttgcgttttttgtttctttgttttcggttttccgaaatgaattcaggagagggatgggaaatcccttgtgacgtaatgggtacgggcgggtaaggaacgggaatgtgggccggaaaagggagaaagtgtcggatcgctggatggaagaaactgaatgtgtgccagcggagggcgagggagagcgaaacaagactaagagagaacaggaagaggcttcaaatggatgatgagatcggaaagggaagctagagaagggagccagagaaaggagagatacccgagagagagagagagagattgtcagcacaaaactatcacacgtttagcatgacggacgaactgtggatgcctgttgggctcaatttcttgagcctaaagtgactggaatatgacgaaccgagacgatggagacaggcagacagacacagagcaggaacgagagagatgacgaaggggaataagaacaggaaggaggagaaaagaagattaaagtatatacaaggtggctgtctgatgggcagatgtagatggacggtggaggaggaagaaagtaagtgaaacggagggagaggaaaaggtaaggtgtgtgtgtgtgtacgctgtgagtgattctgccgggtgtatctcggatgtgaggtgggaaatggatctggctatctatcgaactctttctttgcttcctttgccaatttctcctcagcatgtgttacctcaccagcagaggatgaatttgcatcgtgaatgagtctgaatccgcgtgtgtgcgtgcgtgtgcgggtgcggatgtgttttgctcactttatcaatcgcttaaaaagaagaaggaaaaaagggagaggactaaagcaaaccaatcaaaatgtaaagagagcgtttgatcgtcgagcacccataaatcttttctccgtcgtcggacgaatctttccgagagcgcgaccgagtcagcgaggcggtagcgaaggagacatcagaggaacagacagtggcaagaaaggcaatgtcaaagatctacgtctctctttgcgtttttttgccgttgggtgacagagaagaagggagaaaaaaaaggataacgagcttgaaaggaggaagaaaaaaaaacgccatcaaagtgttatccgatagaccccgtacgatgtgagagtggatgtgagcgcgcactctttttcttccacttcgctgataactat

SEQ ID NO: 1515 - DNA, 30996 bp, Xanthophyllomyces dendrorhous
gtcctctaccatcctcaccctgaatcttgtgagattccagatggttaacggaaacgaatgcacagttcagctttcgcgctaaaaatgacatgacccgcacaggccatacttgtctgccgccctggctgatcacacatgccttccctctctcttgctctcgcgggtccctggatcgatcggctgatgacgtcatctattaccgcgggaccaaacataagggcgatctacccccttttttattttattttatttattttcgtctgtctcctcctgtctcgtcatcttggtcagtcatttaacatacggtccttgtatccgttctgtagttgtctgcttcgactagctcggcagcttcaactggctgactgctcacgtagcctcttctgtatttttcttcctctgcggattctcatgtctctcctgatattcaccgttcggtgctgcaaaaaatgtgtgacgtctgagccatcagctggttggtctcgttatccgatcagaaaatcaaaagaaacgaagaaagcgttccgaaggagattacagagacaaaaaaaagcaagggggagttctcctttttgtttttgctccttcctccctgtgattcagacaggcagatccctgccggcccccaggattcatggccctgcattctgagttgaaaagaatatagagatgatcaaatataaagaagggaaagggaaagagaaaaaaaaaaggagaaaaaaacaagattcggacatagtttggccgacatttctagagtgatcggctggaaacgttccaagagagggcaagacagtaagaagaaggagcgccggtgaatcttagtagctttaattgtttcatgcttatctcggtgcagtctcatcagcattctttcctcctttcctataggtttctttcttatttcatctttgattctttattctctttttttcccacttttcggcgcccaacgctcaattcctacataccctgccttcatttgttgttgaacctcccctcgaacaaattcgatcgagggacgctcgtcggcgttggtttctccgattggatctcgctcggacagtgatttatttttgattgttcagccctcgaacccatcagcccttgcccttcttgttatcacccttgttgccctcgcctttgctttctccccctcgctcccgctgattccgtgtgggtcttgtttagtcccgacgaggccgaaacctccacaattcacggcattaggtccactcaattggcggtcgtcatcgctttgccggtgtgtctgaacagacgttagatcctttcccggaggccgaagacgagctcgtccggccaagagcacggagaacacggagaaaatttccggcgattcttttctatcaccttctgctgcttctgctacttattcttctttggcttgcttctgccctgctctgctttgctctctgccatccctttttcgtcttactgtgttcttggcttccctcctcttttgccttcgtcttgttatcgttctcttactgccttttattttccttctgacctctacagcttcacatcaactctcacattcactctcactctcacattcactctcactctcacgtttacacactcactcattctcactcggacttgttattacccaaacatgagatcaatgaatccagtccgttctccgtcgtcacaatgagacttactaacactctcccccatcgccactctccctgtcttccttgtacttaccaagctcaatcccagaggaacagtgttaggtccggcgtctctagcggtgtcacggggatgtccgctagggtgaacccatgcaggtagggttatcgttacgtaatcaccccccaagatcatgccgtcctcgtttccctctccttcccatctcgatcttgtccggatctggaacagtggacgtcgggtttctttctcttctgaacatccacccatatctgtaacagcacaaacacacacacgctcacataccaaacatgaaagcttcaggcttgctagccttcacattccctttagtggctctcgccgctccgttccttgatccatcccagctagcattcaatattccttccgtggtccagcaagtattggcttacgggaaggaccagatcgggaatcatctggaagggcctatttacaaagctcaggacttttccctggtttgtctctcctctcgttctcacctcttatgccttgtgtacatatgcgtgtctatcttggttccttcttgtactaattctgttggaacggacggacgggcggaaaggattcttggggtctcgtcaaaggatgggtcgaacaagagggaaagatgtgtatgcattttcttcttgcttctctggtttgtctctgcttgacagccagaagctgaccagtctgtttctcttctcttccttcactctccttctgacaattcttggatcgcttcctgatcgctgtacttgctacactgactgatttcacccgtcccgctcgtcttcctactgaccacaaaagtcgagacattaacccacccttcgctcccagagtacaagctcagggtgaccgagccaaagctttgtgattcgtctgtcaagcaatactccggttacctcgacatcggaaccgacaaacacctctggttctgttcgtcatcctcttcctctccgtttgccgcacacaacccgagaccgccccggaggctgaccgcctttctccctcacagggttctttgagtctcgaaataaaccaaagaaggatcccttggttttgtggctcaatggtcagtccatccgaccatctctttgctccttcgctcactgctgaccttgctgcgaagcatcattttcttctatttcttccttgatgaccaaatctacttcataaaacaagggttcgttcaaaactcattctcttgccttttcctttccttttgtgctgacatctaatctcttatctactgaatcacttagtggacccggatgctcgagctccactggtctgttgttcgaactgggaccatgtagcattcaaaagaatggaacgatcactaacccatactcttggaccgagtaagcgcccttttcttgaatacgttctctgaatgttcacaagactgagatgttttcgttctcgctactctttctccttccttatcttttcacctctcgacctcctcaggtctgccaacgtcctcttcctcgatcagcccatcaacgtcgggttctcctactcggatagagacaaagtcagcacatcacctgctgctgccgaggatgtgtttgctttcgtgagtcttttcttctgcctttcacagatcctccgtctacctcattctttagaaactgactgggtttctcgatcagttgactatgttcatcgctcgataccaagattacaaggatcttgactttcacatttctggagaatcctacgccggaacttatctgtacgtattcttccctccctcttcttcttctccatacgcctaaccagactctactctttgtagccccaacattgcttccgtcatccatcgaaatgccaaagcactccgttcccttggtgccgaagctcctctgcctgcgctcaagttcacatccatccttatcggaaacggactgaccgatccgctcgtccaaatgggaacgggtgtgtacgattacgcatgcgagtcaaaatatgcagtgttcgacaaggattcccagcagtgcagatcaatagccgcaaaggccccaacttgtgccaagtaagtccagctcatctctctgtgttcagtcccccccttttcttctcggacttgttttctgactcgttttgaaactggtcgacaggctcattcaatcttgctacaacaccaactctcggttcacctgtggtgagttttgcaaatgacggtcttcctatccatccaaccccactcttctttctcctctcacaagctcactcttgcactctttacccccttccttgtcaactcaagttcctgctggcttgtattgctggtcttcactgtatgcagacttccagaaacttggattgaacccttacgacgtcagaaagacttgtgacaagagccctgagaaggacggcccgctttgtatgtctcacactcccgccttaccctattttacaccttccctgttacagacccgaggactgatgcttctgtcatccaaactaggctaccctcaaatgggttgggtcgagacttacttgaacgaagcagagatcaaaagacaactcggcgtgccaaaagatctcgagttcaagagttgcaacatgcaggtcaaccaggctttcatgagtcagggtgacgggatgcacaactcggctgctttgctcccagagttattggaagacgggatcagactgttgatctacgccggagagactggttcgttctttgtattttctctcttccgaaccgcctttacgagtccatcgagctgagccggttgcgtacattcattggtattctgctagatttcatgtgcaagtatgtaacgttgtgtcttttttgtatgatgtagaaaatggctttccgtatgctaacctttctgagcgtgattagctatatcggaaaccttcaatggctcgaggctcttgattctcccttcaaggtttgttctttcctcctcgtctgtacttttcgtatcgcatcaagccaatggtctgacgaaatgacgcacacacacaacaccaacgatcggcccaccaggtcgagttcaaccaagccaaactctcaccctatgttgtcatcggcggtaagaagaaaatgggctccgtcaaagtagcaggcgcacagggtttcacagctggaaacttggcgttcgtctctatcgagcaagcaggtcacatgtaagcagcccgtgtttctccttttgccttttctcgttctttcaaacaaccatcttgaatagaatcctgttctgctcgagttctctcgtttgattgattctgatgtgcatgttcctttttctcttcttcttctccttctcctccaaagggtgccgttcgaccaaccggaagtcgctctcgacttgttctccaggttcgatctaattctctttctcgtctacttttcttctttctcatcttcttaccttctgcctcctacctttcgacgtacgtacggatgataccgggatttccatggggaccaccagatggttgcacaacgtccctctcgtgctttccaagccggagtgagtctgaaagcttatcgaaagaggcgagactgaagaatttccatcctaggtatatcaagtttctctctttgtgtctatctgtctgtctctttcactctgttttcgtctatccacgctccttgcttgtcgttctattttcgtctccacatatgaatgcgtttggctttgtgagaacggatgggtgtctcttgccgacctacagggaaacaaccagatgaaggatacgaaggaacgagggaatagaaacgcatggcataagcggggggggaaggaatagatctcccccctttggaaactcgagattcgagaatagaggcataggatgtgatcataagtagacgagaaagagagaaatggagattagagagaaagtcatataaagaagcggagagagagagagaggaaagaaaagaaaagaaggcgggaagaatggagcaggatgaactagacacgataggtcggacgaaagattgaaagattgaaatattaagaacagaaaaggcgagataggacatcaacttgagggtcgttatatcaattatattgagtaaagaagaagtaagagaagagcaagagaaggagagaaaaggcaatcagaagagaatgtgatgtgcgagataacatgagagagacatgtcgatgatttaaaagaaagaaaaacgagacgaggaagagatgagaaaacggaaatgggcgaagtagaaagaaagaagaaaagacaggaaggtgtaagaaagaagagaatcgaacagcgctcattgctaaaccgagtttggtttgattgttcgtatccactaccacttctcaatttccccccacccatcggatttccaaatcccttccatccccatcagaaaccgaacgacaaaggaacacaaccggaaaacaacccccaccccgtctctctcttccagtttgtagggttaaaaaataaaaataaaaaccttagaatgaccgatgacgtttcaggcttcaactagcctgtcggcctcttgccgcgcccgcgcttgcgcctagtcctccaagactcaagccaacgggccaggattcgttcgctctccattcgtaaccgtctccagcgctggtcccgcttctggatacgactgctgccgctgcggcggagacactggcaggagaatcctcgaggagcgatggcgagattcctgtcgtcccgcctagagtcaacttgatgtgtttgtatgttcctacaaagaatctccaaaagctgttcgacaagaggatgtacagagaatctttcaggttagtaccctagatcgaaaaagagcgatcggcagacagacagtacgaaacaaaagatacaaaccaggtgacacccccactttcgtcccaaagacacaatttcccagccgcctggacttcatatacgaccagatcgacgatccaacaacatagtacgaaactagtcagcaagatgaatatcgtactgatcgctacagagatccccagtaagaactgtttcctccaccgcgccaggaagaaaggaagggaggaagaaagaagggtcaagccggccatcgagcatgtatataatttggtaagcgcgggatacaaagtgaggcaaggaaagagacatcatccgggagagcttaccttgatgaacggaggctcgtcagaaggcctgtaccaattattccaacgaggcatcgtcagaggagagagagtatctcgtccaagggtggtgtgttcgactgttagaacgaaggcaagggaaagaacagagaaagtaagagccggaacgtgagaagaacggaagatgcccgagagaagaaacgatcggcccggtccggttggggataagaatatcaccgtcgactctgggaacattcaagtgtgaaggggcaggagatctgttcctcatcagaaggccagatcttcactcacaacgattgaacagatagggaatatgcgtgtgatccacagttccaagcgctcttgatcaaattatgttgaagatatgcttgggcttggctctggcaaatcaagagtggcttcacaacctgcggaaacgtcggatgaatcaagaaccggagtatcacagtccgacgaagatcagagatcggtttgaacccgaagacaaggatagaaagtggattcgtacccaacgtcagagataggcaagcagaaaattgtttttgatagacgggaagagacctactcgacgatataggatgctcttctgagtgtgcaacttagatattactccgagcgggaaggtcttgaacgataaagtctaggaactttagccaagccgaaccctggatggtagccacagagattcgagtggactcaagactgctttagatcgacaagagcacgagccagagtgttcccagcgaatgatgtatgtgggaagaaggcaacagtcgctcggtgttggcggtgctgatgggtacatacatgtatgctgacgcggtcggcagctgtctttcgatcatgcttaggtaagccatcggctatgagcgaaactggatcgatcttctttctagccaaacatcatattgatcaagtaagtataagagagaaaacatggggagagagcgcggcaggaaaggagcaaagggatctcgaaatgtaagagagacttcaaatatatgaatctggtttataattgagccagcgcggaaggagcgagggtagacgataaaaagagtgatttattagagaagaggatgaaggatagatgagctctccgtggatcatcaaaaaaaaaaaaagatacgctctccccctgatctagtcaacacagaaaattaaacgatatctccatcccctctgaagctagcgaccgaaccctccctggtcaacgacaatggagggcagcactgagcgggtgcacaatcgccctcaggaggacatcggagaaggcaatcatccccgatggcctggtcgcttgacggaggcagggccaagttgtttgtcgtcggggtcaaagtggggaactcgggctggaaggaagaggaaccgatagattagcttcagatgcaatgatcacactcaaccaaagagggaacgaacctgaatggtggacgagtgaattccgtagttgtggagaactcgtcgaatgctatccacagtggccatatactcgttctccctgtcgaccaagacatggacagaggcgacgatcttggcctcactcaactgccagcagtgaagctaaggaaaaggggatagacagacggcgtggtcagcaagacaccaacgatatatgagcacgaaggtcaagaacaaacctcgtggacagagataacaccggaaacagcaagaatactatctcggagatcatccaaagaaaccgtgctaggggtagcctgcaagagaatgaaagacgcggatttcactgatttttggagaaaaaaaaaagggaacaggaccggtcgtcaaaccgacattctaccgccagaaccttctcgaaagacactgagtggaatgcttgctaacctagtgggatggcagagctggcaatgatacaggtgataaggaaagaaatggctggatccgactaggcaacaaagagaggcacgttttcagctgtcaagcgcctgatgaatggcagccggagaggcctgatatgataagagagaaggacatacgtagaatctccactgtcccttgcacaacatgatgatcaatccactggcaattacaccgacgttccccaatgcatcacccaacacgtgcaggaatacaccctccatgttcatgcttccaccatgtccatgaccatgagatttggaactcttgtcctgctcatcagcattcccagaagtcgagtccgagtgagagtgcgcgtggtcggtgtggtcgttctgagccaacagaggctctcgctcgtcaggaccgtgggagtgatcgtggtgcttaatgggggcggtggctccgtagcccatgtgttcggcggcggcaacaacggcagctcgactctgagccggatgtctatttcaggatgcaggtggccaaggattgacgactcagtctttgagaaatctgttttctttttctactttttaaacaaccataatgaaaagacaaaatattcgacgaaccggtaaagagactcgattgaatcagggccctcaatctcgggaagctgagggagaggaggcggcgaaggcttagaatgggagtgggagtgtccaccaccatggccgtgctcatggaagaggaaaagtccagcaatgttggaagccagcccaagggatccgacgattataacgatcatcgggtttgtcacctctgtattggaatcaccaaagaactcgacgataggtcagtatctttgtcgatacacttgaatgtttgtgatacgaatgttccgtctgtcgtgggcatgacttgatacaataatcaaaaccaacagaagaaatgacttaccagtaacctgaatcaatcgctggatgcactcaataaagattgacaaacaaagggcgagaaggagaatcccattggcgagcgcaccaaggatctctgctcgctgccaaccgtaagagtacttggccgaggaagaggttgtggcgagcttgatggcgtagagagcgacgaccagcgagatgatatcactggacaagaaaaggaaggaaacgagaaagaaaggaggagagagagacagagaaagacagattagctaatcttgcaccaggaagaggtcacataaatggtcgtacgtacttgagcatatggaaagagtcggcgataagtgcgatagatccaacggcataacctaagagtatgcgccagtaggcggacgaacagaaagacacacaaacgctactagtcagcccagaataacaatagcatactcaggcaggccagtacatgtctgttctcagctttgagggtactctaaagcagttgaacgtgagcatatgtgtcggcagaggaatccattggccagcacttggaggagacttcacaacaaaacacgcatcttccttgccatactctcaacccgtccagggaaagaccaacccaaaaagacgaaagaagcaaggcagggaagacagaaaaaatgatgatagaaaatgcctcagatgaggagcaggccggggaggagtggacggagaacgaagcaggcatgatatgaccatcgtcgactcggacgtacctccaatgatctcgatgaagaagaacgtggtgtcgatcaccagcagggtgatgattctggcctctctagaaaagcccatgacggatgcgaggatgtatatacggctgggtggtgtatgctggatgatgagtgtcgagttcttgatgggattcgatgatcgttggaaattaggaagaggatggagtggtggctgactaagcggatagtaacgtgcatatatcgttacagcttggttacggctatatgcatctgtgatgtttgtcccacccagcatgtctcttgctcgggcttcgatggaggcgaggagggacacactgaggaagatgaggagacaacacacgagacgggttgcgttctgtaggtgtagagagggagaaggagagacagagagagacagagacagagacagaggtttaggtggagtgtcaatcgttcgtttgcggatgcccatcttcctgttctactcaagaagccatgatatgaccaacgaagacctgatcattctctcagaacaccaaacgagacaaacagagaggccaccagagtgctgagagaacatcttttaataggattgaacaattatctttcatcacttcttgaccgaccgaacccatccttgtcgctagagatcaccaacacagtcatgagaacgaagaaaaaaagtcgatagtgggcgtcagtctttcgccgtgtctgctttcctctctacatagtctgcttcgatacgccctgttctcgagcagaccgcgccgagaaaaaagaaaagggagagaagaacagaacgaacctgcttgtgcttcgggtccttggaacatcgaacgacgtttcggcctttcctatcaacatcgtcatttcgattccatagaagggatggcagaatgtcgatttcatttaggcgtcagtttcgggtgtccttttccgatcattcctccagccaacaaaatatagttcacagatgaacgctttcacaagacagagaaagaaagagcgaacctcttgacgatttggcacccgtcacacaacctcttgatactcgacctcactttgatccctcttgtctgtccaaccaaagatccaaacatcggagaaccattagacaacacggttgctgacgatggtaccgatgaagatgccagagatgatcccgatgcggacggaagggcaagcgggatcgttcggcgagagaggaagagagagaacgagcgtggtttgaggaaggtcgaaggagcccggagggacgtgaggcgagggaacaacttggaaagcatggtatgagtgtatttgtcttgtcctctcttgtttatttccgttgtttctctatctatccaagagcgtgttcggatagatccaccagagagagacgttggggtttgcctttagtttggatgatggaaggagaggaccaaaagagaagtgaagaaaaaatgggaaaaggactacagaaaaacggccaaagtgattacaaggtttgaacaaattcatagtattcattaatttgcttgtaccctcaaaacctcccaacctttcgctcagaaaccaccacgaccgcattcattcgttccctcactcatcatggctactccgacaacagtcacatctagtcagcttcctgaagctgctaacacaccgtcccacacactatcagcatcgactttcaaacgacttcatccccaagcatatctcgaacgattcttcgcagagggttatcgaccggacggaaggaagctttcagactcggacgatgcctggagagatgtcaaagtcaatctaggttcgttctctttgaccttttaaccttagtgttctgtatctttcatctctttgcttgcttctgctgacgtgtgtcgaatcccggaacatctctcctgggaaactcgtacgatctacaatgttcaaacaggatcggtgtccacagctatgggtagttccctcattcgtttaggagaaaccacgattgtctgcggtgtaaaggcagagacgttcgaaccagatttgtataccccaacagacggttgtctaggtaggtattttcttgaacctttggcatctcttgcctgttgtcacaaaggccggcgagaactcacttgagtatgacttcccgcgtacaccacacggtccatacacgcagtcccgaaccttgatctgccagccttgtcatctcctaaattcaagcctgggcctccaggctcagaagctcaacttctaacagacaggctagatcgagttctctcacagttggtctttccgaaacctctttgactcttctagaggaagatgaaagaacagacaaagactgacgaatgcttgtgtcgaatatttcgcttctcagctcctcgatccttcctctctcctcgctctgcatagaaaaaggaaaatcagcttgggtactctatatcgatgcagtctgcatcaattatgatggaaacgtgtgggacgcttgtctattggctgttgtggccgctctaagaaatagtaagcgcacgatccattcgaatctatcatcagaagagagaaaataggaattcttctacttgtccctagaggcgatcgagacctgttcaagaagactaatatgaaacgtatcttccctccgatctcttcctgttcttccacccctaaaaataaaaaaagctcgattgccggtggccagatgggacgacgcaacaggaaggacaatatgctctcgaacagagacagtaccccttcagctcggaaacttcaatcctataagtagcacctttggcgtgttttcctcgtaagaccatctcgttcttctctctttatctttgtcacatcttgatagcgtgaatgccaatacatattctctgcatatatccgtatgggaatcctttgtcttctattatttctagaaaaacaatcttcccagacccgacgtcattcgaagagcctcttctcggatcaaccatcacttgcgtcctcctccagcccctttcttccagcaacaccgacgagaaaaagacgaaagcaaaggttctcttcttggaacaatccggtctaggaggtctatcggtaggcaaccaggctgtaggctcagaagccgtcttggctggggtgattgggaagtcaagaaagagagccaatgtgttgagaacattgatcgaatgagttccaatttctaggtatcctcagggacagctaacgtcgaaacccctgttagaagaacgagggccagagttgaccgtgtcggctgataaggaggcgaacaagatccaaggcataacataagcaaatgcaagcagagagacgatagacaagcgcaatccaaataaaaacacaaaagaaagatagccaagcgatatatgtgtgtagataagattgttcaagcaggagaagaagatgaacgcatgcgaagaaaggaatgtaagctgggaggtggaagaacaaaacccaggtcgaattctgaaaacggaaagaatgagaacgcagcgaacgataaggcgatggcgaaaaagaagagaggcgagtgtgtgtatcaggagtagaagaaatacaaagtagaaaaaatttgtgaaaggagtggctttgggaacaacggagatccaccaaaagtttgaactagaacgtatcaaaacatcaaaaaaaaaacacaaaaaaaaagaagaatagatcaagaaaaactcatcaagaggatgaggagaagaaaaaagatatggatattcttttgtaaatatctcaaaaatgcaaagatgagcaataccggagataacgatgaaggtgtgaggtcaagaggagaaagaagaagaaccaaaggatagagtgcacatggatgaaggtaatagatacatgaatgccgcacagaaagaaaagggaataggacgccaaagaaagactcaatgagaagattctacagcgagccaggaattgttccagtgcggttcgacccgtcatctctctcttgttccaacaaaccatgttccgcttacagcaacaaagacgacaaggcctcagacatcacatctccttcttctcccctagaagctatgagagtatcgtctccttcatcaagaacgtgaacctcagagaccttagacggcgttaataccaatttcgccctcgcccgaatattctcaatcgagtctcgtttgagctgtagtgagattcgccggacggtctccgtcggcacttccgccagcgaaattcgtttggaatgcgctgctcgtgtcgatgaccattcctcaggagattcctcggcgtctgacaaagcccgaggacgagatttaggagacgaggcaggaagagcaggtaatggatgatccaaggatgctcgtccaggaggacctttagaatcagggatcaatatgggtaacgcgttcggcgaggacgatgagtggtctttcgtatcagcaaggaatgttggtggtggtggcggtagcggcgagtcgagaggcttggacaggaacggagcacccaaaggcataatgggtcgaccatctttaggtggaggcacaggaaggtcggatgtactgtcaaagtgaccgagcggaataggatcttcggcagcggaatggaacgagccggtactggattgagtggacgcagatcgcacgaggtcaatcttactatcggatggactgaaatctgtatgcatgctgatctccaatccggggacagtgagtttgggtgagtctgcttggaagtttggcttgtagccacttaaactacttcgggcggcttggtgtgcactgaaataagcatcacagtcagatctagtactcggcatgtcgttgagaagacccagcagaagaagaacatagctaacgaacatgtgcttgactagcttccattcatccgcttcgattcgtagatctttagacaagatttcctcctataggagacacgcagaaggtaggtcagacaagttcatctcgtcactcgatcagcgctttgagctgaacttacatagcagcggaatcgagccaactctatccgaagatgtctgatttttcgtgctaaaggaggaacagcaagttggattcgctctcgagtagccttcttaaagggcgccaaaatcgacaggttatgggctgtacgaagatctattttaagctgggcctcagtggatgcgattttggagagaagattatcgaccttgagctgtgacgtaaatatgaaagtcaatgccgacatgctagttagcgatagctgaagatcaagactttattcgaagaaagaggagtgcctacctggattgcttccgctctggaagcatgttccgatcgcggccttacatttccgaactccctcaaatctgctctaacgcccgagaccttctcaaacgagctcctcggagtcttcaaagcattcacgctgctggacctcgccctagatttgactgggtcgtcccacgctgatggtatattcactcgccgggttgcactgttctcggctgccagctcggccttgacttcgatgaacgcagtctgaagttgctcgggaccttgatcaactggactgagaggtgattcaaggtcgacggcgagaggtcgactcagcgatcgtaaacgaggtccaaagtgtcgggatgcagggagcgaagacgaaagtgaagagggggatgctgtggataaaatttcagatggagcagctgaccaagatttgtctgtcataatgcggccagtacaattgtcagacaactaggtggattagaagacgtttgaaagtaaagcgaccttacctgctgcgataccggaactaaagaatccagagtccaacgttcttgacgtatacgttgtcgattggaccgatctctgatcttccattttcaacgatttcgcatgagaagcagcagcagccgcacctgcccattgagcttggttccccgtcattcccattcctctcatccgaacggaggctgttttgaacgcggcagcataattgattcgagtgatccattcgttcagctcatcgtcgtcccctgcttgtaagagatattggcgaccatgcggcataatgaaccggaaagtgttagaatactgttatttgccgacaaacaagaaaataaagatgagcgcttcatgtcaaaaataggatatagacacaaagtcagcgcagtataaaccttattgtaagatgtctccataacggcgatgcagtcttttacagagaggacttcgtctggcttgaatgatgtcatcttcggcaaaagaagcttgcccccttcacccgcttgacgaccgacgcgggcctcttctgcttgatttcgcaaaacaagagcccaagtaggatctttgaaaaacagaagttgagatccagtcagaatgacactccattccttccatctccgattcgatgctttctttcctccttcgatcaggtcctctgttggatttgacgtgaacgatgggaagagaatgcagttatgagcaggaagagattaatgaaggtttcaaactcttacgattagtcttgagaacttacctttccgactgagtaacccaaacttggtcaacttgagtgtcaaccctttgtctgcaggaccttgagtgtcttctttggttccactgattccgaatcccaaccctgcggatccttttctacctccaggcgcggtcgatcctacagctgcagctggcgctatcatgatcatatctgcctcggagaacgcagtctgcagctcattcgtatccaagtatcccttaggaccaacatacgaaaacggattgtgagtcggaatgtgaggttcgacggatgctcgaagagtatgcgtcagattttgagagataaggtagtaaacgtcgatcttgtttgttttcccggcaaggatagaagaattcgatggaacgctcgagccagaaccgaaatgcgcgatcgtgtgagagttgtatgaggaagaaaatatagatgaggcgttattgttggccgaatgacttgattctggcaggagagctcgttgaccgttgacatccatgtcatcttctataaatacgaaaggagtaaatgtgatattgtcgaagaacgtctggagtttaatacatggaagaaaacgatattaaaatcaggatccaagatgactaagaacattcgtccaaatatatgaaacacttacatccaagacaagaggatttactccatccatccgagtattacgcacgtagtccgctttggtcatcttgttcttgttggatttgttgaatgcatctgtgtgaagcatgatcaacgaaaaagctaggatgtacgggtggtctgagcaaagaaattgattaacactatccgatcagcacgtcgaattttaaatttatgtagttgatgaggaagaagatcgcaaacctttgctgacgaataaacctggatttccgatgatatattgtctagcaaacgcctccatgactctatcaatctgttgagtttctttgggtagtgatacctccatgagtagctgacgaagcgcgatatcgagcgaaatgccagagaggtcaaaactcgacaagtacgttttgagcgcggacgcatgaaattcatctccgctaagaaaaagtccaagaaggaaagcgagaagacaaacggatcaacacttgaagaaagacagactaccaccatacaaatatgacataagaaagaacgagatgaatagaatgtcaaaacaaacctggatgctagtacggtagctacttcacatctaggcacagcctctaacaactttctcagccattcttctggagaccccttctcccgaatgatcggaacgtctctattccatccagttccactcccaccaacctgtgcgggtgtccagctgccagaagaactcgtagtagagcttcttctccgaagcagagacgtaccgcgcttgatcggtgaagtgtgtatagggattgaaggagatgggatcggaaggaatgtgttacttccattgatcgagttggatctcagcgatcggaatccaaaaatggattcggtgttctctccaatgacaggcgtggaaagattttccatcattcctcccgtcatatctccgccggccgtcattgcagatgacccagatgaacctgccgaggaggacaagaaggaagacattctacgcggcgatgccatcggagatcgaccgttgagaggagagattccaggctgaggggaagaggcaccagacgaagaaaaaaccccagaggaacgtcgacggagagagtcaggtcgaaagagcttcaggccaggagacggaaccgggttgagtaacgaaagatcgacaagaggtggagaggttatcgaacgaggacgatttaaccgtcgatctcgagtgggtgttggagggataggcataggaatagacacaggtgatgagggtaatattgagctaggaatcgaagacgaggaacgcgtccgaaggttgggcggcctcaggtttcctaacaatccgagagggtcggcgtcactcgtcttggagtttcttttactcgagggtttatatgtcgatgactctcgagaagcaacatcgcctgagtattttcgttcactctcatccggttcgactgggtgaaacacagagtgagtgccaaaaatagagtccctgagtcgtccaacaactgttgttgatgtccctgttgccttcaacgagaataaggacggccttcgaagcggcgtaggatctttagaagaaggcacggaggctggttctaaaaggaagtattgtttcctgttcaatgacggtgaggacgacgagtcactgttcaacgatccaggttgactggggcgaggatgatatgttgatagactattttttgagggcgatggtgatggcgatggcgataaagaggggtacttgttgtgaaagaggaaatcagactcgaaaggtgttgaagaggaagatgaagacgctgaagctgcaactgccgtctcggatagagatggatcagaaagaagagagcacgaagaggattgtgttggcatggacttggcagaagaaccttgtcgatttgctagcgaggacgatgcgagagaggaagacgacgagatacccgaggaaaggtgattcgaagatgacgttgcaattggtggcacggctgtcgaagatgaagatgtagagttggattgaagatttggtggaggatgacgatccttacggtcatcgtgtttgtcgaaggcaagatatgatgagagtgttctggaccttctacgagaagaacgagatgtcaaagattgagaccgagtaggactaggggcgggagcagcagcagcagcaacaacaacagtaccgccaaccctcttttctggtagccagttgtatgctgtatcttcggcgagaggagtcggactatccgtaatcgatcttcgaccaacgtaagtctcggctgagggatcaactgcttctttcttgctcccttgattatcatcggctgtgcccgacctctgactatcgttcggtcggagtgtgagccctaacgcggtttctatatgagtgttccttttgcgagatccaaaatcgaatgcggagaacctgtgggtattctgtttaggactggacggtggttggctgtaggaagctactgttctagccatggttggctactctgtcttcaagacacggcgtaagggggaggtatatgagatgcggaccgtcttgtgaatgtacaaaagagggaaaagagataatagataccaatgcgatgttgactgttcattcgaaaccgagaaacaagatgatcaggatgtaagaaagcatgcaaccaggtttggatatgtgtatgctgattgttgtcaagatactaactgtaagcacatacactcacaatttgagttttaacgtacgacttcggctaggccctaacctttgtactcccagtaagagtcaatctagaaaaggagtaatttgatggatggagccgtcccagaagtctaagaagagcgtgcttatctacaacaagaccgtatcaagaaacacaaccaagaagagggagggaaaatgagggggaaagctccaaggtcgagctgatgggttcacgataaacagcagccggggaaatcccgaacgaaagaagtcgacgggaaggaaataaaactccgcggtctagaacacttccatctaatggaccattcgcgcaagactcagacaccatctagcaatagcatacatcaatatgatgaagatgacacgacaactcaagaggcatgattgataaaagatatcgtttcaatgaatatttataaggtgaattatatctcgttaagacgaaagatgaaaaggctagtaaaaaactctatagagacaatagagatcaagtacagtatatacaaaggaagaaaaaatcgaactagagtgaaaaagatgagacgccaaaactataactctgcgtcatctccttgaccgaaatccactatcgattcaggtgtgttgtcgactgtcccaggagaatgacgttcactcgactcgtcgttccggctatcagaacgccgttcattgaacaacgcccgtcgaacctgctctcgctgtcctgtacgtgcccatcgatcccgtatggtccatgcgcgcttctgcggcgtcgatccggtcggtatgtcttcggcgaaattggaaacaagatcttccgctgatgcgcggaacacagaaatcgaagtcgtttgcgctgattggaaggtagatagtgagttatgtagatttgattgctattgaaaggaaaaaaaagaaaaacaagaaaaacaagataggagattagatattgagcagatgtctatcggctgaacagtctacaacataaacgaggaaacctacagaagacaagacggcagatgcactcttctctagatcttcggccgaatgaagaaggtatgttcgctgatcttcgttagaactatgggcggtcgcaaccatggaatcaagagacgtcttctgtttcttgcacactttcgtcatacgttccatatctgtattaagagttgaacgagtgagtatgtatctgcaaagagaaggagacgaaagacaagatctgatggcaacaagatcaatatgacaatactcacgaccggtgttgacttgcgatagactggacaatatagactccacctcttgcatctcaacgtcgagcgatgaagaagtttgctgaactagatcttgattacatgtcgagagttcctctaccgccttcgagacgagctatatcataacaagaacgaaccgcaacggaatcgatcaaatcagttgaattgccgaagatatatgtaaagataagcgagaaagccacataccacaggaatctgttccctaagcgccaacacatttcctctacctgctgccagagcttgttgaagaacactttctattctcttcccctcggtctctcttgtgtctcgctcttgccacacagcttcatgcctctcttctaattgagaactcaaaacctggtgttgctccagtgcgctgttgaatcgtcgagagctggcagagtcccgttcgtcaaacagatcattcacaagagacagcagttttgatcgcagtgctttggaagaggcggcgtctgcctcatacgcttgagaaagctgggataacgagacctcaaggctcttagactgtcgagtgtcaatatgagagcaaacccggaagagatgtaagtgtgaagacaaggtcaggttagatggccgatactttatggaaaccgactcacgtcttcttccatctgtcgcgcaagcagcactcgctcggcggccctggctgctctctccgcttccaggaaagtctgtacagagctatcgagcaaatcgaacgaatgtacactctctttcagtggtccatgaacctagaatcacgatatcgatcggatgaacgagtctcgatatcagtaacagattgtggtcccttctttcagatgcgtaaattcaaaatggtacttacctcccgtaacttattagacacgttttctctgatactctccacatgcgtgccgatctgacttttcaaaccgccagcccatacacggaaagatccttcaatctgggagtgtccggattgtagtttcgtggagaagacctggttctcggtcgctgatcgatcgatagttcgactaattgatgaggctgctgaggaaattttgaccgagtcctcattcaaacgtgatacttgggacgcgttagactgttgcaagagaaatgcggtcagcgcccttctgatcatgaattacatgacaggtcaacgatgcataacaagagcagttgcctacttgtagattccgctgtttgaactcttcaagcgttccagaaatcacggcattggtcttccgctgagcaacctgtagatctcccaattgagatatcatggcttgtgagcattgtgaagatttggctccgtgcgaagcgatgagcttctcattggcggacatgacagcccctctccgacctgtaggatatataaacgactcgaaaattgcgcatcagtttgtatacgtagaatgtatgcgaaaatggtttgaaggaaatattgcgttctgaatgaaaccgagcttaccgagcttgccaaagactccctccagatcacctacagctgtagtcgctaccgtttttaattctccagccacgctatctagctgtctctctccctcttcgaatttctcagcgaccttcaactcaacctccagtgctcctttcacccccataagctcctcctctttctgaacgagttcgtcgacccttctgccgatctcttctctggccacaccgagttctgattcttttttcacaaacaattcgagttggtcgtcaagtctggtcttaagcgaatgaagcttcgattctagctgaatcgacttgtgaagagcttctttggcttcagtctcacggagggccttctcattctcccattctaaccactcttgctcggacttgtagactccattcttttcgcgcgaagcctggatgtatgccaacgatcagtttatagtgaaaagacagaaagaagctcaagtctgagagaacagtccgtaccatcagatcagccttaagtcgttcaatctccagcacataatctcgaatgagcgaattttttgtcatccgttggttggcttctggtcggttcatgatccttgtcgcacgcatcgcgtaatcaagtgtcgagatggtttcttctagatttgaccgagaaggtgaaatggtagcgacaatccgggtctttgttcggccaccgagggaatcttgaagtagtctggtcagcttggattctctatcgtggtgtttaaccgcaagaaaagatgttaatgtatacaccggtatttctgttttcaattcaactgatcacttgcgcgtatgggccgattgatagacagaaggatagacgaacctgtagggaacatgtctgcttttgtccactagcgcgttgatgaccctaccgagggtcaacaaactccggttgatcattcctgcctcggcagctcgatctccttcagcgcctgatctaccgacattttcggatcctgcaagatcgacaaggttgaattttccgactttgaggagctcttcgccagtggcagaagaagtttccttgagatgaacagtgatagtgaagattgagtgtgaccgactgttagatttgtcatgatggagaacattgatcggacaaaggacgagacaatgatcaatgaactgttcctatctccaaatatcaacagaagactgaatctgattaagatttgagaacactcacgaagaagctttattcattagtgtctctcctgtctctctccgttcgctaccgatctttaacaagtttagcccacccttcgcactctcaattcctctctcctccacgccttggattaatactcccttccccttttgatcgtcaaagatcttcaatccacctgtacctgctgtattggagcctcctccgaaaggtgccgcaggtgaagtgccgtgggtaaggaggtctcggatctcttcgttataaagttcgacatacgagatcttgaccgaatactctgtaaggggattcgaatccaaatagtggaagagggagtggagagtccttgggatgattccggcttcgtaagaaacagtattatctgggttgatcgccagatcaccttgcatcgtatgactgtcaacatttcaaagcacggatgtgtattcatacgtggttctcatcggttagcgcccagacgaaggactaaaatctgaacgaaaataggatttacgtttttcctgtgcccgtttgtccataggcaaagatagtacaattgtagcctgccaagacctcgtcaacggcctcttgaacaacctcacgatagacttcttcctgatctgcttccgggccaaagactttgtcgaaagaatatgttcgcttcggactagacagaatggttgatgaagaggaaatggcggtgagcagagtggatggggcagtggtctcaagaacgacagttggagcactaggcgtagtcgtaacgacgattggtgacttctcagcaatctcctttgcagaccttccacttgattgagtcgaagcgagtgtgatcgaagaggaccaaaaacaaacaaaatgagtgtaaatagtcgcgccttactcggaaagcgatcagaatatgggttgtcaaagaacgaaccggcaacgaacgacgacctcaatgttcacatctccagcttctttctctgtagcgttgactcctcgactctctactctgattctgcccgttcccgtgcccgtcttgactgttcctccgctattgatatctagcctcgaacttgttctcgaaagagtccctcctccacctccaactgtgcttccagacctggtcatcttgacaggcggtccagaaggaggatccatctttccttgcactcgttcgctcattcgagaagaggtcttttgaggctgagagggttgcacattggttgtctgacgtaggactttcggattgttgctcgtaggaatggatgtagccgagctagaagaagtgatccgcgttgtgcgacgcgccgagagagacatggctgaacttcactttaacctctcggcaagaaagacaagatatcgttaaagaccaactggacaagtaccgagtcgcgtgaggaaaactcaaagaacacggatcgaacgggcaggaatgtatggtggttgatatcgttgtctgcagatgtatggaaatcaaaaacagtcgcgtcggatgtcgcgtcgcgtgtcgcgtgtcgattgacggcttaaccctaacgcgtcacctgtcagtcatcaccattaacccaagacaccatctacagcatatataaatgggaccattgaccttgtgctcttcttctgtttctcatacatctcttcaagaaacgttcgccatgtcaagcgcatctttcacgccgtcgacaccgtcgacacctcatccaagactcatctccaaaatggctgtggtcgcttgttatacagaaggaggaaggagcataggtcatgacgcacatgacggggttgttgtcagcttgttctgcaaggtcaacataaggaagggagggtatgccagacatctgctctttcctggtaagcatctcatcaatttatatcatggtttcattcaaagagagttgaaccgatctgttaatctggaattcgatattcctatcggacagatgagaatatcacactgctctccacttcagcccaccctctggagtcacctcaaaacgcacttctactcaatccccctccaccattaccaattcaagaggccgctcaatatctcaatatacctactactatacaatcttctccttcttcatcaacatcgtctaggactttgagcagatcgcagaaagttaagattgtgatccaggatttctctgtctgcctgatcagtgagggtggaaagagtaagggagacctgcccagatcggccggccggccgatcgagagtggagcgaacgaggaaacgtctaaggcctggttaatcatgttggagtttctgatacctctcaagagtcgtcctccgttgaatcgttatgcggtcagtcctctccttgccccagatagtatttgtacccgcgtccgattgcgcatatactcatatttctgtcacttaaatctcgccggtagatttccataccacttcctcgttgtctatcaaatactctttcttttcggttgcaaggttcatcttcttcagaagaagaggccaacactgcacactccttcttgacgactcctcgtttgttaccgggcccttcatcatcgagatcaaatatcgataggctagaccgtatcctagagggaactttccaaagcaccacctctctcgaaataagatgggcgcctcaacagatgaccttcaatgaatcttctggcaacatctcgataggagcaggagcagtcaggcctgtagcgctcagaaacacacaacagaggaccatctatcacgttatgggagaggagcgaaaggacgaactgataaaagtgaaggtcgaatgggaattgacaagcacagtccattattcaggggtagagaataccgggcatttagatttctcagtcgatgcaccctctgatttcatttgggatgatcttccgttgcttcaggcaaaccgaggattgtcctcctcctcaacccttgttcctcagccgctggatgaatcccatttcacagagactggtcctcagctagaagattccttggtcatctctccaagtcctcttcattcttcccctacttcttctttgaataaactgcgtgtaccgatctcatctgtctccaagaattcactttctagaaaaggatctggagaatcttcatcccatcctagcctactgcgccaacagccaccttcctctgtagacctaggtgatcgcgtggacgcgtcattctctgcattcgatacttctctaagaccctctccgtcaagttctcctatagtcaaacatcaatctccgcttggaaattcgccatcactccatccatctgcgccagcagaattaccaagcggacatcaagccaaggtgttcagattaaacctagatatttcgcaaatccacgtatcacgcgaacctttcgtagtcaatgtatctggaacggtccttttgaaaccatcaacaacgggagaagttgcgctgccagagtttgcaatcgaagtggactggttaggttctgaagcggatctgagagcgagagagtggttgatccaagcgcccaaacaagtcaaagtgtacccgccgtctatagtagaaagactgcctgatcaaagggagggtaaggcttggggggtatcttctttggtagatctcgaaacttcttactctttcgtcgttggtcttcctgtttcaacatctgaagccgatctatcaacagtttctgctactatgtcgccagctagagctattcggagaaaaagttctttgttcgttcgtcaaccttctcctcccttagaaatttacgcctctacttctctggctgctcagctttcctcgagtgaatctctcgttcctttcactggatcaagatcgatcctctctgtctatatggatacgtttctttccatcgactctgcccagaagggcgaacccaagttgtggaatcaactttctaggatgaaagtctcgttgtctccatctaatccttcaacgtctttacacgaagaagacgcattttttgaattcggcatcatcgccggaccttccgtctcgtccgttacttctactcctgcgctcaacacagtgccttttgttcaaatcgtttccattcacgttgatggagtctcgttacctttcactcttcagaaagatccggcactcgacccaggttcagatattgttgctggcgctttaggctacataagagttggattagatgacgagacaagggaagtaggaggacagctggaggtgctttatactgtgtctggactgaggagttcaatagatgggcttcgatcccagaaaaaaggtagtccattgaactgggataggagatcgaacaaggcaacagcgggtgaagggttccaactcgggttaccaagctttgaaaacgaggtcaaatgggaagaaatcacggtccatgtgatagatggtcagttttattttgaattcttgtctctctgagttcttcaccttgctcaagcttcatttatttctacgttataggatacttcctctcaattgacgcgaaatcttcatctccatccttcgttaacactacatcgaagagtgtagtccgttcagtcacgcactcccttccagctttagcgacaccacatctttccgttatgcctctcactagtcccccacttgcatcaaagtcgaatccgacccctgcatctttatcctggtcaagattacctttccttctcctgacgttctggcttttgttttccattggatcagagatcagagcactacgatcgggcatgatcgagatggcagtagagatgagaggaaagaacgagatgattcaacgggcattggaacgatgtgagacagggtaccagcgacccatatcagcttggcaggctccttttgttcctccatcgacatcaccgttgccgctatcttcaccagaacgtttgtctgctgtttcagttacgcgcgcggtttcatcgttcgcgacgtcgggttctgcttctgcttctgcttctgcttctccttcgtctctgtccgatactacgtctgccacaccttttgatatctcctcatcaatcgcctatcgttctcgttcaccctccaccacccaagactacattcatacgcgctccagtgcagaacattctcctcttcgacctaacttcgttcacgtccctatcttccaacctcctcttccgagctcgactcacggctctggcagcctctctccgacatcgtcctacagtttcacaacactcgaccagtttctatcatacacaaagcagctgattaaccaggatgctttcagtcggagactgacagctttgaggcaattagtggggtgggtgctatcaagaatcacgggggagtgatgaatcgacagcccttcacttgctcaattttccatttacatttctaccaaggtatggctaagattgaaaatcaatgcatgttatagtgttctgtctatgcgaatgcgagtgtgtaacgaaaaggagatcgtttatcaagcgagcgagactgaatgaagtaaaggagacagcttagtgccatcaagaatcagatgtcgaggcaaagagtgagacgggcaagaatcagtcatgataattcggcccggtaccgagtccgactgtttttctctgattcgacgatttgtccatcgtgcgcatcaacatcttaccactaccaccatcatcctcaccatcgccatcgccatcgccatcaactatcactcagcgctcttggacccgccgttcttcatctcagaatatacgaatagctgtcaaattagacctagcaggccatctggatgtcggccttcaagctagttatccctatggaaatatgggccgatgtcttgttcttcggagtaggacccccagcacaggagaaagcgatggcggagcatgggaggcgagaacttcgagatcgacgaaagatagtcgttcaggtctgtagaggctggaaggtgtgtgcgatggaaccttctttgtttcagctctgagcgaaaggttcaatgttctgacccctctcttttatctgtcatatcctatagaaggcagcatggaagtacttgttcatagacccttacctccccacacctcaatctctacaccagttcacatctattcttgtttccgccgacaaaaagtgggatgatcttcgacattctccccattctcttccaggtgcttatgttcgaacactcgatctttcccacctctgttacgaagccaaacctgtctctgcatcctcttcctcctctgtctctcgtttggcggatatcgttcatcgaccgtggatgcaaagtcaactgctttgtcaactaattccacttgttccatccgtcgaaactcttgtcttaccttctggagaaggaggtctgatgctttcaagaggaatattccttcgagcgttgaaggagagcgagcttagctcgaacctcaaacggctgaaaggcttaggaatgcttatgaatggagtcattgatggaagaggggtagacccacttgtttcccttctagagggcctcccagctctggaagaacttagtgttgtaggaggtggaggagtggatatgccgccgtcagacgaattcatagaaaacaatccacagccaatgctctacttgaagaacctacaacatctctctctaatcggcattcggtcaagtctattactccaggcgctcattgattcggatctacctgagttaacttccctgcacctcacatcgtatcattcgacagagtgggacttgacgacgcctcttctccagaagcacggatggaagttaaagtcattgacgtttatccatcttccagatttcccccagccagccttgccttttccggaaaatactctcttaatatgcccttcgttagagagccttcagtttgaaactttcccacataacacaccaccttcactctcgttctttgatccgattccacctcctgttcctgctgagacctccgttcgtccagctccgcccccacctccctccaagctccgacatgtcatccttccgcgacctccgaactcaaaacctgcgaccgaaggctacaaacgtctcatgtccgacttgtcccatccgtcggttcttccctcgttatccagcctgacattcacaaagttcaactgggtccaca

SEQ ID NO: 1516 - DNA, 9772 bp, Xanthophyllomyces dendrorhous
caatggaggtagcggaggagcatcgagcgcaggaacgaacggaataatcagagaatgggctatcatgttaggtaaaagaggagtggtcgtgcttgatgggaaaaacaaaccatgtccagacttggccgaagtaggaggcaaatggttacttgccgagttggtcaagagacgaacggtcagtgctctggttggtagggagaggaggagaagaagcgtcagaagttgggatgattccgagcagagcgaggatggagggtaaaatcatgtatgtacttttgtaaacgtaaagaacctggaagttgtaattttcccttgttgtcagccgtctctctttcgacttaatatcgttcccagtcatcagaccctatatatcccctctcctctcttctttgatcaactaaaagttgtactgcttgttttttcatatgatggtttctgtatcttgtccggcttattttcatctggatcttatggctctattctctctgaaaaagcgtcaagctttcttctgcacacattcttagaaagaagatatataaagtaatacaatattccatagctaagcattcgatcaccactctcctctacgtttttcaccctccaaaaccctcagccgatcccacgccgcgtctccatcaacataacaccctttcaaccatctctgcggcccatctctcaggccactgtcctcgatctccttgaatccccttcgagcatgcagtacccgtctgttgtcaaacactacacattcgccttctttaagtgtaagctcgaaaaccaacttgggatctctcaattctttcgcaaacgccttcaaggcatccatcgctacctccgaggagttcggatcaggaggaaaaggagcttggaatggcggtgaataattgacgtgcttgatctccctctgaacatcaagagtcccattatgaacaatacgtgtgggaggaggatagagttcgatgatggggtgagagtgctcaagatgatgcgcgtcgttgatataatgataaggtaccttagccatcgtcagttttcggaagacgtcgggtttgcgctgtcgaaggtcttcagctgcacggaaggaatcaacaaaataggacgctccgcctttcgctcgagctcgaagagaatgaagaaattgaagctgcggagggttttgaaagtacctaggagaggaaaaggtatgcgtttgctgtcagtttgactcgtgtaagaaagtctgagtagaagtgagaaaaacatctcacaagagatccatgtgaagtcccaatggaacgtctgtataagctacgttccttcctcgatcgcctagcgatctgacgtcccacgtctgtccgtagaacgtatgcctgagctctcctatacgattggccagcgctcgaagctcacacgtatcgttctctgtctgatctgtaggtacgtctcgtataaaagcaatcccatgggtagctagctgtcgaagtacagtatggagtgctcgaggtgtaaacttaaaatcctcgtaagacgtccagagcgtctggaggtcttttaaatccgacgctacccacgggattgatttcggtaccaacggtgcttcttctttggtgcgcgagaggaagaccaaaggaatcaaagagtatatatttgccccgaccatccttctagcaagtgccttggcggactgtgagttctttcgaagaccggtgccctcccaccgaaacttcaggcaaggtcctagttcagcagccacggtctcacccatcgctttcagttccgaaacgtttaccactgtgatcggacgcttggtcgaatcttcgtcgatcaatcggatggtaggatctggctcgtcactctggtgtttcttttgtcgagttgaagcatcaacagaatataacgagacatcagaatctcgaacccatcgggccgagaacgtctttcggtcgatgcctagagatggacatgttagagtgaatgttgtgctgggagtatcgatcttctttcccgatgaagcgcgagaaggagagagaaaaggttgagaaaaaacggtaattgttgattgaggatcgattaattggtaagaggtaccttcgaggcagcatatagactggtgtcaacaatagaataccggagaagatgatcaaggagagacaggagagagcaagactgactactggaggacagccgatcagaagatctttgagagataccaggcggagctacacttgttttaggaggagaaggtcttggtcttgagagcggtgtacgagatgatctcgattcatagaatgtacggtccgaggacggaggactcgacttgttgggcggccgttggttcaagaagctagacagactttctgagcgaacgtgttgtttctcttccggacataagagagtcagcgttggtgagagatgtctacggaaaggaacctgaacaaaaggagagcttactcatgatcgagtccgccaggctgagcccagaaggtatagatggtcctctgtgaggtgtcacacctgggttgccctgagtcgaatcataagagatttcagcagctgccgtggaaaactcctttagtatgaagacgaaaggccgacagattcctgaaggaagaactgattttggtattgaaagcttggacttgggtaaatatataggatgcatggttgacgagtgatggtgatggatggttgcttgggtgtcggagatttcaaggtagatggagatcaaggtgtgttcggcggtcggtccgttcgtcagccggtgtaaccggacgaaacctttcaattggattccttctaattagtcgaaattcacattgcaatacctgatgctcgttcttcatctggcatcgttttctcagtccacctgctctagctctttaacacagcctgcttgaccatgttaattcattagactgttcattttatagtcgtttcttttcacgtagcatccaggcaattccatagactgcgccactataggcgatcagaattcccacggcctgtacattagtcatttccagactattaattgacaagttagtcaggccggtcaacagatttgcctgtagaagaacataggggggagcaatccgagttaagggatgaagaaacgagatttaggaaagcaaactcggtgggtcacatacaatcaggaagacaagctgagcgttcgtgttaccagcagccaacagaagcggcacactcgcacctcgattcgacacaatctctctggaagattcaattgtagttggctcgaacgctagttgaatcgcaaggtaacctaagagaaatgtagtgttgaacgctgtaatccatagaacgtatggcagatttgcctgtaaattaaagtaaaccgaaaaatagcgtgttagtcgaacagggcagactagataaagaataacactacgagaaacgacaagagattcttaccagtcgccggctaacctgaacgccccagccatctactccacaacccattgtgatccagagaagcgtccaccataccgccgacagaccaacaagcacgggtacgagagacccaggtttagatatcgtttttgacgtgggacgacgtaaactgtaggcaaatcttgccgagggaggtaggatgtattgtccgagatcgagaccgagaagatagagagcgagatagcctgggaaggaaacgatgccctctttgttcatcgtcaagaggttggttcgtggactgttgatcgcccattgctcgagtccgtagaaggagagcaacgcctgatggactatcgtcgagtgaaaagagagaaagtagaagggtagagagagagagatcaatagatggacgaagaagagtaaagataagaaagcagacgagcgcggagggaaaagcgtatttaccaagggtaaggatgattccgaaagccgaaaagttgaggtatcgggtgagcggatagatgagtacgccaaatggagggacgagtcccatagtaaagaaaaagttccaatgaacgccgtactctgtgacgtgctcctgtgtaccgaaggaagaacccaagaaagaaaaaatcgagtgagaagaacgtagaccaaaaccaactaagtccgatggagcgttgtcacatacagggtatttagcaccttttaccatagccacccttacaagccccattacgactgtccatgcgttttttctaatggacgtcagtacagcaggaatgatgctaattggtcgagtcgacgacgatgccggccgaagaaatggtctagccgagatgatccccaaagacatgacaaaagaaccaacaccgacgtccatctagagattgttcacacagcccatcgaataagagccgacaagatgaaagaagttagttctgcaactagcgcatacacataacacacgctagaaaacgacggcagagattaggaagaggaaacgaacgaccgaggtgccaaacaactctgtcttcccaaactctcttgggaagatattgaagtctacagcgaggatagaaagcacagtgatgaccatcatatgtgcccgataaaccgtcaggaaggactgtgtcggcgagcgcggttccaccgcctcaattttcaccttggtctcattggaattttgtttgagcgaactcttcttccgagggctcctgccgagaggtttatccatggtggctcgtttgacggctcgcttgagcgtatccatatctggagggtcctgtatctcatcctctaatttttctacaaggacatactcttgacctgtgtcttttccgtctactctctcttcctcttcatctttctcgtccacctcaatctcatcttcatcctcgtcctcatccgctgccaagaacctccttctccttaatccctcatctctctctctggcaatctctagactgaccggcttcaggctattcatgcctccagtaacaacgggaaccgcccaggatgcaatagccagcccaacgagagagcctacaaacgaccaaggttcgccagagtagatggtgagcgccaagagaagtggaagaacggatgtcgcgtattcaaacagaaatcttccgacagccgagaacgttggtgttgacgtgaatgttgatgttggcaccgatgaggatattgatgggaatgacgagttgaacttatggtacaagcaagagtaaaggagataagatgcctatggacaatcaaaatatcagccctcaatcagtcaaactttccaccgtgagagccattaatgttgtctctgcagaaagaaaaagatgaagagaacagaagcaaaggccaaaagagaaaaggaatttaagaaaggaagagagcatactgacgagtccaacacctgtaacagcgttgatcgtccctatagatgaccctgttccacccgagacaaaagactccttggcgtctttaaacgacatggtctttctaaatgcaagagagaagaagatgtccctcttccttttctcttcagtgtttcctctagctgtttggtctcgtcgtggtgtgttatgtgatgaatgtaatggatgatgacttaactcccaagtaatgttttcttgctggctgagattagataagcaaaaattactggtagacacagtgtatgagaatctctttatgattgtcatctttggatagatttcatatataacacacaaccgaccatcccatcaagaaagaggacatggagcaggaggacatgaagcaagaggacatgaagcaaaagcactatatgaaaggactacatagaaagtttgcaggtatgttgacctcgaccaatacctaaatatcgacctctgaccaaagtctcggtcggatccaaatctctaacggtcgcctgaggactgcctctttccacatcaaatcttgtgggtccgataatgaatcgggaagagaatcgaggaaatatcggtgtgaaagcatgaggatgaacatcttaagttcaagcacctggtttgcaaggaggccagcgagcgaacaatttcaagcgtgatagaggataaggcacgaacatagatcagacaagaaagatcaagccgagaatagagagacatgaggaattcactaagaaaaagaaaatccaagacgaaagtaaagggacatacagcgagcttctgtccgaaacaagctcttggtccagcgccaaatggcatacttggccccgcgttcggatcaaacttcccattcgaatctatccaacgttccggactgaaatcaatagaggtaacgaagagaaacagaaaaggaggaaacagacaggtcgttaatcgaatttgataattcaagaaatgggagaacggtgatagagtcaaggaccatctagacaaaggccgaaatacatacacaaacgaagccaaattgccgtcgtcgctccatcgaaacctgctgtttttcttcgaagtcgagctcttctcctcatcgtcaacctccgtatcggtgagcgtgtcaagatcgatcaatgtgtttgatttggtagcctctcccgccatgccgagcataaggagaatctcggtgttcttcggaacaacctgtccataaatgaccgtttcttccgagtctgtttcgtgattcacagaatgagatgccacatcaaacgatttttacctcatactgaagtcagaaggagaaaaaataagtgacttggatgacaaagttccaaggaaaagacgaactagtccgagcggttgtcatggttgtcttcgccacgcgcaaaacttcttgaactattgcgtctaaatctgaatatctcatacacacacgtatacagccacgatcagttagtgcgtgaaaccttattaaaatgatgtgaggagagaagaatgagtaagaaagactaagacccacagggagctttgcccgagttgatgtcctcatactgagcttctcgttcctctagctccggcagagcatccttaatatccttatgaagcttgcgctgaatatgtggattttgagtgaggaaccttatagcccagccaattgaagacgagactgattcatcaccctttaagtgatagaacagcgccaaaaagagcggagttaaaagcaaaaaagggccaatcgttaagcaatcaagacgaacagttgaacccgctaggaagaaagaggaacgtacagcgaatagtaaagtggccatttcatctctgatctcctctactgtcatcatcgcttttttaccctgttcttgctcgaattcgtattctttcgcgagcaccatatcaagcagacatccctggttcctctctgatgctaccgatgaagcgactgagcggatagtctgtcttccttcgatgatagcttgattgagtaccttatggatgagacgctccgccttactgaaggaagtaaatgggagtcgtttgaggaagtaagagaatcgagggaaatttgattcgataggaagtgactagggacgaagagagagatcgaggaggtgtttcagatgactgtgagacctccagattacaaagtcaagaggaacactgaaacgtacgttgacatatagcgagcttgcccagccgagctggcttctttctataggaaattcattgacaccagatttgcctttcgacttgacgactgctatagtagattccaattgatggtatcccttgccgaacgcgactttggagattatatccttggatgagtttcaagaatgattgaaaaaaatccgatacacaatgtgtgacaagaagtgtgagcaaaggcgaccgcatccgtgaactcatgagaagaaaaggagaccagttttgatatctcacgctagctaacagactgatatctggcatgatctcgaaacagccttcttccactggtcgtgcggtcggttcccccagcatctgacgtttcatttcccatcttgaaatgaagttatcagtaaagatgaggaatttatcaactgcgtgatacacgtttttacaagtctaagaggatggagcttaaaagaagaaggcgcatacaggatgaataatttttcagcggttcgcaccatcccgggcgatagatgtttcaagttttttgggctcatcaccggtccgattattcgtcggtgatgcttcggttatgaatgcgtttgattttatttcattttttgaatatagaccaaggatgtttgagtcagttaagatagaaagcggagatctcgttgtggttggaggaatcttaaagacctactctccatgttgcatctgtgaacaatcagaatacaatacacggcaataagaaagtgatcggattttcagattcagcatcccaaaacaagattcatacttgtctgcaaagaaaaggatccccctttttagtcagaagaattgtgaatgatctcgggtcagcgtcgttgtctggctcatctgatcagcagaatcggaaagagaagaaaggggcaatcagccttacccggtatgataggaatgaaaacgttaacgaatgagtcggaacgtctaaacaacggatccttcttcataactgttctcggacacagacgtcaaactagacggctttggtgatgatgaagagagaatgaaacctccgctcactatcttcgatcaggaacggatcgcagacaaccaatgtgggctcccaggcgacaaagttgaattgataaaagcctggagaaaacagcgagaaaggatcaatatgaatatcagtatcgaatgaaattcgagatatttgtgacttgtaacacaaaagagcttggggaagacaaataagacatgcctcctgggaacttttcactaagttcagcgtaataaggatggaatcttttggtccgtttgtagtacttgagcatgggtcttaagtctccgaaaagccattcggttgattctagatggggaatgccagggatccgtttgatggctaatctgcggtatagagcgtatgctgagctggctacaagcaaaacgagacccaagatccagagcattgcaacggtagagataggtaattgcgatgaatcgaattcaaacagataaagacaaagagaagacttgtcgagacgatcaaggtcaatcatcagaacggaaagagactgagacggatgagattgaagcaatccttatacagaatgtcaaccatatcaattagcgatgcaggatgaatctcggatgagtgtcagtaaagcagagataaggtcagtacgatagattgttcggggcactattctattcagtgcagatgtatcaatatggctgcatgagagcaatctgaaccgatggtggttgatacatggccctgctggacccgggtgtcctcgggccactaacccaccaaaaactcatggctcatgagcatagtttgcctccaccgatgtgacagttccggtcctagcgtcttcctcagcatcagtggtagtcgtattaaacaccagcattttcgctcccttgtttttgtcctagtgaagggctaggtccaacatgttgcgcgacaaattgtcttccctgttccatcaagccagagatactaaccgaaaggtggtggttacacagaagaacaatcacacaaggaacacaatgacatcacacttacattgcaggttacatctcaactcacatttcaccccgacgagacaccagcatgctatccaccgatgttgtggccctaattacataattgccggaccgacccctttcggaccccttgtgctgcgcgactaaataaagaaacgattgccaagacgtgcctagtgatatttcccctcgtctatctgtgccatctgccagagcgagttgacaaagcttgtaggtcgtcgctctttttgtccttcttttcttttttttcctcttccttcttcttctcttcttgcgtgcct

SEQ ID NO: 1517 - DNA, 84297 bp, Xanthophyllomyces dendrorhous
tcttgcgtgccttctctgttgtcacacattccttcgttcattcattcatactctttcttcgctcgggtagttgagaaagcagtaaaggaacagttcgactcacgctcgtacatcacctcacacacaattcatgtcctacgccttctcccacccggggaacgcaatctcaagcgactatccggttagacgatccagccctcctccgttctcgtcctcgtccaaccaacaaacaccgatgtcatcggcaaatccgtccatggtgcaccagccgttctacagcctcaacgacggcgacaacacccctggccagtccatggttggactcattccagagtctcacaggacagagaccctgatggataacagaccgtaccaaactaacggctactcacctgccagtccagctagctcggattttcagctcggatctcccaccggttatcctcaggtactgttgcctttttctttcttcttcttcactcatgatttgttgacatcatgtgctttcctgcctgtcaaaacacgcacatgcatacctagggctcgatctcgagcttcaggagcatgcagagtagcgtgttgaacacgcctctttctggaaagccaacgatatcagaaaaggttagtctgatttcaaacaccgaagactgatgcgttcctttgactagactcacttcttgtttcttcgttcttcattatcatcagtatactctcccagcagatcctgccctctgggcccgatcagacagtcctgaaccagatggtatgttgttctttgctcttggttcgattgttcacagtcgccttggacctttatctccaatcgtcaaaaacagggaaacaacagaatacttactcttcactccccctcgccttaaaagactatctccataatcccgacccaaagcgagaccataagaacgataacgccggcactatcttaacggttcgagggctttggaatctgggctgtttgctcatcctgggagcgtctttaacgatggtcagtccactactggtctattgtggagctctctagttacgagacgtatagaagccgtttcttggaacacatatttaacatatacacatgtcctctgtgggtcactgtcctccataattcgtcgtttgtcatttggttttggccatcacagcttttgtaagtattgttccttctcacatccattatagacacatcgatccatttgactcaacggcaatctccttccttcttcttatggcagcgctggctaccctcttgtgacagcattcacaaagagcgacggaaccacccttggagctttcaagtcagtgcattcttttttggctttcctttttttggtggcgcatcgtttgtcgttcgtcgctcaacagttttattgaaccacatgttctgtacctttcctttcagccttggaggagtgaatggttcaggtaagagaacggcttcacttattctgttcgaatgattgtgatggctcaaaattcgctcctgttgaaacaatcgatcaggtcaagtcccgcagactatcggaagtacgtcgaagcccctatctggacatctctcttctcattcaatcatcttgtttctataagcttacctacaaagtcgccatttgttctcttctcctatcggtcattagatttcggactaattgataaagacaccccgaaagacgcctatactattaagtccaactcaggagaaacttgggagcttcagttctcagatgagtttaacgaagacggaagatccttctgggccggtgacgatcccttctgggaggcacttgtgcgcagctttcttcctactcctcatgtttgcaagcatcgactgacaccgaaaccggccaaatcatttaggatcttcacgcttggtcgacaaatgatttagaatactacgatccgagaatggtcactactaccaacggaacgctcgaacttacattgaccacggtggatgatccaagtttaaaccatggtttgaactatactggagcttccattcagagttggaagtatgctaatttactgtctaatttttacgtcatccgtcttttgtttgtcggccaacctgactaacaatgggcttgttactcaattagcaaattttgcttccaagggggccgattagaggcaaaagttagactgcctggaaaagcttcgatctatggactttgggtgagtttgttttatctcaatttatgttgtagcgggtttgatcctcgtttgctgatagatgattctcgcttggttcgtttgttttagcccgctttttgggtaagctagataacgttatctttgtaaagaggattcgaggatggaatgcttaatcatcttgcatttgtgaccaattttccaagacaatgggcaacttgggtcgagttggctatggagggtgagtctttttatcggacggtgctgcttttccggatctttgttggagaacgatttcttatcacagcaatatgcccttgctgcgaactctttaatcgattcagaacgctcgagggaatgtggccatacacttacaacacttgcgagtaagtgtcgtttgtatcatcgaaattacctatgctttagatctagtatcttactagcgagtttcttcttcctttctcattacctttcttttctagtgttggaacgctcaaaaatcagacgctcaatggtttaccctcactcgccatgacatccggaacggactcgagcacagataatgtgctctcgtatcttcctggacagagactgtctcggtgtacctgcccgaatgataagactcatcctggacccaaaaactcagatggaacgtggatggggagatccgcgcccgaggtcagtcaatcattcatacaaacatcttctgtcatcgtcgtatcattcgttgactgatcaatcttaatcatggttcgcttcagatcgatgtgtttgaggtatgtgtgctcgctttcaagtagagcctcaaacgtcgcatctagctgatatcgcgtttctgctcactcctgccattgcaggctcaaacctcgtcagttacgcaaaaaggttcgcatggcctatatctctataattgactgattttttttcacagtttcgaggctgattcatctcattatacggctcttcaggcgcggtctctcagtccgctcaatgggctccgttcaaccctgtacgctttctctatcaatcttctcttccaatcccttgttctgtcatgttgaattggctttcccgtcgaggggggttttcttatctgtagcactatatctgggataatgcgacctatgcagagattacagatccaacaattaccgagttgaacacgtaccgaggaggaagttagttctctttcaactcttcttcggagactcacgctcgctggtgaaacctgaattcaaactgacgctattggcattcttatctgactactaccttttatctaatcagctatgcaagagacgtcatctggagtgtcgaccactgaccagaactgctaccagttaaccaaggatggacaaccgggctgctacactgtatatgcgttcgagtagtacgtacaatactacataagttctgggcagtcttcttaatcatactcgagcttgaccttcatacactggtatctctatctcttagcaaaacgggagacgacggatatatctcgtggttcaacgatgacaaactgtacgttttagtcttgtatcttcgtgagtgaagttggacttgagtgattgctgagctttgaggtttcaatgtcaatattctctctcgcctcttctcagagcttggacatacaaggagggtggatttgcagccaatgcagatttaggtattggtaaccggccgattccttacgagccgatggtcagtccaatttctaatcttttttggtctgacttggcgccttccgaataatcgaatcaaaatgattagtagttgatctcctctctgctttgccctcgatttccttttgattaacgtgtctttggacattagtatatcctgtttaatttggccatgtcttacaacttcggaggcattgacctcgatggtttggcagtaagtattttctaaatttttctcgtcacgaaaaaaaaagctgtacatgctcaacggatctcgtttgcttgctcgttccataggaaatctggccggtcaagatgaatgttgattacgtgagggtttatcgtgagtgtattttctctaatatctgcatctgccactgatgtgaagtgactgataagagctaagtgtatactgatcactacattcatcttgtctgtctgcttatgtgaatgtagaggacccaaaccgaaaggcaatcggctgtgacccggatgacgcgccgacgtcaaagtacattgcactctatgactatgcattcacgaatgagaacatgacgactgtaagttactttctcctcatcactcaccctgtgggtcgttccaagcggcctgtcggtcgtctgtctgagagaattagagatttcgggcttctgacaatttgttcttcatgtctttcttgactgaaacagtgggaccaggtatgttgaaccccgcgtctacacattgtcttgtttctgaccgagttgctgatcctttctgtttgttcgtcgtattctttcgtcagatgaccaacaacgcttctaagcctggtaacagtctacttgtgagttttccttgccggcttcgcacagaagttgaagctcgagtatcgtgaagctgaacgcattctctgctaccctttttgttggcccccttacagggcgaatgctaaacaagagacttttgcctttcagaagttgcatagcatgcttcttcacttctttccatcccagtacattgcatctttctttcatgtctattatttcttttctctgttatcgatcaaatttgtttgctctttagaaacctcctttcatacccgtttagagtttctatcggttcatcctcactttgtctttttattcatcgtcgtatcattccttcctcttttcttgaccccttccttatatcttcttcctctgcttgcccatcatcagtgtatgagcgcacttggactacttcatctttacttgcccccgcccctctttttctctctttccatcctgttcatcacactcttactttctctttcaccgtttttaaccttccatcgtgaaacacagctgagccgatcggtcagtcgatcaatttgttcatattcgaatgtggacatgtgtaggtagaacacgattggcgctgctggccatgatctttgtctgaaagttcgacttgactgttctgaaatcttcatttcatctccctccaaaaccatacctattctttaccttattcctcttttttttccccatcgtggttgacctgaccagacatttctatgcatgtattacggcaattttgctagatttgctgtatttccaacttggatatggaacagacgtcccaggcttctgactaaagaaagacaaacaacaaaccggcaagaagaaagacgaggggatggaaggatctagaacgggaaggatgtgagagtagtctaggtctaaaggtgagtcatcgtttctaaccctccgatcatctacctgtgttccaccagaaattccaggctcgctcttgatccagctatttcaatcagacatcaaatactctgtcacatctaaaccaattcagtataccgactgctcttggacgagtataagccttttcgtattcctggacaggtctggattgtgttttatcccttttgatgattagtccggatatccggcgtccacgttcacgttcgcgtccacgtctctcttgatgcacttaatacgatcgacggaaatgacaacatccacaaccccttccaatccgccttctcgtccggattctccggtaggttcggagtcaattccagactcgaattcaaagccagaaattcagccgccggccaggaacaagaagacgagaacgaggacgggctgtctcgtatgtaggaaacgcaagagcaaatgtggggaagaaaaaccaagttgtcaccgatgcatgagagccgggatggaatgcgtttggccggtaatcacaagcaggttaacagcttcccaagcttgggtcaaggttgttccggaaggaggcaacggcggcagcggcagtggcagtctgactgaggaaagcccagagtgttcggcgttgacagttgtctcgccggagaagcaacaccctctcattgaacggttgcacggtcgggacggtgcttgggatgaacaaaacaagggagcagagagagacagggatgaggatgggcatatgttgttgattgctcctacgtctgagctggagttgaattatccagattcaaacgaacgatttctcgttagttgacatttcttttaaatattcatatcttttttcaaggcgacgtgttctcaagtggctgtcctgtgttctataatcttatgggaacgaccagctccgacatgcactgaatgcggtaaagtcatggccgtcattcatggccatcactcctgacccgaaggttggcaagtttagcccaatcgaactctgtatgcctttcctcgacatacaacattttctcagtattcctcgaggatcatcgaccgcaacggatgccgtttcgctttccttgttgtcaatagccgctgttcatctttcttatcttcatcacgtttcctccgtcgaagctttgttgaatcaagattcgtctggtgggcagatcagcttggcagaaacagagaggtatgccaatatgggtgatgctttagtcaccggttcactcgccctggcagagagtttcatgaacattcaacaaatcaagggattgtcgtcgatatcagggaccggatcaaaaatcgatgcagagacggggatggacatgttgttggccgcttgtttgaacaacatactttcgagatgtcttgccggcggaaatggaggaagagaatttttgaaccttgcaggtcggatcatcagaatgagaggtggaccgaagaacatgctggacgcggctatcaagatcagaggcgggacgaggaagtcattcagaaggaaaaaagccttgatcgaaagtatctggtcgtgggaactttgtagtacgctcatcctccttctcctcacaacgttcgcgctacagtgcgagcctcgttgttgatatagatcaaaacgctgatatcaaaaaaaaaatatccatgtactcaggctcaatttcagcaggaagagtacccgattcatattcagatacccttcaatcttggatcttcaatcccgaaccgggacctatcaacggtatggagatggacgaaggcgagtgggacattctagaatgtatcatgggcttgagtcgtagtcttctagagctgttatccagagtaagctcttttcttctttccttgttcacttcttcttgcgatacttcaaacctcccgaatcctgatcaatttggtaccaatgtcaaggtgaattcactctacgctcattctcacccactgacatcaatccctggaaagccgattcaacgcccggtggagattgatctattttggaaaatccaagcatggaagctgctcgttgaactcgacatccgtgcaaaagacatcagtcatcaattcggacataaaagacctcaggactcggatatgggacgactggaattaggaaacattatctggattcgaacaacggaggtttgtctcatttccgatatccaagttggacttacaaccctttgagctttgactgacggctttcctctttcattatcgatgattttggtagatgattttgaagatggacttactagctgtccatccatcagacccagaaactcttttcagagcgcgagacatcatcgaccttgtcaactactgtcatagtaagaaatttgtgatgttgttgtacgttttttcacttacttcgtctctatttcaggtttctctcaattctgagaaggtattcaccctcccgatcttgcactatctattggcgttatcgtcagattattatggccgatcattgtcgctggttcagtcttccaagaaacaaaggacagagatcaagccttgacggctttaaggtctctcaggtatgttgctttcttctttcccaattttatacaccgtctaatctttttttttgtcctccattctgtcttggtttggatgcgaatgctcgtagatctgtatgctgcttcgatctagattctgggtttgccatcatacatcaggttagctcatcaatatccgtatacacgtctttctgaggagaagatttgttgtgttccgttgctgatgcaaatgtatttatatgtaggtctgggatgctagagacaatggcaatgaatgggcttcatggagagatgttgctattggctctggagatggatttattattggctgatcaggtcttcttctctggttgtactttggtactgttctgctccaataataagaaaattttggctgtgtaatatgttcacttcgaattatagatatatatgtgattgactacgtggactcaagtatattgggtggctacttcttcaagatctccacaagcaaatacatcgatatatccggttacgcatatgcctctatcctgtgctcttggacatggctgaagcgaatactgctccccgtctgtattttgcgctaatcaataagcagatcttcccaatctcgtacccagcagtcgatcagattgatgatactttcttcctcctcctcctcctcatatttccccgattcaacccacttctcagtccattcctccatttcctctatccacatactgacgtcttcaatggacccaaatctcgattgaagatgttcgatccagtcttttttcgatagtatctgaaaagaaggatacatcgaactcttcagcttatccaacaaggtgccccatctgatgaacttcatttttggaatgcccaaactagatgcttgagcatccagctcctcttcaggaacaacaaagaagatccggtcaacaattgaggttgctgcttggtctaatgccatccagggaatccggatgaagaggggaatgtcaggcaaggatcgagttatgaagcctgctttaaggattcttcctaaaacgttcgaatgagaccatataccgtgttgaacacgtggaagcagaggagggatagggtgaatggtactgtgtagagagtggtggcttgatatagtttggacgatgcgcgagattatgttcagattaacatcaagttacactcaagtactaaaaccggaaaagaaccataaacaggaaggataaaggatagataggattgactcacctcaatcaatggttcacttcggaaatccggaatcgtttctcgatgttcagacatagcacaagatggactgggtacagaacctggaggctcaatgaagtcgcaggggccatgcctaggactgatgaaatgaaaattcttctgcctccttgccagaccgattttgcataacagaagtgtcactgtttgatttcgtgatatttttgattttgttggaagaaggatgttcaattttaaagaaatgtatgtgtgtttcaacaagcaagtctctttgcaaagttctgactgaagtacttacgttgaattaaatcctcttccggatcctccgaaccacagacgatgatagtgtcaactcctccttctagcccgttcttagcctttatattcaatccttcgccggtaggaccatcccattcaatcacttgaacatcaacttgatctatcccacccatgatcgccggcacgttgtaccctctagacccaagagaacctactagtctagcatatgcttcttctgtggaagcgcctcggacaacaacagtgattgtctcaagttcggaagggaaggggcgtcgagtgagacgttcgagaagcgcgcaaatcaaagatgatccatcggggccggccaggaggagatgtcgagtgtcagaagaaggaagatggccaagaagaaaggacggttcgtcggacaacgaaatcgaggagagaaagttggaaacatgggtgtttatgatatcatctccatactcgtatctggttggagtatccgaaggtatactacgggaagtcgattgagtgggaagagatgaacattgttggcctgcttcagagagtataggggttgatagatgttgcacaacatcacggagcgacatctcagggtcccaaggcttttctatcgggatagccaaccgagaggcaagctctgtttggaaggagagatcgtgagaggtagataagccggtatatcctagatcgttgagtgtgagatcaaggatagagggcagggtacgcagggcagctgagaggatggcatcagcgatagattgttggaggaagggaagaggggccattggtgcatgatcactgcgacggatgtttgtgctcatcacgaccagtattggacagttgtagagtaaaagaacaagacgatgtttttgccagctgtgtcggagagaggagacagttttggtcaatattagatcggaacacaaccatctccgtgcatcagagtataaaaacagaaagcttatccaagcctgtcgctttccgctctcgaggacaaattgatgattcacaccttcctcagttcgcctgttgtcgtatggagtacggctgtagattgggagtcccaagacgtggtgaaatgttagggtgatcgttgagagacagtttgaattgtttcccagtgacggcctcgacattctctgaaagtcaacacagatgttgagcaacgaggaagaaattcgagagtcagattagataaggattggtaaccatgtgtagccagatggtaacattgttgaagggagccccctgctcttgtaccatcaacaggatctaacacaagaatcagcaaagctaacaacttgcatcaaactgttctcctctcactctctccttcttcccagcctctctctagactcatgccgaaacgtgcaaagaagagaggaagaccacgtgtgaggccggtgacaccgccaatcgagcaaatcccaagaaaatacgcggaggatgatgatttatcggcctggttcgacaacaatgacggcttgaaatctgacgaagaatggattgaggatgaggttccagtcgaagacctaaatccaacctgggctgaatttagaatgacttttgctgaaagttcgttcatcgcctttgttgactccttgaggaacaagctcagttgcttcctcatcagattgaaaggagagagaaactaaccgttatcgatctttcaaacgcgtcgcatccacctctcgtgtctcacctcacctcacgtcctactcctactctctttcttcttcagttgttgatcagcttcccatagaactccaacggacatacacggttcttcgtgatcttgacttacaagctgagcaacacaagactgagcaggaacggttgtttcgagaatatgtttctgcacgcgttcgaatacatcatcaaacgtcgaccatgaagtcggaggtacccgttaacaggcctccggaacccatcccgccaaatgagctcttggacaggccgtctcttcgtctagaggacgcatccgatacaggagaaaaagagaggctattcacaactgaagagaacagagggacgggattgaaagatgaagtcgatgcaaagacaattttcagaacaaacgggtcatgttcaaatcaatgtacagtacctctacattcttgagcaaacaatgtactcgatctctgacaatgacttgcattttgatccataagctccatccgttttacccagcacttcttcaaccagaactgtcacgaatttcagcttaacagaacatccacatccgcccataattgctgacccaccacttattgaaacgtcgccgaatgaaattctcgctctgatcacccagcattgtcaattaggcatcaaatgcgcagaagagaagttcgcgatggcctctggcgcgtatcaacgtgtggaccggcatattcggcgacttgatgtcgaactcgaggctcacaagctctccattcaggctcaaatggaagcagcgctaaggaaggataagaggaagcttggggtcgacgaaaattcggaccttgatggagaaggtgaagaagtggatgtcgacgacttggacggagcagaagagcttagagctgaagacagaaatggcgaaattgatgaagacgccctccaaacgaccaatcccaggcgcgcctctcgaggaaaagcatattcatattccaagacgacatcaacacccaaaacaaaatcgattgcaacaacggcgacaacgccatcgagcgcgaataagtcgcataagcgtaaaatcaaaggatcgatcgaacctactgttcaggttgatatagagagtgagcaggtgaaagcagtcggacttgagtctgagctaggtatggttaatggtaagaaggagattgtcagaggaaagctcgaaggaatgaaagtcaccgagtacgtgcccaactttgttgtgtttcttctctcttttgaattctttgagtttatcatgtcgaacgatggtggttactgatgtgtccggcgaaacaatgttatagtcatgagccgagatactgctattgtaacgacgtttcgtacggcgaggtgtgtgaattttcatgaaccgacaatcgttgacttgaacttacgagatcttgttcttgtctgctaatcgaattctgcaacgtcttctagatggtcgcttgcgacgtaagtttccgttctatcgagagagtcttgtatattgttcaaatgcgatcagagagacccatcttctctccctttcatctcttttcttctcacaaactaaagaacgacgattgtgccatcgagtggttccatatatcatgctgtgtcagttctttctttcacattctatcgcgtcatgacttgtctggtctttcttaatgttcttctttctttcgaaacatatagggcatgaccaaagtccctacaggtgacttttctctcaatctctacctctcaaaccaatgaaggctcgctctgaccattgatctccgttcccctttacttccgattcagggaaatggtattgcaaaaactgcgaaatccttcgaaaatcaaaaaagaagaagaagatttgaagaacgatgatccaaaaaatcaagataagggtgattgggtactcgtcaggactacacaagagcaaaccaacatggccactaggaggaacattgtactctcggtatgaaggatgagacgagctgggattatcccgtcgcatcttatatttcggagcagaacgctactctcttcgcgtcgaaatttccttcacctgtggttctgctgtacatcttatcatctacttttcaaccacatatgtttgtatatatgatgtcgatcacgactttcaattataagaaaggagatcctctataatgaacccttctgacaagcagggcatgaaaatacatcaaatgcaaattaaagaaaaagtaaatagaaagaggtctgcatctcaattctattcatttttgccttgctttttaattccttctgcttccctgtcgtttactttttccagctctcgccgcaccaccccggctggctccaccaccccgtcctcctcctcggccaccccgaccgcctcgtccgccacctctgccacctcgtcctcctcctcggaaaccgtccatgtcctcggtagattccttagtgttggacttcgcatgtcggccagctcctccgaacccgaacttggcgtctcgacctcggcgactcatctgaataggcagccgtatgatatgtgaagaaagaaaaagttggaagcgatatcgtcagttgggttctaaaagacagggattcttggggatttgggatgaaacaaaccttgctgtcgcccctgccacctctactcgaaccagcggctccacccctagcagactttgcaggtctcgagatagcatcctccactttgacgtcgaagtcatcatctccacctgtagcctgaagagttgaatcgtcctttctctttcgcttgagtcccttgagtctatcgtccatcgctttacgctcggtctctcgttcttggatctttgagacttgaaccttctttccgaacttcttgagatctcgctggcgacgggcatcatctgatttcttgatttgcgacctgatgaatatcgacagagaaattaacgataagtaaggtcgatttcattgaatggttcgcgccctcttttgaaaacagggaaatagtaaagaaagactgacgtctcgtccaacatcttttgcctgatcctctccatgtgggcatcactcttgaccatctcggcgtagaaatcatttggtctggagaacggaacaccgttcttggcgcagagtgttcgagcttgttcggcggctgccaaagcttgcttgtagctgattagaagaaacaatcgttcggatttggaaggttaggcattctaggtagatgtctgtgtggggaaagacgggaaagtacatacaaagcaacctctcgctgcagatcatcaccagcttcgacagttccctggacaacctcgagcgagtggatagtcataagctcttcccagttcatgccgacgtagggggcgtgaattcgcttgtgcaaaactcccatagccgcctgggttcggtttgaagtatacatcatttcgaaaagggtttttcagtattttatcaacaacgcagaggttatgaatgaaagagcagaaattatctcaccttgttgtaaacggtcaccttttgctgaggaagggtgtcctcgtctatcacctcgttatcagactcaatgtcgtccagagcgagaagctcatcctcctcattttcatccatctcggcatcctcctcagcaaccccatcctctttttctccgtcctctccttcgttatcctcctcatcttcatcttcatcctcatcctcatcctcatcatcatcgtctgaacctccagccatcatctgcatggcctcctgtacaccctcctctccaagggcgtccataagtcgcttcatgtcgctctctgtaatcacttcactcaaatcgtctccatcttcactgtcatcctcttcatcgtcatcgtcgtcctccgagtcctcgggagcgggctcctcggacgaaggaggaaggggaacagcggctgcaacctttacgggagcgggcgattctttgggagcggactttgagagtttgttggacttgggagttgaagcaggttttgaggacactgctctagctttccctttgttgttgttgttcttggccatgacgtagaaagaaatgcgatgtgtgtatctgttctggagaagaggcaaaaggcaacgacaacggtggatccgtagaaattcacaagaaagaggagagaggaagaaaaaaggagaagctaactgcacagcctgagcacaaatcacgtgtatcacaaccggttacgctagcctcaaacatggttactctccagtcacagacggtccgtgcgcgctccgctggctgtgtccaactttctcttctctcctctcgtcttccaccttcttgttctcctgctgactttgatcactcccttcatcgtctccatcctacttcgtcttctttagtctattgaacagtattcatgtcggccaggacgagctcatctctgtgaggatttgtcttctttggttctctttctctttttctttcttcttgggtttgacgcccagaacagaaacgtggtgtaattttcccttccgtttttgcaaatctctgatatgctaaagagtcagagatccgttgaaggttactgataacttttttttctttcttctcgtgatctcactcggcatctctcgatctcgtcttgctttctgtcctctacaatcgttctcatgtatgctcaatcatacagaccaaagaccatcaggctcaccggtcagccttccttacgttgttgtctgtctgttactcgagaacaggctgctgacgtcgttttgccactattttcatacctcacctgtaacaactcgggattactcatcttgatcattctatctaaacttaacgtttaatacatttctctccttttgcctacccgtctacacagtcgtcgctgctgattctttggccaagcgagatgtcttcacgttagttcgttgtatccttcgtgctcatttacatccgcacacactctcgcttcatgcagtcttaaatatatattgggaattctaaaattaatcaaccgatcttccacctcgttctgacaaccaacagtcttcctaaccctttcgccgtcatcactgtcgacggagaacagacctacacaacaagcgtcatcaagaagacgttgaacccgtattggaacgagaactttgacatgtcggtccttcttacttccactcaccgaagatcgcatttgcaatcttgtttctatcccttgtgttcttagggtttctctggcttatactaggctctaaacctttgctgtatatctccctcctattttcaacgatctgtctccgccgttcaaacgcaatacagtaccgtcaaagagtcttcggttgtcgccgtacagatctttgatcagcgaaagttcaagagaagagatcagggtttcttgggtgtcatcaatgtgaaagtgagcgatgtgttggatctcgagttgggtggacatggtaagttatccttctttggagacgtaatcaacaagctcgtgtgatctgcctcatgaaaaccgtccgttctgctcactatgtgttcctttccatgtctttcctttaacagagatgctcacaaaagagctcaagaagtctaacgacaaccttgtcgtacacggaaagatcatcatctatctttcttctaacacctctactcccatcaccaatcctggtcataacaccacaccctcccctgctcttcgacctgagaatgctggtgctccatcctcctcgcacagtatcggtgacgacttttcaaatctgtctctgaattcgtcctcttcaacaggtgctataaccagcacaggtcctaactcgctcgcgaccgaaagcggtcgtccttctcagatttctgttcctactccgtctttccctgcgcttccctcggctggatgctcatcttcagcgggcggagcgcttcccgttgtatcccaaagtggtgctcaggcagcggcaaacgtaggaagccaggctggaggaaatcctcaacaggcagcgatgaacagaaactttgatccccattcggatcagcacggacctctgccgctcaactgggagaggagaatggatcatttaggcagacagtactgtatgtcaactttcagttgcttctcttcttggtctcatcgtcatgtttcggtcaacaaatcttcatatacaagactcactaagccgaatcttcgatcttatatcactttttttcctttcttatccataaatagacgtcgaccataacactcgaacaactacttggaaccgaccttccccaacgtcgtccaactccgctttggctcagtcggccgcgtccaattcgaccgctacggctgaggccctccagcgacacaacgctcgaacactggcggatgatcttcttgagaccaccgcctctggaggagcccgcgttggagctgccggtgcatccgtcttgggccaaggtgcaatccctaatcctggagcgcagacgaccgctggaggaggaccaatcccagctggttgggaacagaggtttacccctgagggtcgaccttatttcgtagagttcgtcattaccatctttgtcgcacaagtatcttgaggactattgctcaaatcgatctgtatttgttctttattagccacaacacccgaacgaccacctgggttgatcccaggcgacagacccaggtccgagtggtcgatcagaccggaactaaccgaacgcagccgaccactgtttctcagttgggtcctttgcccagcggatgggagatgagactgacaagtaccgcacgggtctactttgttgatcataacactaaggtctgttctgatcatcttcttcgaatgtgccttaaagcgccagagtattgacggtcttcatcttctcttcatgtccatatcctccctaaccatcaccatttagacaaccacttgggacgacccgagattgccgtcatctttggatcaaaacgttcctcaatacaagagagatttccgacgaaaacttatttacttcagatctcagcccgctcttcgacgtaagtccactgccattctgtcaaagccatcttgttctgcaaggttttcctgtaataacatcacattcttctgatctgggttcacagccatccctgggcaatgccacgtcaaggtttcgcgagagtccatctttgaaggttcttatgccgagattatgaggcaaacaccgaacgacctcaagaagcggcttatgatcaaattcgacggcgaagatggtttggactacggaggactgtctcggtccgtacttggtttttttgctgttaatcgtctatcctagtgccatccagctgatcaatcttcttgcgcctttacagagaattcttcttcttgctctcgcacgagatgttcaacccgttctactgcttgttcgagtactcggctgttgacaactatacccttcagatcaaccccaactcggatgtcaatccagaacacttgaactacttcaagtttatcggccgagtgctcggtctcggaatcttccatcgacgtttcctcgatgcttacttcgtggcctcgttctacaagatgatcctcaagaagaagatcgtgttggaggacttggagagtgttgatgctgagttgttcagaggtttgaagtggatgttgtacgtatcgtgtgacggctcagaagtaaaggttttttcatgttcacagactgactgttactcgaatgtttctgatccacagggagaacgacatcacagatgtgctcgaaaatgtctttgctaccgaggaggagcggttcggagagattatcactatccctctcatccccaacggagagaatatcgatgtgaccgaagcaaacaagaaggaatacgtcgagtaagtttgatctgttcggtcttgaggataggaacttgactgctgatgagttgttttttttactctctaagtgccatcactgagtaccgaatctcgaagcgagttgaagagcagttcaatgcgttcatgagtggtttcaatgagcttattcctcaggagctcatcaatgtgtttgacgagagagagcttgagctgttgattggaggaatggctgatattgacgtagaggactggaagaagcacacggactaccgtggatataacccttcggacgaggtcgtcggctggttctggaagtgtgttactgagtggccggcagagaagaagtctcgtcttcttcaattcaccaccggtacctctcgtattcctgtcaacggcttcaaggatcttcagggaagtgatgggcctagacggtttactatcgaaaaagctggcgaggtcggtcaattgcctaagagtcatacgtgtttcaaccgaatcgacctgcctccgtacaagtcgtatgaggcgctggagcagaagttgactatcgccgtggaggagacacttggtttcggacaggaatgagctgtagagaaagacatggcccgcgtgcgagcgtgtgtgctccttccttcctctcttgcctttgtttccatctttttctcagaaaccgttatatcatttgagtcgaccatggctcaatcgtcttcccccttctccgatgactactctctcttttataaacttgtatctattctctgttgctttatctcttcctcacattcttctgtttacttccttctctcttcggatctcccagtcaccatatttgctgtttgtcctatccttccagtcgtgtgcctatgattccttgtcttggccttcaaatttctacaaattacatttccgatcggtccaattctttctatcgccttatatgagcatattcaataatttcatgtctatttctattatcattctctttccgccattgtttttctttgtcttgtttctctttgtttgacgctctatcatgtgtgggttatgttgttctcgacgtcaataaggattgtgatggcttgtgtacattctcggtggctacgacggaggaaactgactgcttgtttagaccagacgcgggagacaaagccaccttcagatggcgtctgataacgcgatgagtgaacaacctcgcctctatctcgctagctcaatcagcctttccttgattgcgtctcgacaaagggacccgtatctcgcctggcctgaaaacagagtgctcacatccatttctatctctctctcatctctgttgtcgtcgtcgtcgtgtagttgcagagaaatttgtcgtagattcgatcgtaagaagaaaggaagaggaaaacaagatcgtcatcattcgagtttcccgctcgatcatcttccgctcaaagggagagataacaaacccgttccatctttgcctcttctttctcccattctgtcgccactcttttgaaccttctcatctttcatatattcgttcggtttcaacatatttgatttcactccatcccatcccgttccatccaccacagttcatcaaactatcatcatacctaaaaggtagaaccacttgactgtttgtctacccgactgagtatctggaacaaccgatcacacgatcctcattacgccaattggtttggttcgactaaactaactatctatctatctatctatctatcaacccgcttcatcaaacaaaccagaagggtcaccccattctagcatcctcaacacttccgttctctgtcctaactttatcatcagcctatcggcctgcatttgactcgaatgtcaagcacgtcgagcgttgtctctcgggaacgagagcgagtgggcaattaccttctaggatcagagataggtagaggtagtttcgcaaccgtcctcaggggatacaaagcggtacgtttcagtctcaatctgtttgtttttttgttctccattccgtcctttatttctacgacgtgtaggaagaagtcttcatcttccctaagggtcgagtaagatggaaggcgatgaagatatgatgagtcccctgcctgctcaaaccttcgaaaccagacaatatccgtcttttcaggttccacgtctctttcctaccagcattggcggggacaggccacaattcatttcgagccatgctcagttctccgcaactcgaacatcttccccaaaggaattcaatgacacaggaaacccgttcaaacatatctgataaacaggcagctgaccccatcatcttgttttttcttacttcctgcgtctctatgttttccgatgtcactctcccttaactttatatcttatcatggtaacaaacttcgggccgaatgggattcggtcaaacctagacgacccgagagacggtcgcgatcaaggttgttcaacgtaacaagatgacatccaagttgttggagaatcttgaggcagaaatagctatcctgaaagcgatccatcatccgcatatcgtcggtttagaagactgtctcgttcgtcctttcgtctttctctatctcaccgtttcatctgtatgactaatctcaactgttggatgtcattccttctgaactatcctcacgatgccttgccttttcatattatcgtatctatttcagaaaatggacgaacgtatatatcttatcatggactattgctctggtggagatctttcgttctacatcaaaaaaagaggccgactgccgacattggaatacgtagcagacggcagtacgaccaagcagttctggcctcatccggaagaaggtggcttggatgaagtcgtcgtcaagaacttgttgggacagctaggtcagtcggtgcctgtactcatcatctgacaggtcatggcagtcactcaatcacaatcccatgtatccgtcccttttctcgaatttttagtattggcccttaaattcttaagatctcaaaacctgattcacagagatatcaagccccaggtaagtccttctctccccgcttgcttgactattagtcacatgcacatatgaccaccatgtttaatacctggttgtattgagagatcgtgctaactacttaacggactcgtgatttgattcggtagaacttgctgttacaaccacctacgctcgttcagctggccggaggtcacccgctgggaattcccattctcaaggttgctgacttcggattcgcccgcttcttggaaggagcgagtatggcagagacattgtgtggatctccgtgagtgtacctttttcgagtgagatgacgacatttgttttataaacttaatgactttgttgatctctctcgttttcgaatcgttcctcgcgaaccggtcacaggttgtacatggcccctgagatccttcgatacgaaaagtacgacgcaaaggcggacctttggtcggtgggtacagtcctttatgaaatggccgttggtagaccgcccttcaaggcccaaaaccacgtcgagcttctgaagaagatcgaaagaggagaagatcgaatccggttccctgatgagaaatccagttggaatccaagtccatcgacggaggagggtttgcctgtgcagcagcctgtcggaaaagctgtcaaggatttgattcgaaaactgctgaagcgaaatccggttcaacggttagggtttgaggaattctttagacatgaggtttcgattgagtatgccacagcgatcagcggcggtgaagaggcagaacgtagaatcgaggcacgggcgatcttgtcaaacgtgccagcgtcgatgatgcctaccatgtctactccccccgaagtcaaacgaacttccctccaggcccaccatcgcccaccacctcaacaacaacaacaacaacaacaacaacagccaacgccttctatgccttacccaattccaacacccgtccgacccgctccatctttaccaccgttcgcacttccgttacccgcttctccgccagttcaatcatatgtgcctgcgacgtttcatcagacgtcatcttcaccaaccaatcgaccgcctttggctcccttgacagtaccgtcatcatcggaacttgcttccgctcaatatgcccgatcagctgctaggccgatgacccctccgctaacttcccgtcaatcatcaggagcatcccctgctcttcgacaatacagctttgaaccaaagtatatggtggatgatccgctggcggccagatcgcctactcatcttgagtcagaattggatgatcgggaaggacgagggttgatagggagaagagagagtcactcatctgaccgaagagtgtatatgagggaggttatgtctgacgcgaacggacgaagagatgaacctcaagtgaggcccattaatttagacgggacaacaccggactcgagagcttctcccggtgaggtcgaagaggattctgcaagcgattatgtgttggtcgaaaagcgaacggttgagatcaactctttagcagatgaactcgacgcggcgtcccaccgaccgaccactgtaaaccgtcgacgaagttctcgaagtttgctttctcgaccgatctccgcccttacctcaggaactagtccgcctctcagcggaggatcttcctcttcctttcctcattcgacctcgttcgcgctgtcgataacaccaccttttgcgctcgcatcttcgccgaaccgaccctccccgttgcatcaacattatccccataatccgcatcatcaccaccttcaacaacaatatgcggtttcttccttaacccgtccgctctctgttcctcacacaccgtcgtcgttctcgtccagtccaggaggaatttctacccctctgatgagcgtcaaccagacgcaccggtttgcctcgtctcctacagctggtggcgtcctcgccagagcattctcactcgcttcaggtaagttctttggcgccagtccgtcttctacctcggctgcagcaggcgtcgtcgcccgcacaacggccaggaagaaggccctcattcgagcgggtacaaccgatccagcggaggacgctcttcttgcccaacttgatgatctggcacagaaggcgtttgttgtgttcgattttgcggacgtcaaagttgaacagatcttgacattcgcaggtcaaggtgcaggtcaacatgttttaggatccaggccaaactcgcctggttcttcaggagggttccagcagcagtcgactggtcaacagccgatgtcatatcaacctcagaaccccataaacactcttgagcgaaggcgatcatccgtccattcaacttcaggctcggaagctagcgtgttcaggatggatgttctcgctgctgaagcgttgttgttgtacttgaaggctttgggtttcttgcaaaaaggaatggaggccgccaaagtattttggatgagtagacaggtcggacatactgaagggggtggggaagtggatgagaccagtatggagctcaacgagagtacgtgcaagtgtttgcaagatctttgggccttgtgcgattaattgattgatattaataaacaaattccttatcagctgttcaatggttccgagctcgttttaacgagtctttcgagaaagctgaatgggccaaagcccgatcagctgatgaaatcccagagtcggctgcgttcgctgaacgacttctctatgaacgagctatggacttggttcgtcttgacaattttggagaatttctaactcagttttgaacagtggtctaattctcgttgcttggcttcacttagtcccgaacggcagcgattcatgaagcgttgaacgaggacctcggatcgatcgagcatgcctacgagactgcggtttggatcttccaggctatctcggatgatactttccgtgaaggagcatatatggaggaggaagatcgtttgacagtggacaagtgtgagtggatcgtgacgttcctttctctttagaggaggaattgaactaatttataaattttccatacggacgggttcaatctagtcttgaaagcctgtcagaagcgtttggataatgtcagaaaacgccaggcagctatagtagcggccactccgtctggtgtggggaataaccaaccctcggaagccatgtaggccagtaccaacaactaacaggttatacactcttgtagattttctccgatatccgtatattctcttgaactcaagaagccgatgccctttccttcactcgttctcttctacctgcaactgtccttcttctcttctctttcctctcctctctctagtctactctgactactcttccctccactccactccactcaactcaactcaactccattccaactatcggtttcaaatcttctcgatctcatcaaccatactttctttagcgattccattctttagataggatgttcaacttcgtccgaccatcattattctgccttcgacggattctcttttctctctctctcttgtcattgcattcagtccttcttgtggtgtttcgtctcatacttcgtgagtctcttgacagttcatctcgcgctgatctcttcgtgattgacattcatattattatttggctttttttcttcttgagacctgtttcggcttgtacttcggatggtctgatagctcgtacgcaaatgtatcgcccgaatatcgagtcgtttcttctcattctctggatctcttcccatttccttcactgtctgtctctctgttcttccacattccgcatcttcttttccatcattcatctcagctcgttttctctgtttctgcttcttgtctaccgacgtttttcatatactccttcatcatctctacttattctcatttctctctttctttttctatcgcttctgttgtattatcggcgttcttcgcctcttcttgtttatgtcatggttttattgacatctcttcgcctaatgtcgcgagcgaaaaaatctactcaaaagaagatggctcaaacccgaggtgcatgtcgctatcgatcactaactcaatctttatagtttctggacctctcgtttgatattactctccaagaactctcttcagccgcccgacccaaagatgatggcccaggaccaactaggtttcgttccacctgcgccatctgttgaactgctctccgttattaaagggacgtggtctttgtacttattgacgaaccggagcattttcagcaggagcgcttgaagagcaggttgtctgaatgtggagcagaagtgagataagtccatcgaaagacgttgaatcgtcagctcgagagccatgtcagatgaggaaagctaatcagaaaactaacgtgtagtccgtgctgatactcgtacgttcttgttatattcaatttttcagatcaaaacgaaaaagaaggattgaatgagattgtatcagtcttctcggccagagtgggtagagagtgaaggcaaggtgatactgacgacgttcagattgacccgtttgaacttggacgttaagtatccacttctcccatgcaacgtcctcctgtgacattttttccaaacgaacagaaagatcaagaatcagaggtgtcgatcagaagccgaacgtgaaacgttagaaagaaggggcgcattgaagaaaagataggaagaacatacctcgccttttgcgaaccatgtctttttgggtctcttttctgaaaaaattagcgaaatctgtcatgggcaagcaattccagttgtagccaccattaaataataaacaatgacattgaaaacaagacggggatgttcagatcagttatcgtatggcttgagttggtattttatgctgatacaagatcaagacagtgtattctttacctggccattccaattccgtactgatccaattgtcctccagaaagcgtcgactcggtcagtgactgtctttgccagctctggatcattcggtattgactgaggatataacatcatgacttcagatcagtctcttgtcgagctcgttcagtctatagaaacttgagtttcttgacatacgaatgtgattcctaaaacgtctaatgtcgtaggtgatacagttgagtacgttctttggaacaatatggcaagtaacaaagctgaaatgagtgatgtacgagctcatgatcagcaacctttagcctttacatgacgaatcatgatgataatctgtgatctttagcacacctcgaaggacgtctttgacttgggttcgttcgacggtctacgaactctgaagagcatggttttagcgatctcatgcagtaaagaaaataaagactgagaagaacaattcaactgacgaatgacgactcaaatgtctggcaagctgttggatctttagagtacatcagaggaatgattgagagttgatggttgacaagagaattcatcaagatagataagcgatttatcggtgatcagcgatgagacatctcgcacgaacggcctcggcctcgtcctcatcctttccattattccggtcgttcatcttcttttctttcaacaacacatcatctcgatcgttttgatgcttatgagtctaatacggatgtgtgcaaactgcccgagagtgttctctacaggaaacatcatagagaaatcgaggctaaccaaaagaatcacgtcattagccctgtctaaccgactttgcaggtgcatcatctttcgccattacatataattcagagcaactttgatgaacaactccgacaggctttcctcggagagaagtccgagtagaagacgtataaaacgatattggatcaggtcttatctcttcgatttgtacacatcaaaaaaacatctctcgatccgaatatactactcaccatgagccttaagccttctctcacctttcaacgagttggatctccttcatcagatcatacactggaaattttcatcgactatcagtgtggccggtgagtagcactatttgtcgttattattcgtagccttccctgatgactgacatgtatttctgaagagccaaggcaatcgttcaggccttgaacaattttattgttcctcgtgagtttatcctagacagctcacagcttcagacgtagaagctgagcttattcgaaacccacgaatcgattgatacctaatgcagacatcaaggaaggcggcaagctccacaacaagctttccgttatccttcgactggcacctcagaattggtaggtacaactggcatgcctttgttatcttagtcaagttatctcactgttgtgctttttcgtttcaaggttcgcaggcatatatcctcgtcatacctagctgaagcagcccttgctgtcggacatttggaaccttctgcgttttgagaatattctttagctctgtatgacaacaaagcatcattcttgaatgtggttgtccaagatttgagcgcaactcagatccgaaaacaggcagctgagcgtatgtcgatgtttctactgctgatatctaatctttcaatgggtatatgtacttgcgctgatttctttccacctgggatctgatatcatgattgattgtatgtccagtcgccaagccgttcacgacggcaagcgtgttagacgccatcaccaacaagacacatgcaagcctaggaaacaatggacccaatacttccacacctgaccttcagtacaacagtaaattctatctcgtttttgctgagtcacgcttaactcgatgcgtctcatttattgcgctacaatcggtcgatccggaactcaccgtatttattctggtctttttattttttaaagtcaagtacgctagacaactatcaattcagcacaccccatcggtcgcgctggatggaatcatccaaggacacgtgtttgacggaggcgtcgtcaatgggattccctccagttggggacagaccgagtgggatgcttgggttgagaaggaggtgctcgcttaactcgttgggtcgggtctaattagttgtatgctcatttaaataaatccttccgtctatacatgctgtgttcccctttccttgtttactatataaaacgagagaaaagtaaggttgtgtgaagagaaagtgaagatagtgatgcggtgcaagcgtgagcgttgcatacattctccccgaacttgggatgacctcatgggtggattgtgcactgaacaaccatagatgagattgataagaaagtgaccctccaaccaacacaccaactcttcaaacttcatctcgtactccccatgtttctctcattgatcagatcagttgcttgtttcgcattgctctcgctgactgttcacgggcacggtcaaatatcttcacacaagacccggatggtgagcttgggcttcatcgctttcatcttcggttggcgatattgatttttggtccttgtatatctatcattcggggatgtgtgatcggtacaggctgggccgaaatctaaggaggtctgtgggaaagcattcaacggtgcgcgatatagatccgatatatatgtggagtcttatgaagcggactgatgactatttattttctgaacgaggaatttatcagacctttgggacggagaatacgacttgaatggtccgttcctcatgatattcactttgctcattaggtcctgttttctcaatgataggagtttttacctgtgctcttctggttctttaattgacagatagagttggtccgttgttctctttcgagccgcataaccggtccaaggactggcctcccgagtgtaaatggtgagacggctcgtcgctcagcatggtattcctaactatacatacgaactaatttcgttcgacgtttgtatatgcgtgcacatcaacccaggtacctctgccaaggaaaacagttcgaagataataaagacaatgtatacacgttctctgttgggcatcatctccacttggagatcttcattctagctgcccacgaggggactgccaatatcagtgtggttgacctggagaagaacgaagtcagttctgctcaactcagaagaggttgttgaaagatcttttagatgttgagaagagactgacatcaaaatgtaacaggtgatcccaggtgcgcaacttcggtattggggtgagggatacgccaagctgaggacatacggagatgggccttaccctcctgctgatcaggtaaacatcctcttgagctgtatacctattcgcaatgtactcgtaatcactgatatccacttttacattcgccaacaaattaggtcaattttgtggttgagatgcccaatttggatggacagtaagcagtgatcatccgctcttgtatctggatagtttctctttgacaaggttaactctaaatgtgtgaaacaattatcaggtgttcccaacctggtcaatgtgctatacagtggtggtggtggggtaagcagagcgcgagggaccagtattatgagagctgtacgtctcttcttaagacaaatgcatctgtattatatactgtcatcaaaaacgagtggctgatcgatattcaaaataaatctgttgctttaggcatcgattttgtgcagcctcaacaagtgacggttgatgaaggtggtgctcaagaggtctttggtgcacctcaaggtcatcatggacactgatgagttttggtgtcctagctccctccttctctcttactcatcacctctttttttttctctcacaagaacaatcctcccatatgtctcttactctctctatatacgtacatatgtctctatatctgttcatatacattatttgttcataatgcacccaaaaaacagcaaagaaacagtgtatagaagagcctagtaaagaaaaaagagctggctgctgcgcacttgcctagagggtgaactctttttcgctggcatctcttcctccagtctttttcccttcaaacaccatcgaccctttccatctcgctccatcaggcttccacgatgggctgtacgtttgtctctcaggttgattgatagccgttcgggttcaagagagaccctgtgtagacttcctgacagtcgtttactctatttcacatctttctcgtcctttgtagtccgtttcctcaaccttgttcggccgtttcaggcctttttggtaagtcgctcgactcgtccaatgggctcaaactgttgatggtgtttgtgtctcttgcttttcactcacacaaccctgcctttgctcttgttcttctttctcttcagcctgaggtcactgcaccagagcgaaaggtatgatcgacgtccccataatgatgttaagctccaagacaggtcgccatcacgctcacctctttcctactccatctcctcgattcaggttcctttcgatcaaaaagttctctggaccgctgttactcttcttatcttcttggtgtgctcccaaatcccgctatatggtatcgtcagttccgactcgagtgatcctctctactggatgcgagtgattcttgctagtaacaggtagggctcttttttttcctcagcgccctgacctttcatctctatcacgcgataaaacctccaaagagcctgtatactgttcagacgaagctgacagctagtcatttgtatatctgtccctcactcttcatcgcagaggaactctcatggagctaggaattacccccatcatcacttctggtatgatcattcagctcctcactggagctcagctcatcgaggtcgacctcagtgtggccgaggatcgagtgctctacggggctgctcagaagcgtgagcctattcttcttctacgcgaaatttcaggattttattgtccagcttcctttgcttctctcatggttcgatccgctgacaaataggttatttctatttctccaaaacatctttttgacgtgtctccatagttttcgctcttatcatcgcttttggacaggccactgtctacgttctcacaggtctctacggcaaaccttcggatcttggagccggagtgtgccttcttttgattgttcagctcgtagccgcgtctctcatcgttctgcttcttgacgagcttcttcagaagggatatggtcttggctctggaatctctctcttcatcgctaccaacatctgtgagaccatcatctggaaggcattctctcctacgactgtcaacaccggtcgaggacctgagtttgagggagccattattgctctcttccatcttctcttcacctggaatgacaagtctcgagctttgaagacagccttctaccgagacaaccttcccaacgtgatgaacctgattgcgaccgtcgccgtgttcgctgctgtgatctaccttcagggtttccgaattgagatcccggtgaagaacaaccgattccgaggacagaagggaatgttcccagttaaactcttctacaccagcaacatgcctatcatgctcgaaagtgccttgacttccaacgtcttcctcgtcagccagatgctcttcagccgcttcccggaaaatatcttggtcaagcttcttggtgtttgggaggttcgtacctctgatcttcagttttaatcgatactaaagtctcaaaatcggcctaggagctgactttatgtttaccacctacatctacggcctatacagcccatcaaggattcatcccagctcaacgccatctctggaatcgcttactacatgtcccctccccacacaatcaaggagctctttgttgatccccttcactcggccatctacatcaccttcaccgtcactgctgtgcgtgtcctatccttttctctctgatgtttgtatgttcgagaatcactgttcttattccctctttgtctcttgtgatgcgtggcattactttcagtgcgccttgttctccaagacctggatcgatgtgtccggttccggcccccgagatgtcgccaagcagctcaaggaccaacagatggtcatcgccggtcaccgagagggatcgatgtacaaggagctcaagcgagtgatccctacggctgccgcttttggtggagctattcttggtctgttgagtgtggcggctgatttgagtggagcattggccggagggactggtatcctcatggctgtcactaccatctacagctactgggagattggaatgcgagagagcatgggagctggggctgacatgggtgctctcggagaactcagtacgtcttcacaacactccttgagcttgtcgcacaccttggcataggatgtttctgccaggtctgaatactgattctcttcaattctgaatctaaaacagtgggatgagcgaacagtggagggttgaactgaagagaaaggagatatgagatcctcctgtacggagaaagaagatgaaaaaatgcgatcagaaccaatgaagtaagatatctcgaaggaaatggaggaagaaagtcaagtgtgggaccggaagagagaggtcgtcttctttagaagaatgaacatgcaattattattttctaaaaatccccgatctcagaatgttctgtcagagtacatacatcttgtctattcagtggagaacctcgaaagaagaaaaaagatgaacacatatatatgtacaaaactcctttattgaaccgtcttctttgtttcttctcgagatattcttttgtgtgttggctgaagcaaagggaaggttccttttactttgtttcgatatcaatatcgtaccctttccctctcatctctccgatcaactctttctcgacccctccgtcagtgataatcttgaacctaatgacttggaatgcagatttcttgtttggtctatttgaggaaatccacacggagaaaacggagataattaaagggccggtagataggtcagcgctgagagctctgaggatgtaatgagaagcaagggaaaggataaaaggagagagggctgtaccggatcgaagtaaagtagacgcggcctgcttcttccactcccttgattcggaaactaagatgtcaaccggatcagatcggattggttcgacgagtgcggttgagatgaaagtggaagatagaatgatataggaaggggaggaggagtggtcaggtcgtttaatttgtcaaaaggaagaaaaggacagatagtagatctcacctcaggtctgctttccccttgaggacgttgatctgtataattaaaagaaaggatcggagaggtttgagtcgagtctcaaatatcgttcgtgggttccggtaccacagatacagaagggaggaaagagagggcaaaactaacgtttccctcaatcctgaatccgaccaaggcggccaaggaatgagagaggacaaggcaagtcagagttcacttctcaacaagaggaacgagggagtaacaaagacactcaccagggttcaccaccagtccagaacgtaggttccagatggacaccatcgcctagtaactcctcaactgcctcacttgtccgtaagacgaacatgacctgcctaaacacggacgacgtgagcttttcagaattcgtcacccaaccgatgaagaggacccaggcgattcctccaaataggatgaccgaaaccgctgtgtacatgagaagatgaggtagaataacccggttagcgatgttgagtaggttaaggctgaatgggaaaataagcctggtcgaacggacctgacacccagtaggtctgatatcggcaacgagacgatatgtacaattagccaattggtcagttgacacaccatgccaagagcacacagagaactagatactcacccttgtgtttggaagatctttcagctcagtagccacgttaagtctgggtgggtgagaccattgtccaggcttacctaccgatcgttggtttattcgaagcgcatcgtgggattgattgggcactctttgtctgggcgaagctgtggtagccaagattggttgagaccggacgaaacggagaaccgagctggtcgaaaagggagccgctctttgcagcctgcttgctgtcgaaatactcctggaaacgagtggcgaagctaacatagatgcgtgatggacgagggtgatggatggatggacggatgctggataggtatgagtgcttgaaggtgagagctaactgaattctgcttagtcagctttgtggaaaattcccaaacgtgagcaaaaaagaatctttgtcggttttctctttcctttgcccagccagcatccccatcgagagtgaagtctagcaagtacagccagctagccagtccctacgtagatccagagagcagtccaaacccttcaatagatctagaagagcaacatggtcagttggcttgtagttcttgtctgtaggggtctggttttttgaaggctcatccagatgtttccttttttttcccttttgctcttccactcttttcattcatacagagacctatccttcttagtggtgagtgtctttgggctcttgtgttgcttctttttcgtgtctacacgtcctgcattctggactattcactcatcatgtacaccttccttcctctctatctttggttccaccaggtcacgagcgatccctcacccaggtcatctacaacgccgatggtgatctgctgttttcgtgttccaaggaccacgagatcaacgcctggtgagtatatcatatccttcattctctctttcaatcgatagatcctttcttggtagacggcgatggtccatggcattcagccagagcttgcatggtctgacagatgatccttcgcgcgatgaatcaacaggtactcgcacaacggagagcgactcggaacgtacgttggacacaagggagctatctggtccgtggctgtcgactgttagtttctttctatatccttttgttcatgtgtgctcgcagaccagttgggcttagtcaattcaaccttccctggctccccgacccgattcagccaagtccgagctcctcctctccgcgtcggcagacaactgcatgaagctctgggctgtggccaccggaaagtgccttttcacttgggagttccccaccgccgtcaagcgagtttcctggaagtgagtgattcatcttgctagggctgtctgaaggaagcgtcaacatactcaatccgaacaccctcttgcttcctcttcgccagtgaggatgactctttgttcctttccatcaccgagcagcgatctggttaccagggagccgtccgagttcaccagatcaaccgagaaaacttgaccgagcgtgcgttaacactttctttactttgagtccatttggcttcgagacactaatatgtctattgatatctgtaaatctcttcgctgcctattggttcttgaatcgtcaacacttcaaattgttcaatctcgttctcacaccttacccaaacctgtctcttttgccgacctttctacactcaaccttcttgctgctgctactcgccacattctttctcctttcacgtgtttcaaaatctgcagaatccgtcgagcctatcactgaattcaaccctatcggctccaaggccaccgtcgccgctttcgcccctttgtcaaagaacatcatcaccggtcacgagtctggaaaagttgccctctttgacgtcaagagtggagaggaggttttgtcgaacgagaaggctcacgctggtaccgtcaccgacttgcagctcagcaacgacggaacttactttgtcactagcagtaaggacaagagcgccagggttagtcctagtctagttttcaaggagaagacatcagatgattcagggaggaaccaagcgtgaaacggtgttcccctagaaggagacaaagactgaccgagattcactccatgctgtctgcttttgtgttttcgttattagatacaccgaacggacgatcttcttgttctcaagacattccccaccaacacccctctgaacagtgcttccatcactccctcccgcccgtacgtcatccttggtggaggacaggatgctgccagtgtgacgacaacttctcagcgacaaggaaagttcgaggctaggttctggcacagagtgttcgaagaggaggtcggtagagtgagaggtcatttcggtccgttgaacacagtggccgttcacccgtcaggaaaggctttcgcttctggtggagaagatggttatattcgacttcattgggtacgtctttctccttctccttggttttttttttctgatgcatcttttgggagagggttgactgatatcatggaacggcgttctgttttcttagttcgatgagtcttatttccgtgcacgaccttttggagatcttgagccggaagagtaaacagagtggacccattaaaaaatccagaaaggaggaactttctttccttttccttccttttcccctctcttcttttcttgatttctggcttcgatagttttaccgcttgagtagacaaataggtgggagagggtagaggaggaagatggcaagaggagggaagtgaggttttcttttgctgctgtttaggtaaagaggtgtagcatttttgttttctttctatcatgacttttcattactttattttggctgcatagcaagtatcgtaaacattggtctcttcgtagtgagcatgatctgatcccgatgaaaagaggggagaagagttgtttcagattctccagagattgaacaccaaatgaagatctttcaggagatagtgagcaagaatgttttcatgttgatttgaaaggatgatcaacatagttcacatcaatatcccagcccagcccatactttctctgccaatctactcatctctctcttcaccattctcactccttcatcatgttcattgttcgtctcctttctatcaacatgtggagcctcgagcagaactacaggtcttccgctatccccacctgcactgacctcaggaacgagaggaaggtcacccagaacgggcaggttgagttcacgcgctgcttggtgaaacttgtccggaggaccgaatggatagattggaggtgtcgtggggagatgagacatgttcaagaggaggccgaatatcttcaatatttgataatatgatcgatcagaagggtgcgtgagtaaacagtcacatatagtttaagcggttgagcagagagaaggagacggactgggatggagagtttcttgaataatccgacgccttttcgagcgtcaatcaaggcgatatcctgaggagttgagacgatcaccgcccctgttttatgcagttgccggaagaaacgcccaatttagatgataaggtccaaaagaagaaaacagaaaatacaagatacatcaaaaagacggtctccagccgaagaaaaggtagactgaccgtcgacaatgacgagttgaccgagcgagagtgcgacgtcacccgttccaggtggcatatcgatcactaacacatctaaatctcgacctgtcggacgatctgatgattttgtagacgcagttgtgtttgagtgcgcgtctgaggtccaatcggtatcgaataggagctgatgggttgtttgatggaaggaaaaaagttatggcttgatgagaatcctcaatacgattggaagaaacagagagaacgtaaagagtacgcacttgttggacggctttcatcaccattatccctcgccaaacgatcggattttctccggtcgcagactccgcttatgatagcgtcattgaagagaaggaaacgtccagtaggaataacgagtcaggaacatctaatagctcaagtacattgaccttatgtagaaagacacaacggcatcactcacgaactagatatcccatcgacatggtgccaactccatggttcgtcataggcaccaaccgtccacctaaatttccgtatgaaaagatacgaaccaaacacaagatgtcagcctccggtcattttgaatctgaatgtgagtaagctacacttgaaaatgcgcacatgtgcgcgaagcaaagaagaaaagcgtgtaccaggtgttagctccgcttcgcccaagccctccaatcccatcaactttggaatcgatggtccaaagacatcaagatcaagaactcccacacgcttagtaggttgtgtgagtagcaatgaaagcgcgaggttgactgaagcccatatgatcatgaacgtcagctctaggatagcctcagatatcagaatggatagagaatgcgaaccagcgactgtgctcttcccgactcctcctttcccactagcgacgacaacgaccttttttactcctggtattctggacttccttactggacccattctaggcatgaccggcggtctattccctgcatccttattcgacggaagaccctatgatggatagagagcatgttagggttagttacgagaaaggctcagcaaaaagtcaagaacgcaggtagaaaattaaggctgacgagaggatttgaatgtgacaggttgggtacagacaaagaaagagacctaaaagcgtgcagtgagcgtacgcttgagcgaacaagacctgactgcatggctgaatggctgatggttgattgccgatggtagtcagtaagatggtgatgggtgatgatgggcccctcgtcctcttgcacttgtactgcttttcaagatcacgtgtaaacaatgatgtggcgttcttatcgatcaatttacacacccgctctcgttcactatcactcactatcatcactatcaccatcaccatcatcatcatggtctttctcggcctcatctctcgcttctttaggtaagtttatattctggtcgatgtgatagaacgcacgttcttacgaatctggcttgttttgctcctgtaacagcaacctcgccgcctttgtctatccgtcctacgcctcttacaaagccctgatcgagtacgacccggcacagacagaacgctggcttgtctactggacttgcatcggagctcttacagggctcgagagtatggtcagctggatagtggtctgggtaccgttctattcggaaatgaaacttggttttgtactatggttggttgcccctcaaacagaggtcagtcctttctttctccttgacaagagcctatgagcgcacgtggatgcgtgtaggaacgaacagagaacagaaaggagctgtacttaggatggatatggaggatgaaaggtgccttgttcgaaaccgaacgagtgaagtttcggcaaggagtttacctaatccagcgccgtataggtcaatcacagatcgcctatccctctttcatgcatagtgtttgttaaacctttcccgatcacaccttatggaccatcatttgtttggtcatatgcatacttcacttacatgtccctgatgttcaactctaatccgataaaaattccctttttatcaatcagggatctaccctcctctacaagcaatatatcgcacccttctttgactcccacgaagccgatgtcgacgctacacttcgaaatctgcgctcccttggtggaacctggctccaaaaggcactcacctgggcttggaagacagctcgagagcagctcaatgtgcgagaactttctcacttctttgcgtttgtataacgtctgcttatcaggtgccattctacattgttactggattctagctggcggcagtattgcccgagaattccccatttaaccctaccggctcgctctcaaatccttcgaaatcctccaacaacggcgtaaatgcccctcatatcactcctattccttcttccatgcactctccctcatttcctccgactgaaggagcgtcggaatccaatactcagcagtcccaggcattcaatatcgcttctaatttgcttcatcagtacggacctatggctctcgctgccggccaagccagattcggctccaggtcagggcctactcaggcgcaaggatcaagcctgcctgcaggtagatctttctctgactcgaatgctactacgcttgctagcggcgccactaccacctctcgatcccgaccaactacctctcccacggctgtgatggacgtacatcaacgtcgatcagcgctcgaagctgagctggctgctttaccttccccaccgagtggagtgccgacccctagttcatctcgctcaggaagtccgtccgtactggggaagagcgggtatgaggagatcggaagggatgacgtgaagatggacgaatcgagtgcggctccagctccagctccagctccagcggcaggatcaggatcaggatcaggatcaggatggtttggaagctggacgggtagagcttcgggatatgggcagggcgaagaaaaagctgggaaacaagattaatccgttatcctctcttattcctcatgtatctacgcccatacgtcttgtacttcggtctttcgttcattcgccttgtgttcattgtttttctttttgcgccttctcactctctcctcagtttctcacgattacacccgtcctctttgtacctgtatccgtccatctgattttctctgcaccgtcctctgcttcatggtcccatgtattcattatgtctttttctcatcctgtaccagaaccgatagaacttcagtgttctgaaaagccacaagatgggaagagattaaccatggtatacgagtgattagtaagaggttacgaggtcaaactaaagtttttggagagatgcattgtccgtttcgtttcaattagagaagggtatacaagaggacactgaagaagggaatgcagtagagaaagaatgccggttgtcctgataagggtggaaacgtaggaaggaagcgcaagaatatgaaatgtgtagatatatataacgtttggatatgaatgagcaatactaaatggcgaagaaggcagctttgttctcgcatcttcactgtcctcctaagagacccagcagcaacctagcgcattcttcgtccgtcgcgtccactcccgccccgttagcaccaccactcgtaccgccgtctcctctagccctcccctcttgagcgcctctcacctgtctctgtccttgtccttgcgcgaacgcatgctcatgctttctcatctgagcaagttgggattgcgcactttggtgaggtcttccggtcccaataccggccccaccgccgaggacatcctccatccgtacagacggttcgctgatctgacccctcctcatccttttcgtccgactttccgcttcccagtctggatcgatcctatccggagtacccattgtgacccaagtgggatctcctcccgagttgaggctgcctcgaggtcgtttcgaaagaatggaagaggtggaagatgagtgtcttaaaggcgttcgtttcacagaagatcgaggtgtgctcgttctgatgcccgttgagggtgatcctgtgagacctcctgcgcctccgagcctgatcccgccattggtgttggcgctggtagctcgggaagctgcccagtctaaagaggcggatttatggatgggtgtccgatgagggaatttagttgtcgagttcatcttgggcgtttgtgatactccagggggtaaagacgcttccggtagtaccgctgtatatgagggggctgtggccgagtaagaaagcgccttgggaattgagaatgatgaggatatcgatctggcacgatgatgggttgaggttgacgtgaatagagtggaggaagaagctgaagaagagggtttccgttgagaggtcagttggacagagtgataggttgctgggactgatgaagagcgagaagaagatgaagatgtcgagtctgatgtcgaggatactgagcctgctgttctaaacggaatattcggaggattattttctcgatcagctcgagaaaacagagatccggcagtagtaatcgtcgtcgtcgacgaaagaggagggcgttgagtgaacagaggtcgacttcggcggtaggataccgaacgagattttgaggctcgaggtgtttggctatcttcctcggtgtcttccccactcgaaaagtcatcttcggccatttccaagagatcaccactaggaggatcactcatcatgttcttccacaaatctcttccgtctcctaaagacgggtcgtcatcgacagccataggccgcatcaaagatacagatgatgtgggtagcgatgagcgatggatctcttgtcctcgttctctatttggaccaatatgagacgacgaagaggaggaagaaggcgaggcggaggacttggccgagatataagcgaagggtagctctttgttctgaaccacagcatccatcattgatcgagttggcgctctatttgaatgaggagacgacctagacgaaggtgtcttttcgacagacgttcccggcggaactgaaggaggtctagccgatggaagagttgactcggaaaaagttcgttgaaatagcggggaactcttgatgggagagtacggacggggaaacgatccaacagatggcggcttacctacgtcgaccttgggcgttcgacgataggtctcaataggacccgattgggtcttactgggtatcgaccgagacgagctatttggataggtcgaccgcgggaagagcggcaagacggtctccttgtggtttgctcttacagggaacgacgagagtggtgcttgatccgagaagggatcatcatcctctgatgagaatgtcgatttgggaaaggcgtgggtcgacatggcatgaatgctgagtgcgccagtgggacaaacatttctgccttgggatgaggaaggaggatggtcaggagcgcgtttcttctcagtctgacgcttgttctgaaactgaacggacagaagcgcaatgtcgggtaaagtgatgaagattgatcagatcctttatgtcaagacgatactttgaaatcatgacagagcgtgaacatacccagatctgtacgtgacgagccgtcctgtcgaatatcgagcagtgtaaggtcattccacaagacaaacgtaagtttccgtgatttgtacgaaggaccgatcacagcactacaacaagaggaaaaaaccaaggaggaaacaaacatttgaacctccagcgcgattgcttctcgttctgctgagctcggtaatgggtttcgcaaaaaatgaccttccaacacggccaactctgctgggcttgttcgccttcgccgctttcttttcccagatgacgatggatcgggttcagtccccgtacccgaggacagaagagattcgtaccgagattgactgagtgatgacgcgtgaggagtggagacggtcagccgaagaggttgagttccaacccggttcgagcgtgatgatgatggagaggatatactgagcgacatgatagttgaccgaggagtcatcaatgaaccacccgtcgaactcataggtttaccatctgcaatggcgggtaagcgcgttggaccaagagcctgatctgaagacagaggagctgtattctccgatgaagattcaaatggtaaaccagggtcagacggttgagaggatccaggttgagtggcaatcaagccgatagtgtctgactgagaatggacgtgtctgtcggagagcgcgtcttcggaggctacggtcgagaccgatgttgtcgacgacgaggacgatggtatgagcgaaggtgtcgacaaggcaatcagcatggcaggagctgacaagacaagctgttcggattctgatgcatcttcagctttggcagtgcccgctggttgagatgatgatccgagtgacgtctcggccgatgaggagagtggtctgaatgatgtaatcagctgatcgccagaaccaccgtcagtgccaccaggaaaaggaatgtcaggaggatatgacatgaacgatgagaatagattaagaggaggagaagagtccacgttctgtactgaagagcaagaaccgatggagttgaaataaaaagatgagagagagagaaagaagaggatgagtggatctttctggagaggtaagttggatgaatagaatgaacgcgtcacgcgactgagacgcgttcgagacgcgtctttgcagcgcgtctcgatcacgcattcggcatgtcatttgattaccgtcggtaaaggtttatcatggtttaatgctgatgagtgtatggtctggcctttgagataactcttggtgggaagcaagtttgcaaagaactgttttccttgttcggttgttctctttattaagtgtctagcaaaagaccactatgcctgggacattggtctgctcagtcattatagacgcacactctcatggtacactgtacggttgaatgattcgacgattcatccacgaacactgatagattgcataaaaaaaggtccataaaaatacaactcgctctagccagcaaaggatcagaaataccctcctgttccctcgttgtttttctcttccacgcccaactttgtctctactcctatctttcacgccatcggcggcggcggtggaggaggcgggatgtttcctaccggtcctgttcgtcctgtccacccaggaggtggcactgagtagttctgcggagtgaaaccagccggaggtggagggtagttcgggtacgacggtcgctgctgggccgggtatgctccgtatccgggtgggggaggcggaggcggcggtggagtccctgtcggtgcgccctgagcaggcatctggaagccaggagggggaggaggcatgtatgaccctgttgtttgaatctgggaaggatggaaacctggaggcgggccaggcatgcctccgttgggcacaaccggattcgggtatgggttcgagccaaatcttgaaagcacattaagacggataaacagatgagcatgcgaatgggaatcgtcagagaagattgatgtgtttgtgaaatagagggaactcacccaacgggcatcgagtttgcacctgttacaccaccggccatgccaggagggggaggtcctccaccgggtcttccccccatgctcacccctccgggaagcgcgttgttcttctttgcctgttgagccaacaacctctctgcctcagttccgtgtctctctccctttccgtccttcttgaatgcatactgcacggtgattgccttgttcattaagaattgattcgacattgcctcgatcgcggcatctgaagcctcgaagtcgttatacgcgatgaagccgtaacccttggaaacaccggtagcaggatctcgggcaatctgatggtagagtggaggtaaacgcgaggataacgacacaaacagcgtgtaagcagacaaattcttacagaccccatcggggaatgcagttattgattcatagatgaaattctcaccttagcttgctggctgacgataccaaaagtggagaacgtgtcgtaaaggagtctttcgtcgacattaggatccagattaccgatgaacaggttggctccgacatcaagctgcttcttgtcatatgaggcctgtcggtccagatcgaacgaagatgtttcgggaaacgcgtcaattatcacgatccaactttaatcaagattcgcaagatgtgtgtacggaggacgtaccttgttgaccctgatgggctttccataaagtttgatctggttcatgattcgacaggcgtattcggcatcctcttctcctaggaactcgcagaagccgaacccttggtgggcttgagagattcgatctttaggtagatggacattgactgattgtgcaggacgttgataccttggaagtcagtaatcaaccctatgtctagctatgataagaaagactcaccaactggtccagcctggtggtgtggattgagttatgtcgtttgtcgttcggaagggatggtttcgaaagagatggttgaatgccatatgatgttgaagagaggagccggaagacaatcttgtcagcatgagcattgacagacgataagaaaagaaacgcttggacggacctgaagcatcagctcccaaaccagagcatccgtacatctctcgtcaaggttaccctgttcaaacaaaggaaacagcggtgagcgtctatgtatcgagagatagagacatgtacaagggaacaggagtaaaaaaaaaggaaacaaaaaagtgaagaaaaacccataaaatggacgaaacatgacgacaatatgaaaataagactaaccagatacactgtggcctcttggtttctatcgaactcgtgaggtgctctcgacatggtctaacgatgtccttctgtctgtcgggggatgaggtgagtagaagaacgtagtgcggttgagcgtcaaagaaaggattactatgtggaagaaagcgaccccaagccaagcccaagtgatggggcaattgaccccaaatttgcccaagatattgggtatttctcagatttacccgtgagccgtgttctgccttctcttttctctctctcctctttctcttcaaccccgactcgtcccaaacaccttcgaccttctttcgttttctttatcttctcaatatgcgagttactttgcccaaccaaggtggtatgcccgagggtatgtgatcgacttgtttacttgctcttttccgcagatcttcacgattcgtccggacagactctcaccgttcgtccttgtcttttcggtcttcccttattggcccttggtccttcatcgatcctcatctttgtaggaaagaaattcgtaggtccctctttttttcttcgcttctcgatctcttttatatgagcgacacagagaaggcgtatccgttactcatcttgacatcgatctgatttgttttgttgatgtggttccactttttttcctatccttctctgggtgggggcgatcctttttttctctttcttctcgcttttgacctacccaacagctcggatggtggggagctttcggtggtgagagacagaagggtatcattacctactgtacgtagcattcgttctgcaacaatttgctcctcctttccttgaatttgaagatatactaactttgttcgcaccttcgatctcctgctatgcttttctccacagctatctcccagaacgagcaggccgctatgcgaggtgctttcgagggatacatcttccacggtttcaagcgaattgcccgacacgctccctacttcgttcctcctttcgtcgtcggtaagtaaacgtttaggaaaatcatgatgtgaacggactaggcagtaaatatggaagatcggagcatgtttggctggtttgtttgggaattgggcttttgggcaatgggcatagagatcgagcaaacggaatgatgagtaaagagtcatactaagaaaccttcgatcattcgtatcttccatccaggttacgccgcattccagtgggccgagaacaagtacaacgttcgttctccttcgatctgtttctgtttctttgtacctgtgtaaagactgacgatgtctccttttacatatcgatttgatcttcgttttcgggtgtaccctcaatccaccgcctctgatcctcccttttcatccttatgtttgattcgaccaccatattctgcctcgatcggttccttcaaccaatccacatcaactatcattaccctccgttcatgttgttctgcttttaatcaatagtacctttgctctaaggagggacaccacttgaccatgctcgaggaggagggaggacactaaacgatgtaaaatgtgttctgtagtagacggtgttggcattatatttctctttcatgatgatttttcttcttttctgctcgccgactggcatgccctcccttgaacaagcgtcatctccttacagacaaagtccgagtcagatcatattgagtatatcgagaaatgacagacacggagggttgatcacgatccgagttgttagaagagcgaagcaagacttctcctggtatatacgattgagagtggttgacacgatacatttggagagacgatctggacaaaatcgtcaaaagaagagtgggttccaagttgatagtgacctaaacactatcaactactgtcgtcacctatgtggtcgtcatagttgaggagacttcgttcgtgtataaaaagatctatctaccctcgaccaaggaacatcagctcagacatttccttcccgatcatttctttcgtgtttttttttgggttgcatcgagataggaataggctgttttgaatgcttgacttagattactcaagttcgtccgaagaggacatcaaaccgactggggtcaacggtcgtggacatacaccaaaacagaaacggaagtcgattggcgatttggatcccgtgtatgaaagagcaaatactccagcaaggaaaaagtaaagcctgttcatactgacgagagacgatgtactcgatggcagagaccatcagaatgaaaagtgactgagaaggaggaaagagaacaagatatcttgaccagagtgatgggtttggctgactgaaatgtatctggtttcatcataggtctgtactcccttcgttcgcctccatctcatcgatacagtgtgagtaccttctcgtgcactgcccgatggaagaaagaagggaaagaacactcattgtctttctctccatgtctccaaccggtccggcgtgttttgctcttcttgtgatggctatctcggaactgatgtcaacggcttctcttcattgtgcatcaagtagagaaggatgatccagcacaataccaaggtcgaacactcgctcgaccaaaagtccaaggagactatccaacgcatatttatctatcttgtgagctgagatcttgtaaactcgctctgctgtcctatccttgcggtaaagaggaagaggtggagacaaagaatgacaaagaatcccttggtttggaaatattcaagtcgacatcccacctttcttcagaactctcgtgaaagaagcccaggccgaccttccagaacttcactccttgctagattcgccatcaaataatcagccaccgaccgatcaggccgagctggatacaccgaagagagacaaagagaaggaaaccaagttgcacgtctcgctttctagaccactttatttgagagcggatcgaaagagcgcggtagaggcctcactgagagacgtggttcggacgatcaaatcgtcagtgaccctcattcttctcccttcatctaaaagacgtaggctctcagccgtaatgccacgatattgaacgcgaagagtgatttggaacacgacaagtctggtgcgcgagtgctgacaagaaaccctgtgcgctctgttctcttcgtcctacgtatcgtaaccttcttttccttgggacatgcgaaacaatatcaggttcccactttcattctcgactctcagcgtattcaaaaacgatgacaacacaagaacgttcctgagtatcgatgttggcgctgggtttccagaagtatctcttcttgctcgctttcctttcattctctgctcttgatatttactgactattctcttcatctccgttctatggctcgcaacacagctggaagtgttgacagaatctctcaataaatcactcgacaaacaccatctaccaccctactacacttctcctcgattccatacttccatcgcctgggcgctccttacacctagctcaaacccgtcgtcgcatctacctaaatccacactgatcccctctattcaacatgaccgatcgaacaaacccgatcaaaaaagtttcccgtcgatcgaggggatcccaccagatctagttaaaaaattggatgaaaaattcggagatcgcataaggaaagagggaccgtggctagtagacgaagtccgcatgaaagtgggatcggagatctctgtgttcccgctaatggggtgatcgagctttcttccgtcctttttcgtgcatcaggtggtctgttcgtataaaggcatgactgaaatcgcccgacatgttctcggatgattttctctcacatagaagaataacgaggcatggcgaatcgtgaatgaaatttcctcaaccagatactactatagaataggccaacggagggggtgggagaccaggagaacgtgagcaaacgataaatgtctgcgacagatgcaagatgagaggggtttcaggtgaagaaaaatctaaactttgtgatcaagaggttgagcaagaggaggaaaggaaaggaaatgttcatggggtatgcaagatataaaaagacagcatagaaagatgagaagaggagaaataacaagataaaaaagaagtcatcgatctagacagcaccgcattccccctatgatatcgagagtttcagaattagacgaacgaaagcagaggatagagagggaaaattgatgtcaacaaatgcttgattgtcatcagtgtgcgtcggtgaaggaatgaactaacgagaagtctatttccaggcttaggagcattgtcggtcatctaatttttgacatcaatcaaacagacaggtcagtattgagaagttttgagggagaggaggaaccaaagaatttacttgatcccactgttggaaccataacacaaagatatatgtagataagtacaaaatcattggaaagcaactgaaggtcaaaatcgatttcagacccagaagagagaacatacagtcgtcatgttttgattggtatacgcgtactcgtatcgcttgatgtactcggctgtcggcgcatcgtccggatcacatccaatcgctttcaaattcggatcctctacacaaacatacatgcccaataacgaatcctcataaaggatcagtctacgacacagaaaatagtttctttctcgtgacgactttttgcttacggtagactcgaacgtaatcgatgttcatcttaaccggccacatagactacacgaagcggtaagggtcaacaaattggaccataacttgaaagtttacataattagatacaaaacctagttattgcgcttacctcaagcccttccatgtcgataggtccgaagttgtacgacatagccaagttgaagatgatgtactgtgacccaaatttcaagttgatatgttctcagacgatatccttcaccacactgagaactaacttggcaaaggacgagcaagaactgaccataggctcataaggaataggtcggttgcccacctgcgtctcggcgttgggtcccataccgccctccagatatgtccaatccctgtatcaagcatagggcttgctatgaataaatgactggtaaacgaggatataatctgtaaatcatttgttcttacaatttgtcatcgttgaaccatttgatgtatccattctcgccaagtttgctgttgtcaaacagggcgtgatagcatgcagcgtttagctaccgctacgatcagttctgtttaagagaaagagaagggacatactactcaaatgcgtaaacagcgtaacatcctggattaccatcagtatcagtctcgtagcaatcctggttagtggttgatactccggagatggtctgctgataagctgatgaagtaagacaaggtctgagttagtcttctttgtaaccgaatcgagagcaaaagacgaaacaaaagaaagaagagaagagaagaagggggccgtacgtcctcctttgtaagaattaagatgagtgatgctctcgtcctcgatgatcatgtgggactcattcagccaatcatattgctaaaaagaaacattcagaaggaagtttaagcaagatcaatcttggaagcggacaagagtaagaagggctaattacaggattatacggagcccattgagcggacagagacacctccccttgagtgatagaataatagaattggagcatcagttacgattcacgaatcaaccttaatgaaacataaggggaagaacctgttcgggaagccatatgaccttgagcctgagttcagacaaggcgaccaaggaccatcatcacaagagatcaggtcacgactctatcgaaggcggtttcgatcgatttgaacagtcgcttacctcaaatacatcaatctatcacgagatcgaataaattcgtcaacagccattaatcaaaaggaaaagcaaggcgaaatcaagcaaaaggatacttacctcaggcgccgctcttcctttccaagttccgtctgggtgttttggtccaggatgggtaggatcatccgggcaggtgcatctagaaagccgctggccaggaaggtaggacaaggcgtaatcggttgcttcgtccgttccggatgtaacagcaatttctggaagaccgttcaacgtttggttgggtaaagttccgacatcgcaagaatcataggtgtatggccatgttccatccagcgttcctccataaccaactcggccaaggtttcccatcgcccagaatgcaggccaaagaccatatgtagctgctgtcgcaggaagtctaactctggcttctagtcgaccaccttgaaagcacattttgttccagccttggatggatccaccggcgaattctaaattatggttgtcctcaggatcagctttgtctaagctgatctcgagcgtgccgtcacgcgtagttaccattcttggatcataatactccagatcgtttgtggcccacgcgtggagatcctacgcgcgcacaaatatttatcaaaaatatgagagaggtgtcgcaggtgtcggccatgaatgatacataggtgagaaagaacgagaaagattgtgtccggaactcacgatagcctcccagaagggatcgtctccaggatagaaggacctgccatcctgattgaattcatccgagaattggagttcccacacttcacctgagtcagagatgacagtatatgcctcttcaggagtatctctgtcgattaatccaaaatctgccgaacacaggaaaaaggaaaggtaacgtgtgagcatcatatacattgaacgactctcatactttcatctgttctgtgatatcaagaaggtatattggactgacttcccaccatctgtggcacttgaccttatatttcacaaaacaggcaacacggaagatatatgagcagtgggcagaaaggatgattccttttccttgtagtatcgtacctgatccgttgactcctcccaagctgcgtaagagagaagtatcagactctaattcattggacaaccggaatggtagaaaagaagatttgccacagcttacttgaaggcgcctagcataacaggattgggctttatgaagacagtaattaatgggtatccggcgctacgtattccaaacaaaacaaaaacggattggtacaatggttgttgaccagacggctacataactagcggctcttacaaaagctaaaaatgcaggaaataaaagaagcggattatgaaatcagatcattgtcttgactgaggaagagacaaccaagtggtggactaacggtcaacacggccaatgatagcatgaacaaacagccgatgttcgccaaccctcgtgctgtcagtatcgtgcctgctccgcgtttatcgtgctttgggtccggattatgtaagtagtctgatttggtaaggatagtagaggaataggagatttttctgtgtaaacaagcaagttgccaatgcgaccggcgacgatggtgagaagaacagaccgtctgcttccacatcgttcacccatgtccattctgaagggtcggaaggaagagagtactatcaacaggcgaagagagcatgttaaatttatgttcaaactcatttggcggccaagcccgtccgcgcgtcatgacggatcaagaaaataaagaaacgaacgatttcagagactgttggcttggttgaaagagacgtgtccaaaacagagccttgagaaccactctgatagcttgaataggatctctgttgaaacgggtgtgggcaagatacattcatcggcttgagccttagacacgagcagcacataagtgaaaacgaacctgggtgtgtcgactgctctgggaaccctcgatgagtacttctgagctcgtcgaaatgtctctataggagaagccagaggctttcttgaagctcataacgctacgtctagagagaagagggtcggatgtgtatgatagcttgatattctcgttgttgataggtaacgaggaacttggcagtatccgtaagaagtatgaatcagaggagactctgaaaatggcgttcttgagcggttgttcgagagtagacctgctttcgatcgaacgaataaggatagaaagtgatggatgttgaggttaagcaagagaatgatactctcgtgtctatgtcggaagagcagatgtaaaccaacacaagaagaaagagagagggattggaaacagcaacagagtgatgttttgatgctccttacgttgtttagccttccaagaaagctcgcttgcctatgttattccaaccataaacaaaacgaccaagaactcgtcggactaggctatgtcacccaagagtaggacctttgaggtagatcgcaaagcttgggtttggacttggccttttacgtaggatctctcggggtttcttggcaaagagaaatcgatcccttttttttccttttcattttcaaattcaagcctgagcagcgttgattagttttcactcggcgcatcagttgcaacacagttagcttatccgccatcagctcagtcaatcagtcagattggtgtgagcgaagatgatgatgatgatgatgatgaagaaaaggtcagtttagaagaaggcgcaggtaggcgacaagcatcatcgccgttaactgggcagaatattatacagaatgttgtattttcttgggcctaaatgcttgacccgcggaacattatattctagaatttattggcatggccaacgggccaagccgccagaagctcttggttaagctttgtatttcctctcatcgctaacgaatttcggggttctttgactctttctgttgaactcaacgtgaacaactggatgatgcggacccatcagatgaagaagcacacacatggatcgtttatgaggtgagtttatatatagtatatttaaggtggataatgaacagcaaactaaatcgtgacgagtgggggaaaagtgtacaagtagtgatggcagaaaaataaggcgttgaaagaaacagaggaaaagagatgataaaataatacggtgtctctatcgttgagagtttatattttttcgttcaatctatagactatgaatcaaacggcgccaaagcgttgccagaaaggatccgacttgtcggtatccggatggatctggactttccctcgccataacgccacgctactcgcactcggatcctgtgatgggttgcccaaatcgttcgaactcggttgccaaccggctcccacgctagatgcgatcaacgttggtaccatggcaaggagcgacattggtcgaatgtccttcttctccatcatggccgaccgcgacttgaaagccatggaagacgactggagtcgacctcctcggattgttcggtaggtcgacaagttgtcgatcgtcttagtgatggcctcattccactcgtgctgctccgcgtcagggttcacttttggtagcttgctagggtccttgtagattttcagcgcataaagcacctttgcgaaaggctcggtaggaagcaaccggatgatgacagccaagggcagcgagagcgcaccaacgatgatactgattgcccagtctcgaccggtgatcctgacgacctggaaagcacttcctccgacgaagacgatggcgatctgacctccaaccatgatgccgaagatagcgaagaagtagtagtttcggaagaaatctcgtgtaaagatgttcaactttcgatcgagccgtcggcagttgagctggttgaaaatctgacagaagacaaaggcgttgaacacgatggtcgagacctcctgttgctgttggttgcaagtcaactcatcggaacagacgttgttgaggatgtctcctccgaggaagtgaaggatcaaacaagcgatgatctggaacaaggcctgtccgaggatcatcttaaacatgtcaattgtgatcaagggagccgtctttggggtgggctttctcagcaaggaagtaggcgtggcgggatcagtcgcaagggcaagagcagcaaaggtatccatctaaacaacacaaaaacgaacagaccaatcataaccccagcgtgagatttcattcttagtcataaccatgggaaatggaaaaaagaagatgacgaacgatcaagttaacccaaagaagctgaacggccgtaagcacagactgctcgtcagcagaagcgacggcagaaacgaaggtgataaccacggcggtgatgttgacagagatttggaattgcaagaactttgagacggaatcgttgacacatcgtccccagcaaacggcgctgacgatggacgagaagttatcgtccatcaagatgatgtccgaagcctccttggcaacctccgttccggcgatacccatcgagaacccgacatcagcttgcttgagtgccggtccgtcgttggtaccatctccggtgacaccgacaacctcgcctagatcctgtagagtagcgaccaatatcttcttgtcctctggagaagatcgggcaaggacctgaagtcggggtacgatggcgtgaaggtcggctcggctcagttcccggaagaccggtccttccataatcaatcctccaggagtgtagattccacactgggtggcgatcgaccgagcggtcaacacgttgtctcccgtgcacatcttgacggcaacaccagctccagagcatttcatgactgattcggtgactcccggtcggagtggatcttcaataccggtcacagcgagtaaagtcaagtcccgggccaaccaggtgaacgggacctcgccattctcgtccatatcggctgaaggccaggactcgatatctcggtagcagatcgcgatcgttcgaagcatgttgttggcatagagaatgatggttcgctcaatgttgtccctggtgtcctcggtaaacttcttagtctcgatcttgtcactcgagatggtctgggagacctcaagatagctcgaacaaagccggagaagaatctcggaagctcccttgaagtaaaccctgtgctttccattgggaagctcgacaactacacccatagattttcgctcagacgagaaaggcctataaaggagagaaacccgaataagaaaagatcgttcaattgaggaataacaagaaagaccccggttaaggggaacaaggtttgaggtattcaattaaaagacgtacagcatctgagagatcttggcagactctcgagtagttttgtaatccttccaacccagttcctttgcgaaccgaagcaatgcggtctctgtctttgagccgacaaagatcatctctccagactctggatccttatcttcgaacgcagtcgagttcagaacgatagcttggttgaagaggtcttgggtctcttggttgagaattgtgttcagggtgctcatctccaatgagaagtctcgtctggcctggaaggaaaaggtaggaagatgggtacgttgagcactgttttgttttatcttttgcgtaaaagtacgacgaaaaatcacacacctcctcagcgttggttcgtccctggttctcctcgagccgctggacaaacttggcattgattccaacagatccggcaacgacagacatggaattctgagtggcgaaagcacaagaaagagtagaaacgaaaaatgtttgttagcgtcttagacgggaaaatggtcggacgcgcaggaaggagagacactcacctgggtgagagttccagtcttgtcggtgcaaacaacagtagcgttacccatggtttcacaagccccaagtaatcgaactagcaagttttctttggtcattcgcttggtggcaaaagccaaggcaagggtgacggccaatgggagaccttcaggcacagcaacgacgacgatggtgaccgaaatgatgaggatatcaatgaaagcatctcctttatcagaagccgatcgaggggggttgcccgtcccgagttggacgaagaatcggatcatcaatgacgaaaacaggatcagaccagccaaacttccgagttttgcgattagctcggctagagcgttcaacttgagctggagcggagtagccggggtatctccacgaagggccataagagtccgtccgttgaaggaattaggtccgacagcaatcacaaggtactctccgacaccctccagaatctttccaccagagaccatgaagcaactacaaaccccaaaaatgaggaattagggtcggatgaaacatagaagtcagagaacagaaaaccaaaagagaatgggcgtactcgtttttgaaacccttctcggtctcttccttaccctctctttcggccaagcattcctcgtaagtgacctttttgatggcatctgattctccagtagcaccagattcatcacatttgacggcgtgtcctcgcaagaagataccgtcgacctgcgaaacgaaagaatatatacaataaacaggatgagagaacgctcaaggcagacgaggcagaaaaggagcgagcgcattatactcacaggcacgatctctccaggctccagaatggcaatatctccaacgacgacttcgtaaacactgatgatttgctccctgccggatcgaatgacttttaaacctcggtcctccttttgagcgttgagcttctggaactgcttctctttttgccactgagaatcagataaaggagacacaggtaggagagttaggaccgggtatttgtactgccaagaatacagaaatatagagacttacatcgttggtggccccaacgagagaaaccacagccacagcaaccaagatggctactccctcaacccagtcgacggcagggacttcgacaagttcgccttgggcgttcaaaacggttttaggcggtcgacccaaatcagtgtatagtcccaaagcgagcgaaatcatcgcggcaaccatcaagataatctgtattgtacggaaggccagcaaacgggagcatcgtcagcaaacaaacgagatagatcccaagacggtgtggagagaaaggaaccgccatatacgaaccaaaaccttgtccttcagagcgagccagaccaagtagagcaaactctttggcttcttagaaggcagcgtgttggtaccgtaaacccgttttcggtcctgggacgtagcctggacaactgtgccagttgatcctgctccagaagaggcaagtacagcatcatctaaacctttggtaggatgagtaccaagagcttcgagcaccccggctgtccctccaaacgactgaaggagaggtatcgatttactacaaaattcaaagtggaaagaaatcgacgatgtcagttcaaagaggaagaaactccgaaaacacgcgccatgggaaatgacatacggatcaaccaagcttgctaatttcttggggaataacgtgaacggtccaatatcttcggcgctcgccgcctcattttcgacatcaagcttaaactgagcctcctccttctcgaccacgtcctccatcttgccggtcttctgttcaaacgcggttttctcggattggttgatgaatgcactgtccgtgtgggtgtccgagtgatcggccgctgtgatatcagagacccaggtagcgtttgaggctcgtcgtctgtgatcggctcgatcgtggtcgaccacgtcaagcgtgccttttccagagttgacgtccgggtggttatccctcaatacaagcgaggtatgcgctgccttttctggtgtactgaacctgacggacgaagcggagagcgtaggggatgcaggagagaacgaagagtctgcatcgttcatagcgtcgctgggcgagagattggccggatgggatggcggagtgataggaggaccgagcgctgtgcgacgcgacggcggtggttacgaaacaaggttgggattacaaaccaaatatgatgtaatcgtcagcttcctgtgtgaccctgatttacccgtccagggggagggaaacaaaacaaatatcgagattgcaacaccgcctccttctcttttttttcttccgctcagaagcagctagtaaagattcttccttcttcgtttgctatcttttctactgcttgtgctggattgggatgatggcatgtggttatgatgggaagacgggaaggcactgagcacggtcgtgctccatcgagaggggtgcgcaattgagtggaagatttggtggggatcggaatggtcatggaaagatgaaacaaggctccgtctagagagagaaagttgcttaccatactctaaacttggactggtgttgaccgaggaactgaactcgtccgcgtcgggcgctgtggtggtgatgatcaagggaggcagtatcggagctgacatcttgtggaaaagagagggctgtagttgtttgaccttctacaatcgagaacagggggccttaatgaaacgagccacaggctgtttgagaatccaagctcttgagaggatggataggatgatcacgatatcgatgcaggtcgtttaacaaatttataggagaacggtggtggcgagggtggtttactttgaacgggtagatcgatgaatgagaagagaaaaggaaaggaaaggaatcaagagatttgaaaggagacaagaagtgtatgttaaatgtttaaggagaaatgggcgatcggtcgaaggctatgtcagatacaaaagacccgaaaactacaccgcgggaactccattgaaggtggcagcgtgatacatatctcaccgcccaatcgttcgtctaaacccagaggtcgcttatagtttcagttgtactctgtcttgtacgagttcatcttggcaagtgaacacaggcatgatcttttgttttgttttctttctatctttctgtctctttactcatgatttcttggggttgaaactgttagagatattagcagtagtcgctggacagcctcataatctcttattcatcgatcagacccgattgccaagcaaatcttcagtaacgcattagtattacctactatatgtccgtcccggtccatgaccttcacgctttctcgatctccctcttgctcttacaaacatacatacgtatacatcatatcagattctctcgttcccctccaagcacgttctaaattctctggaggacggcaaatgtctgtacacagaagaaaaagctgtgagaggatgagagggctctatcgttccgaccatatgtttttctaggcaaaaccttcaccggtgtttttaacgtcattcgttacgtgtgcttatgcggccaagggttactgcaatgaaataacagccataacgaacagagctcatctccatacgactatagcctgagatacaacagacacatcaacgtttgacccaaaatactccggcaccgcccataagacgtcaaaagactgagttctcagaactttgcactgttgattcccgccaagaacacagcctatcagcttggagatggggaacttgaattgcacaggctgagatagatagcttactgtggtaagaactttccgttcaacgtgattttcacgcggtctcctttaggatcctgttcccgctcgacttcggcgtggaaatcaaccgcagagatgattccgtccccaaactggtttttaacattggcaggccccggcaaggggattgtaacaattgttaatattgtcggtgggaacaccgctttcatccatgatcaaacacacaaacagaccttttcattgatgacgtgttctgtgagtgtaccacaaaagaagaaaggatcaatgaatgtgctacctacgtatcagctataaaatagacatctagctagaacctactcaggggatatccatagacgaccatgatctcgtataatcgatatagcataggatccttcggaggtgaactccacagatctctgccaaagtctcgtcgacaaagagaacgggaaacaaaaatacaccccacctatgagtcttacggccttgatcgcgccccgtataagactgagaatccttaccctcgagatggaaagtagccttcacccatacccgtgaccggtttcatcaaagcgcttgcgacatgacctccgagaacaaggcctagcttcttgaggtcctcctcgcttggctttgctctgttgtcaaaaacacgaatcccaaaaactgagggtcagtgaatgatcagaccgctctctctttcccgaaccgaaacgaaaatagcctcttcatcacatactgtccatagaatattgcggccacaaagacctcgctccggtccattctgctggcgatctgctcaaaagtcagttttgactcagctttggctgcaagaagtatcttggaaatttctgaaaggttgttgagcgacattgttaagcttgctggtctgatggtctaagctcagtcctaaaacatcgagtccaactggttcttataagatgtaagagatcacctgggtctcattcggctaaccccgggacggtgaatgaacgagagttggggtgagagtgcgtaaccctaacaacgtcaacgcacacaacaccatcatcatctatacactctctaattatatcagacatagatcggcttcacacacaacctctcgtgtttatccgccggagatatcacccagatactccctgatccaaacatcaaccatctgtcgttaagatgtcaccgtcggcgatcacccggctgtcatatttgttgatttatgccattccctcaccagaagaagaacgggctgccagagatgcgttcgctgacgaagatagccaggaggccagccaggttcttttctattactctacaaggaacgttcaaacaagagacaagatgctcagacatctagggcttgctaaaggactggaaaactttgtaaggtagatcctttctatccggtttgatagaccaacaagagtcctttcatcgtcaccatcagcagtagggcttgcaggctgactgccggctgatcgtttggtaaccaatccgattccagcatgtttgatgtctcgacggaaccgactctgatcacctccatcaaatcatctctggtgacagtgtccccagaaccaggatactatatccatgccgtaagcagcgaaagagtctctttctccttcagtcgggctatataaaagaaaacgttctcatcaataaaacttgtgggtgtgtgcatgtctacagaatgtcaccttggactcgtcaagttcatcgtctctaaagtcaaagaatcctgctgatgcagctgctccgaaggatatccctgctcgagtcattgaatcatatcttctccaaacatatgagacattcaaggtacgagacttctcatcttgaatgagatccagggtgtgtcgttttgactagaaattaatgtcttccttcttgtccatgtttcaatctatggtcgagaaatgtattagcttctcaacggaccgatcacagccctggacagcctttacggaaggaaagaaactgagagaaaaatcgaacagttctggaccacttcactctctacatgggagttcgagctagaagcgggtacagcgttctacttggagaattttctcggttgtaagcttctctcctcctatatccctatatatccggtactgttatcgatgctgacttggaaagaacatcattcgtgattttgaagctcctttaccacctttgtcttcccatccgccatcacaatcatcttcctcttcaccctgctcaatcttactatctcgctcgcatatccatcgtcgcgatcaccctgttccgttccctccatccctcatacacacccttctcaactatttaccacccgcaccgcgcgcaaatcccataacaacgaataacaaatcaaagtcagccatatatgaaacccggaagagtttcccgttggactggggagctaaaaccttgatgcatgggataggaatccacacctggagatctaccacgcctaccgagacctcatcaacttctaaaaacatctccagtccgaccgaagacacgaaagagacggcgccgagatcgaaacattcatcctcgagatcatccttaggaggacttggagggatcggcgcgttttttctacctaaagaccattccacccaacagcagaaccagcaacaggagatcgacaaaagacggactcgatcgacaggagctggttcaggctctgagaaagcaaaagacggttggaagtggcttctcggtgaaagtctaggatcggccatcggcataggaggatcaaccacaccttcttcaagttccaaggtagccgctgctagttcaaagacaaacgaggcggcagaggcaaaagacacggtggagtctgagccacaaggtgaacacatacatgcggatgtggatgtgaacaaagaacgagaagatgatgttgacccaaggcagatcccattgcccggctcaccacagatggtagaatccgcgaaagagataaagattgacctgttgagcgaggcgatggagacagtgctacctgtccctagcgtgaccgagagctcagaagaagtagaagatgaaaaccaggctgacgaaacaaagatagcagaaggagaagagaagcaggacaaagagacagtggaggaagagctagtctggagagatctcaaagtctggctagatcgagatgagaacggtacggaagagcacattgaaggcgaaggagagaaagaaggaccaagggagtctgatcttaaattcactatcgtttgtcctctttctctacaatcttcttcgatgcagctcaagctaccttgcctctatctatctcactcggattacttactactgtccgctgcttttctgtagatcacatttccagaccagaagacccttccaatcttatacgcctactttcccttcgacccttccgttcccgcactcactccctcctctttccctgtaccaataccgacgagatctcacatcatgaagtcataccattcatcccgtcaatctcctcgtgcacatggtcagtcaaactcggcaagcgcaaacctggttgggcttacttccggtgatcatggagtctggaggacagacaagtcagaggcagcatgcatggaagatgaagatggtgcagatgacggtggcccagcagcatcagccacagccacgaaagacgggaaggtaaagaaagatgccagagaacgaagtttgttgaggagtttggagattcttagatcgtatgttttcctcctgctccttctcctctctttatgaggacaccaaagtcgacatcaaacggtctcgtccgacatctaatttttttgtttatcttctccttctcaacccttgattcgataacagagacgagatgattcaagagaccatagctcgcacgactttttcttcctcttggctcatcagccggatcattccttcctcctcttcctctccttccgactctgatggacctggcacacacgcgaatgacgttgcaatgccagtatcaagaaagaaggatttcgctgagaataggaaatctaccaacagaagagagttggtgggttcggttgaaggaaaagggatcacattgggcgacttggataatcatctagccacttgatcatggtctttttcttttcttattctggttgattggaggactaagaaggaaagggaacaagaagcagacagaggatcatctgatcgctcgcgacatatcagagaaaacgagaaacgataaggaaaaaagctagggaggggaagagaaaaaagaaagaaagagtgttcaaagtgggtgaatcgggtgtatttgtgagagaaagagaagaaaaaagtttgcacaatgagaaagaggttacagatacacgaattgaattcgatagagatggcaagggaagaagcgatagctgaggagcggggcgtatgaggacgagggttaaacgaataatgacaagcaaaaagcgcagaacgaaggcactacagttttgttgaaaagagaccgatgctagcatctcaagtagacttgatggacacttccgacaagatcctatagaggcacgaagaaccattttcatcagttttcagcgctgaacacttgcgtcctatgtagaaagaacaagaaagaaataaaatgattggacctacttgaaagcctccttgtaagcatccaaaagagccttaacccgagttcgctcggtaaccagggcttcgtcctcgaacaacaagtttgcgaacagatctggtttgtaaaggttggttaccaatctagactggactgattccctcgaaaagttgaccaaaagctagtaggacggagaagggtgggtggtttcagtttcagttgtagaaaagtggcggacttttgtatgaaacgctgatagaaagagataggaactgacatgcatgactgcttttggaacgagatcctgaatagtttgacgaacgatcgcaaagtaagagcaaatcaacgatcgaataaggtttgtctccatctcttctcgcattgacagctggggctggtccgggtccgtaggcgccttttcccaaatcggagacagagagagtacagaccaatagagataaggcatgaacgaatcagcaaacagaacaattgaacacacatacacatcgatcgaaacgagaagagaaataaaagctcgaggtacataccggctcaagatgctttcctagacttctcatgtcaaaggcggagccaggtccatcaaacgatcgagttccagacacccttgagtccgccctacccgtcaaatcagggaaagtatccgacgcaccccctcccacacctctaccgactgctccactgctagtcgttaatcctgatgaaagtaatgaggctggtccagcggtggattcacccggtcctccgggttggccaccgaaaaagtagttcatgaacgaatccttgtcctttccaccaggaccgccggccgctccaccagaagcgatgtgattcgaggtttgagataggatttgactcgttcgctcagaggatcgtttggacttttcagaatgatgatggtgccctcgagttccatcagtgggcgtagccgatcggttcttaattgaccgtcgttcgtgctcggatcgatgagtcgacgaagcaccattcagaaggacgtcatcagagtcaatgtcctgggactcggcccctgggtcagaagtcacagaaggcgcttggggaggatttgatgcagcgacagctttttggtgaccttgctgagcgatctgagcagaaccagcaacgaaggctttaggaagacaacacccaagaaaacatgacaatcagcaagggttttcagtaggttgaaagactgatatgagtcgatgagggattccataccaggatgattcgtattgatgtatgctgcctggatagagatcaaactggtggtgtagtccgaggtaggaccaagcctctcccgaagtagctcagtgaccgtctcgactaactgtgaatgaagcttagggaatcgctccagttcctatatggcaaaaaataacccaacacacaacacatgagtatgaccagtgagaggaaatatcttataaagtgaacaggcacatacgggactagtgcaattatggcaaatcttcattaactcttcgtataccagctcgacacatctcaaactgggcgcctccaacaacttgatttgaggtttcaccagtaattcgaatgcaacctccggtacaaacaaactcggcctaggtccggtagagtttctgatggccgttctgatatcttgggtcgataggttgttcgccggatcgatagattcgagagctcgaccaaagacatcgtggaagatgtaataaatcctggcaccaccacacagttctttggtagaaatatcgagagatgtaccatcaatggcggcaatgaagtctcgggcaaactcagtcatgagtttgaggatgagagaacctcgatgctgttctcctagatatgacgcatcaccgaacgagttgagctcctgctgggtctggcccataagggtattaagtctagctttcatatccggcaacttttctctgatatggttcatcagaacctatcatacaacagacacaaaagattcagacgtgtaagatgtctcatgacgtctgatggatatacggaaccaagatatagtgaattcttacatgattcagctgcttggctagatatctagttccgcatttatgagcgaacgttctataagctccatgtctgttgaagaattcttcttctttgaggatagcatccctcatcggcaatcgattattgatgtcctgctgggatcgacagacgattccaatgaacccaagtttgagaggatagacccttccggtcaggatgtcagcagcattggtaccggcatccatgaggtcgagtttggtaaggacaccgatggtacgaagacctcgaggatcaaccgatcgggcgagtttgagagcatcggagttggccaaatctacgttagcaggagagacagcaaggatgactctgtgatatgacgaccgagacgaagaaacggttacgatcaagtaataaaaggacgatatctggtgagaataagacaaggcttacgagttcggtttagagatgaagtcagtcacgagggttcggatctacagacgcatgttgatcaataggcagtcccaattagtcaactggcttcatacgttttcgacgtttcttgaaaaactactatgacgtacctgcctctctatatcgctaggctgatctccaaccgggatctacacagaaacggacccgatgtatgtgtgatcaactttgcaatctttcacgcgagttatacatgagggactgattacataccttcgtcaatcccggaagatccacaagggtaagatctagcacgccgggtccatagattttcaggtgtataggaagtttcgagattccctacagattcccaattacgttataacatgacagtaaatagcaattctacttgtgaaagactcaagaagaggctctttctagtcaacaagatattgttgagagaacatcaaacccaccttgttctgaccggcgactctaaaggtctcggcctcgatttcctttcggatctcttcaaaatcagtaaatcgcttgttgacatggaggaattctgcgtagtctgttccgccttctcccaacgtagcatcacctgcttacaaaaaagaaagggtgataagagccaggttgaagaagaagcgcgtgagtactagaacctggttctaacgtttacacggttagacgtaccgtttgcagccggtttgggagtatgaatcagttgaaggactaaaggtcgtcgagtgacgatcccctaaacgtagacgaagataggtaagatgaactgtttcagcaaggacccaacgatctcagggatgcagacacacaacgaaaataagaacgaacctgtcctctgggtaagaaatctctgccaacgatactaataaattccaaaccagaacccaaatcaaaccccaagcatcaccgccatccccacaatcatgtatcatcaccagtcgccagtcaacatctccacaccttggcatttacatttctctaaaacgaaagaaagagagtttggcttacgtttctaagactgaggatttccccgaagattgagatccaacctaatgttcaaagacagacgcaagagagaacaaagataaaaacaaaagaccaaaccacgaaacccatcagatactcctcttttcatctggcacattcaaaaggcatctcgagtctcttcttgttctcatctctagtttcgagatgacatattctcaagaaaagactactggagtaataaaaaatcaacagagggacatacaactacaatctgaggcctgccaacgaagagagaaacacatatttcatttagcttctgacaatctcttgaaccaccggcctactatttagaagaaaacacaaaacgagataaagaataattgtaaacttacaggtcgactgcatcacctcctatggcgttgaatgtatccctgtgtaacaaaaaagagtttccccaaggaatgtatacacgcatatacatgtcagacgatgagcggtttccaaattgatgctctcgctgtaggctctcttgaacaagcaatgcagagcggagcagataaaacataaggaaataaggtgagagagacgaactggagcttgttgaccagcgagattaaatctccatccatagacatttcttctgaagtataaattgtcgataatagatgggttaaggtggatgttgttggagcaagtgtctctatttgtgtggaggtttgaagtcgaaaggctgatgctggacgttcaaggaagggctgaaggtgtgcaactattctcagacaagggcaaacggagaagaaggcgagccgtccaagtgactgtgtgcttgtctgttcaagaaagtgagggtgagagtacgatggaaagaaacagagagggttggggttgagaaaggaggaatgaatggagaaccgcttgaaaggagctttgaaagcgctcgagagaaaatcgacttgcctgccgatagtggctgcgcgttgcacccgctaatctttcttttccttttcctttcctgttctactcaggtatatgtgttatgctctttcttgaacagtagattatgatgtattgctcttacaggtagacatagaaatatcgagtctggaattgtatttcatcaggccgttaagaatctattgtaggcatgatgggaaataaatgggttggtagaggaaaaagaaagaacgatacgacatcgtattggaacatgaagaaagacgaagagagaaagaaacaacaacccgggcgcttataggtgacaagggccagcatagacggagtaaaatcagaaaagagaagaatgttgacaggagacgactcgagaggaaggacagggaaagcgcgtagagaacaagatgaataaagtaagcgcaagagaaaaaagagaaaaaagacgagggtagttcacgtttaccagccctgttctgagaacaacaacgaactgatgaaaagaggggcacagattcagttaaagacgctctagtattctattaatacaaagggaaacgaggaaagaaaggtaaataaaaacgtacatggactctccgttgtgcgttcgcctgatgctctcggcgatcgtcgcactcacatcaacaacatcgagaatgtcgttcttgcactcctctgtcctgtgagtttgaggcagtgtgttggtgaccaccaactttttgagcggtaaatcttggatggcagccatagacgtctcggagagcagacctgatttgaatttttgagaaaaaggtaataatgaaaaagagtgagccgttgattcactgatttctgatatggtaagacatccaaacataccatgagcaatcaaagcccaaacttctttggcacctcggtcgttcaagacctgagcggcgagcgagatggttcgtccagtgtcaacaaggtcatcgatcaagatagcgacctaagtaaagcgtgatgatgtttccagagctgacgtcagtattcattgatcttggcgagttaatcagatgtcttcattgacacacctttcccttgacgtctccaacaagcaactcaacctccttcttctcttctccgtcggcatctttcggaatcggtgcctcgggttcgccattggccagctttttttctcgctttgctcgcttcctgttgatgagcgcaaagtcgagaccgagcctatcagccagggcggtcgctcgcttagctcctcccgcatcgggagagacgatgatggcgtctttccagttcgggatgttggtcttgatatatcggaccatcagaggctcggtaaagatgttatcgaccgggatatcaaagaatccctggatctgggaggcgtgaaggtccatggtgatgacatggtccgcaccagccacggtcaacaagttagctaccaatctgataaagaaggacgtttccagaagaaacggaacgttgaatcagctaagagaaagcaaaggaaatcgagtacaaagaaagaacgcacttcgccgtgataggagctcgagacttatccttcttatcctgtcgggcgtaaggatagcaagggataaccgccgtgattcttcgggccgatgcggtcttgcaggcagagataagaatgagaagttccatgagatggtcgttgaccttttgttcgagaagcaaaaggggcagaaatggcagccgagaaagatttcaagagaagagagtttatgaatataaacaagacagattcagcccagcattcatactcggctgattgttttcaagacagactcacgctcggaggactagggctttggagaataaacacatcctcatctcgaacggactcgtggatcctgactccaatctcttggtcggcaaacttagtgcattgagaggaggtcaacgggatacccagtctaccaatccaaacagttgtaaagcgaaggcaaaaaaaaggtgagggaatcaagcggatgaacatctctgagtatcctaacacaacaagaccagagctaggaaccaggcttacctctcggccacagctttagcaagctcaggatgtgagtttcctgttgtcgtttgagccaggaaatgagcatcggtagagagtccgagaaggaagagacgagggaaagtcagctcggctgaaactccgaagaggagaacgagtgagttgattatgggagaagcaagggcttaacctgtcaacaatcgaactccgtttccgctgtacatgattggtctatgaagagactgatagaagtgtttttgcttgttctggattcttgataggtgcagagtggatgaggagcaagaaaagttgagagacggttcgagaggacgagcaaaaagaccggagccgagtagacccgatttataaagtgaaaagttgtccggtaaatgtcaagattttggttataaaaaaaaacaaactcttgagcttaccttgatacaacttgtgcttatatccgcaaacacaacctagagacagaacgaacgttcaaagaagggttgtttggatgcttgatggtgcgtaagtgtgggcaggtgaggtgatgagagaactgatagcaaaaaaaaaagaatgaaaaaaaaagaaattacgcaaacacgtgatgatacaacaacacgtgattttaatcacgcagtcatcaaccgtaaccacccccatccctggtcgctcccaccgtctggtactggaacctccgaagagaccaacaaccgccatcagctttctcatcctcttccttctcttccttcaccgatcactatggcttcgatacagaaccagtttgctcgtaagtcttgtcaaaagaacgttctacggccctctttctttttcctttcgtatttccacaggtggctcctctgaagagagcaagcgactgccggttagccaactaatttactgaactgtttgcatatctctcctcttcctttctccttcgtgaatgtcccagttcgagcccaaaagtcaatgtccttgatgaacgcctcaccttcctacgaggccgttcccgagttccaagcgttcgtccctcttgttttcactttgtcatgtcatcttttggtaaacacctttagcgcagcgtcatcgacgagtctcaaagtttttgaaaggacaagaaaaagtcgaacccataggaaaaacccatttgcaaccaactgactctgtctttcattacgatttctacagtcctgaaggtagcacacggatcattcagtactctcccaatggacagttctttgcctatgctttacctaatgagtaggttccgttggcttgcccaacttgcttcaccttgctcattctcttgccttggtcgagacattggtccaactgacaactctcatactcgtccccatcactctcctcaacaacagagtcgtcattcttaacgccgacaacggctcacttgtacaatccctcgccgtttctggagctgttgagattgctttctcgccgaagggcacttacttgagcacatgggagcgatatggtccgttcttcaacacaaaagcgtctctctctctgccttcttgattaataggcctttttgtatctgcctggtccacatgagctcactttgcattcttcttgtctttgcaacacatctgctgcacttcgctgcacctggtctttgtgttgactctatccaaaaacagttaagccggaagaccctaacgcccagcacgccaacctccgtatatttaccacagccaccggtgaggaagccatgtcgttcactcagaaagctcaggaaaactggtacgtttcatagttcttttgctcagcgttgataacaaaaagagataaaaaaagattcaatcgccctctgctttgcatgtctgtcgaatacgaacgtctgacgccattccttcttacaatgaatcttgtattaaaggcaaccgtctttcccaccttccgagtctcacctggtccgaacattcaactccgaaatccttctcttccctacctcgacttcccagcctcttaccccatctacacctccgacttctcgattaaaggtcgatggtcttaagcagatctgggtgggaggaggagccgaaggtgaaggtgttgccgtgtttgtaggcgagaagaagggtgctccggcaacgctcagcttgtacagcattcagacccttaaaggatcttctcctgtggccaccgccaagaagactttctacaaggctgacaagatcactgtcaagtggaacagggccggtaacatggttcgtagcagtccaattggtacctatccactcaacatcctgatccaactcgtcctgaccctttgtgaactgcctttgtttcatcttttcgtccttccaggttcttttcttgacccagaccgatgtcgacagatcgaaccagaattactacggagaaaccaacctctacctgcttgctttgaagggtgggttcgagtgccgagtcgcattggacaaagatggtccgatccatgattacaactggtcacccaactcgagagagttcggtgttgtctatggatgtgagtctgttttctttagatgagatattgtatcacacaaggcgcgcaaacaaactaaaacaatcatgcctgcaactgtttttggaaatcattagatatgccttccaagactgttttatttgatactcaggcccgaccaatccacgatctcggtctttcttcccgaaatttcttgtccttccaacctcattcccgattgcttctcgtggccgggttcggtaatttgagcggaaacattgatgtctgggatcgaaagtcgatgaagaaggttgcagagattctcgcgcccgatgcaagtcattgcgcttggagtcccgatgggatgttcatcatgactgcgatcttgagtccaagattgagggtcgataacgggttaaagatctggtactgtaccggtggattgatgcacgatgagaagcactcggatctctaccaggtttgtcttttccctcgcatcttactgttttcacctgtgatctgtagagatgatatatctcactctctcatctccttgggacatttcatcacaggccatctggcgaccgatccctctggtccagactccttcattccccctgacgattcctgccgcgccagtcccgtcagtttcggtttcttctcgtcctgccgctccggcagcggtcaagcctacaggtgcataccgaccccctggtgctaggggctcgcccactcctacgctcttccttcgagaagatcagggaggacttcctaggacaaactctaatggatctgtttcgggtcctaacggtggaatgttgggtcagcaacatcacctcgggtcgttcaacaggaaccaacaacgaagaaacatccctggtgctccccctccttccaacgacggccaacagcagcagcagcagcaacgaggccaaggaggaaagagaggcggaaacaaaaaaggatccaacggtcagaaccaaggtcaacagagaaaggatgactttgtgcccaccccggtggaattgggtccagtcattgaggtcgccacggttgatccggaggctgacccgttggcgaagcgaattaggaacctttccaagaaggtatgttttctctctactttcgtctcaatttctgcacatcgcgaggaaaacgtagcgtgtattcactcaacgaacttatggattgtttcacggacaaacgaattacagttaaaggctatcgaggaattaaaggataagctcaacaaaggcgagaaacttgaggctactcaactttccaagatcaagaggtttgttctcggcctcctcattttcatcataattttgcttctgtctggacgagatgaacagtcggctgaccaaattgcgctccgttcctgttctttcattcccatagtgaacacctcatcaggcaggaattggcttctatcgagaagtagatcgtcgtacccttcccaaagtttgttttccctttgttctgatctagctatctagtcggttcctattgtcgaggtggttggtggtctcggtaaggtgtaaaatgtatgaggaagaggggggaagagtatagagaaagagaagtcttatatcaaaaaagaagaatgatgttgatgatgttgatttaaagacagaaaatgaggaaagtgacaaatcagaatttcaaaagtttgtgtgtgatcattgttcgtcgacatctagatggtcgtccagcaatacaggctgtaataatctctattgagacctaggctgtctatccaatagcaatcgtttttgtttttctcttctctcctatgatcctgtatgcttcgatgtgtggaatattgcgacccacaggattcgtctcaagggtttgagtctactcctgttagatcgatccgtctcatcaattcaattcaagtttgactttgacatcctttctttctaaccggatggagctcgatacaatcttcacagccgacgacactcaacaaaaaacagttagtttgtttctcccaaccttacgaacatgttcaaatgaatatggcaagaggatgtgtcggatgtcacttgtctcatttgatttggctatgtacatgttatatcggaccatattactgtgctcaacagagagcgcgtgattgcaaaatgtttcaataagaaggttatgaatgctgagaaagggtttaacaggtgtaagaaggttctccaggagcaggcatgtgctcgagcaacgtatcgttctcgtccactccttcctatcatgcggaacgaagtagtggggtcgggtaaggacatatgcagattattcagcaaagttcaatacaggaaggaaagcggaagagaataaataagcgtaagtagttcatcctggtcttgattcaatcgaaccgatgaagcatgtgaaggaaagacgaacctcaacctctttcagatccctctccacaaccaacttcggtccttcgaacatcctattgacaaccgcgcttcgcttcatggtctctaattcgttcgtcctgtccgcaaaccaggctttgagaatatcaggttgagtggttgaaggaatcgctttgaattgatccttcgtgcggcgaacaaagtctttcagagcgcgatgagtaagaagagaaagagatgaaccgatcagattctagacaaacgagaatggggaacgacgacacctacaagaccggaagttgtaggacgcaaactggcgagaagcctgaagagatgacctgtaaagcgtctgaagctgagcttgcgtaggagcagcggacatgtatgacaaacgagtgtaagtgagggtggatgtatgtatgtatgtatgtatgtgtggtcaaggtgagtgtcaagagtgaaggtgagtggacgcagttggatcggccggcaagaaaacgatcaaagtcacgtgacttttcgttcgtaaagccgttagaacactttttggttgaatagacgatcaacatctcggaaggtcgttggtcgtttggcacatacacacgcacgcacatatacaagcactctcacactcgcactcgtactgtgaaggcacttgaacacaggccgtcgttcatatggctccctcttcgacttccaagagctccttcaatggaattctaagtagtataagacatcatgcccttgcgtccctcttgctcggatggattgcctaccttcatctttccggtctctacttgtttactaaagggttccttctcactaggcttactctggacgagatcaacacctgctctccttcctctcccgactgctcaattacacccaggtttgacaaagccgtcgtactcatcatcgacgctcttcgtttcgactttatctcgcccaatccttcgtcgcccaacgatcccaaccatcatcacatcctcactcttcctgccgagttgaccgcttcggacccaactcgatctgtgatctttcatgcacactccgacccgcctactactactcttcagcgcttaaaaggtatcaccaccggttcccttcctacgtttgtagaagccggctcaaactttgctggctcagccgtcaaggaggattcctggccgttacaacttcagcgagctggaaagaaagttggcttcatgggagatgatacgtggctttcagtcttcccagatttgtttgcaaagaatctttcggcccctttcgaatcgttcaacgttgaggatcttcacaccgttgaccagggtgtcatcgataatcttcttcccctgatggaggacgtcacaaagaaagacgaatgggacgttctgatcggtcatttcctcggagtcgaccatgtaggacacagagtaggaccttctcaccagaccatgaaggcgaagttgactcagatgaacgaagtactcagaaaagtcgtagacgcactcgacgacaatactttgttgatgctcttaggagaccatgggatggatcgcaagggtgaccatggaggggacggagaactcgaaacgtccagtgctctttggttctacagcaaaaagccctcgtttactccttcaaacccgcttgcctcggttcctacatacacactttccggagcatctgttcctgctcggtttgttcagcaaatcgatctcgtcccttcgctttcgcttctcatgggacttcctatcccatacaacaacctaggatccatcatcccagaactcttctcctccaagcgcgagcttgcacaggctttcgatatcaacgctgctcaggtctggagatatctgcaaagctacaggaaggtcgtcggctctggaaaagaggccaaaaaggctgttgaaggattgaggagagtctgggacaatgccggaagggtgcagaatgatctgaaatcagcggaagctctgcccactccatccatcgagcttatgagcgctcagcaagcattccttctcgagactctcactcaatgccgtcttctatgggcccaattcaacacgtcttctctcctcctcggtctttgtatcctcctcctctctttgccgaccatgtggacagtctacttcgcgatctcccaggaacgatcgaattgggaacagtgggctcaacagaacttaggctctgctttttggggtgctcttgggggtggcatcgttggtggtctgagctctgggcttggatcagtgctaggtggtaacaaacaggatgggctaggaatgggtgcaactgtactgtattcggcggcattcgcttcagaattagcgattctagttccccagttcttgccgtccattcaggtcggtctatatttctgctcttgtctttcattttttttaaagctgagatacgttagaactcgtgggactgatggtttcttcttgcgctatctttacagactcttcgaaccaacattactcgatttggacggcctactctcttcagcctcatcggtccaatcattcttgtcatccactgcattggtctttctaccaactcattcatcctctgggaagatcgaatcactctctacttcctagtcactatttctctcctaagtctcgcctacgcgccagctgctcctatccccaatcttcgattgcgactcatcggtttctcccttctcttcgccaccacccttcgactctctggaggttcgactatatgcagagaagaaaacggagcatcatgctcagtttcattctatcaacacgcgtctacccctcagtcgcctagctggttgctggctttgtctttccctgtagcctacgtgctaccgagcattgttggttctttccttgggatctcaaagtcttatgccggattagcacccaccataaccgggatgttatggcgaggtgtgatgctagctggttcagtctactggttgtttgaaaggggggaaacatgggaagcggttaaccctgcccggattcctttgttgaagtcgtcgaaagtttggttggccaggctggtgtttgtcgctgtaggagtgatttactttgtttggtatatttctcctctctgtattgaagcccgtcgagctggcgaggaaaccaagaccggcgctgaagaagaaggggaagaagacaatccgctggctcctcctaagcccaagaaaggtcaacttatcgtcttgggtttcgccaactctttcggatcaagctatcttctcttcctcctcccattgttctcccttctttggatactagctcaaccaactggccaaatcgtcctagcgctcaacctcgtcgctttgctctcgttcttagaattgacagactctcaaagagacgttaaagctgttgtacaagctttcgctaggtcaacagaccctgcaggcttcaacggcccggaagccggaacgatcctaccacccacgttcactgaagcttccaccctggctcttctaagctctttgttgttctacactaccggccatcaagccgtgctctcgtctatccattggtcgaccgctttcattggtttcccgacactcactcaacccatagctaccctttttgttggactgaacacctggggtccgttacttttgatcacgttggccgtacccctactcggtcattggaacgtctccccaagaccaaaaaaccacgtaccagtcttgcctgattctctcaaagcgattcttggctactcgatctatcaatcttcggtcgcgatctcaacgatgacttgggccgcctggcacaggagacatctcatggtctggccagttttcgcaccgagattcatgatggcggccgttgggttggtcgtcgttgatctaggcctagttttcgctgttggagtgggaatgagactggtcgataagaaagtcaagaaggtctttgccaccgtcacttagatttcagttcttcttctctcctcttcatacaaaagcgattaaacgatgtttagcaaacaaaacgatgcttgcgcttgttgttcttatttgcatttgtgtttatgtttacccggaaaattcttttctttttcatatcattattataaacgagggaaccaaggatgaccgccatccgcctggtccttcttgcaagattcgattaattgcgcttgatcctaatcacaaagtaagagacaatcccaagagcgataacagagttcgatgcgaacagaacgaaggtgttagtacgctggatgaatctgaatgatgggcgacgagaatagggaacatactgcttcgagcgtcatggtaatatgttctggaagcgggcttgaaactatagacgttgctttagtcgggaagtcttctaaaggatcgttcaggtcgatcgaagccttggttatcaagacaagacgaaataagacaacataagagatgttagatgctgcacccgacgtatctgacacaccagttatggtaaaaatctaaggggtgatgcaagaggggaaacaactaacaagaccaaattgaatagcttgacaatcctgatgataatccgaccaagttaggatgaatcgatcgttggtcatgttcgaaacggaaacagaggcggtccagtcgacccatttgaatcgacttttgaacctcgcttggaggacttgtggcggaagagtcgcccgaggaagagcggcctatgatcaagtccagtttagagtttaaagagtaagagtaagggtcagtgcagaacgtgtaagggttattcccatggttgatgtaacaaggccaggaaagagacataccaagaaccgctgcctagcgagcgctcctaacgcccgacactgcatctctttcgcctcccaagcagcctctttatcctcctgtccttctaattgattcaacaggtttttctttcttctcaaagagttccacacagactcttcctctccaaataatctagcgccagcccaaaagatcattgcgtgttcgggaggatcatacagttcaagctcaaatccggaaaagatcacatgtcgaatgaggaacagtcgatgggcgtgaagcgcgagggggataagacttagggggatcgtccggctcgctgactgttcacgcgcatattgtagaagaagggagaaaagcggtcaaattcatatgcacatggagaaagcttagccagcaagtagaagaataacaacggcagacgatttggttttgttggaagataagttgaatttggggtatcagatctatagcctacacccggtataaacgatacacgagcgtagaagaccatcggaggtcagtttctgtacttgagaaggaagttggtcaacagaaactaaacatacttcgtcgtataattcttcccattgggagatagatttcgcaatcatccgcttttgtctaggtcggttctggcaaaagttgatgagcgtgtttaccagaaactaaaccagtcaagagcgtgaaagagtcgaggaggtataaatcagtgattggttgtcagcaaacgcgcaactatgaatagaacaagattgagggtagtcgagaagcatggcgaggtgggaaaggaaggtgaagacatacgccagagaccctttgctcgaataccttgacggcattacctaaacacggacctggtctgacgtctcccgtgattggatctgaccatctccattgtgggggatatacttcatctccaagctcgaccgcaagctcgatcgtccgtggagggagaagcgcgttcgattcgaagaaatgatcggatagaatacgaagcggatgggagttaaggactaaggaagttcgagacgagtagatcgtcgactaagataggaagtaaacagtcagagctcaacctaggatatcataaatcaaaaacgggtagaggaggaaacgtacgatagtcagggatcgaatgatcggtaacgtctgaggacgagttttggagacgatggaccaagccgacatgtattccttgttttagcaattttaccccaatcataacacgtaaagattagcagaagagtgttaggggttcagacataatctcctaaacgtcaataaagatacaatgggaatatataattaacgaaccaataacccctcaggtccgccctctcctagcc

SEQ ID NO: 1518 - DNA, 10151 bp, Xanthophyllomyces dendrorhous
caaattctttaccatgtcccatggaacttgttcaatctctagcactcccagcggtacatgactatccagtctcctactgactgctgcatcgatcgccgcgtgagctctgctttttgacgtgggcgtaggtacatgtgttttttgaagagttatatgaagggaattgatagacggaaggagggaggaagacggggaagaaggtgcttgcagggataccaggagagcctgttagaatccataatcagcgctaatcaagagaaactggtcaaaccaacggatttctaaacttatagacatacatgacgatagttcagatgatgcatcagtactgttttccattcgtcttcgactgaaattgatgaaacgatcacaatccgtcagtctgatacttcgtaggtctccaactaggaaaacacaactcataacgaagaggacaagctagctgtaaactatactcaccagaagaagttgagagccattcttgagcttgttggatcaaatctaatatttgggtcgtgtcaacatcatcacagagggctaggccgaagcgatcgcctgagaagtcctctccctatattcatgtagaataataaggaagcaagcgtcagtgttaccggtaacttatcatatgcgatctccagataacccctctaaatcatgaacgcgcgcacaatcctctacgcgcgagtagacatcgaaagcttggttctcgaataaatcgggaggaactcacgtcatacagatttgattttcgaaattcttccaaggtcaattctatcgatttgcaaacacccatcaggtaccctcttaagaccaaccctctcaactgaactgggcatctgttttcgatcggacgcgtctctacttctgatgttgatgattcgaactcctcgccatcatagataggatcgcgctccaagacttttgacagcaagttttcgagatcgagggccttcaaatttgttgggtgaaggggaagaatggtatatacggtttgggcgagtgtagatccttgatggtaagccatctgttgtgaaccgcggtcgtatcatgtcaattcgactaaacgcggaaagttgaatctatggcaggaagaatagatgctctaagggtgtcacagacctcacatgctaggactcgctctaagatccaggctatctcctcgggcagcagcggggcgaatggatcgtagtcttccctagctgtctcttcaggaaactcgacgccagtgtccattcgaggatccataacttttcagttcgaaggaagaaaaggtggaaaccgagtcttaagcaatgagacaaatagtgccgaagatcaatcatcaaaaacagagacatactctctatagcattcatcgcatcctgccgattgccaatgttgacaggtaatttcgggcatgcccaacaaggttctgtaagtcataggagaatccacaaccgcacgatgacaagtccacaaggaacgaaccataagagtgaggtttggcagcttgacaagctgatcgatctcaagctccgacgttccatcttggatgagatcgatagcagagacgaatgttgagggcatgtatgttgatggctgatggctgatgccttttgtatggtctacagaagaaacaggtaagaggtagaggatgaagtggtaaggctgtgtacttgacaatcacgtgtttacctcatgtggcaatatccttcatactaccttcaaacgaaacccggccgaagcgttttaccatcgttcaccataagtgaggagtccccggtatgtacgcttgttctcgtcaccttcagagaactacctcctcggtcacctcttgctcctcagctccgaaccggttactcggctcgaaaaactctctttctgcagaactctggagaagcaacacgtactcaagatcacctggaggatacagcgttagatcagctagttccaaaaatgggtctggtggctttggctctttcaacaatcggggaggcaacaacggtggtaatacgagaggaggaactgaaggaggtttcggtatgcctggtagacctagcccagatgcctggtcatccttagtatctacaaacaagaagcctgcgttctcagcattcaacagtgtcgcttcttggtcaaacgctaattctggtgctgaagacaaagacagaaaggttggaggaaacagaggatcaggtatgaagggtaaacgacaaggatctttcagcgcccctcctgccgcatcggatttgccgccgaagccttcacccacgccctcccactcaaaccagccctcaaatcaaacccagaatgttccacgcagtggttcctcctcccctagaccacagtctgtaccttcgactgatcgaagcagcaccggaaaaggcaaaggcagcaacaacaatcagagccagaatcaaactcagaaacaaaaccgaccttcgtcttctcagcctaaaccaagacctggtcttcaaaagaaaacaccctctgactccaataagacgaacagtaattcacacagaaaacagcgcgtccctcgaggcgatgtatacctcccttactcgatatcagtagcaaacctctccaagttggttggatgttcgctccgtacgtacaaacatctgtttgaatgattgtgttggagaaccacgtgaaccaaacactgacatcgtcgagattcttaccaactgatttaaattcaaaggtcggttgcagtatgtcataaaggacgcaggcttgcctcatgcggatcctactcatcgtatgtttcccgcttctcgattcgtccttattgtttcaaatctcacgtgtgccttcttgttattggttctttcctgttttcttccttttcctctccgatccgcgctttctatgatgatgttcatagtgatctcggccgatgacgcatcgctcgtcgtttacgagttgggattcaatccggtagttgacgcggaaaagtcgttcgatatttatccagagtatgtttatttcgtgttatgtatcaagtttctctccaatgcttgagagaacaagaagctgacggggttcgtgtacgctcttgattattttataggcctgcgccggaagatccaagttcgttgccattacgacccccgatgtacgtacattcctcaaatcatcactttttcagagacctattccatgaggctaatgtgtgccatggttttatagtgtcactatcatggtttgttcgccgtcttttcactcacttggttcaacccaagaaacgtaaggcgtttcatgttctaaagcgcttccttctcttcttccatagggtcatgtcgatcacggaaaaacaactctacttgatacccttcgaaaagcggctgttgccaaaggcgaagctggaggaatcactcaacatatcggagccttttctgtccctattgcctcttccacccccggtgaggccccccggacgatttgcttccttgacactccaggtcacgctgcgttcaaagcaatgcgcgctagaggagcaggcgtaacggatatcgtcgtgcttgtggtagcggccgatgatggtgtcatgcctcagacgagagaggtcattcagcttgtaaagaactcgccaaacgttcagctcgtggtagctatcaacaaggtcgataagcatggtgccaatattgttcgtactaccttccctcaaccctctataagactcgagaattgacgctattttattctaattatgtatcgaaccatgtccacaggaaaggatcaagaacgagctgtcggcaaacaacgtatatttagaagattttggcggtgacgttccagctgttgaagtgtccgggatgacaggtcaagggttggattatctgatggagaccgtatcaacgatcgctgaggtggcagagttacgagcagaggtagatgcccgagcggagggtgtcatccttgaatctcaagttgacagaggaagagggttcgtcaatctatatcttccttttatatattctctgcttcgagagaatcttcttcagagtcacttactcgatcacccatgtcctcccttccaaatttcataccacaaattgatcgacagaactgttgccactgtccttattactcgaggaacgctcaaagcaggttccatcttagtcgccggtcagacgtggtgtaaagtccgtcaacctcaggatgacaagggcaagccgatcaagaaagctacacccggtacacctctatcatgttccggttggaaggatcttccgtctgccggggatgaagtcttggaagccagtggtgaggaagctgcgaagaaggcggtggcaaatcgaatcagagaaatccagcttcaggcccaaattcgagatatcgacgtgatcaacgatcagaggagaaaagcatcagaggaacatatggttgaatctcagcgaaagaaggatcttaaggcagctagacgagtagctttcatgaccggtgagaagatgccgacacctgaatggatggtcaaggatgaaggaaaggaagacgagatcaagggcccgaaggagcttaggttagtcgtcaaaggagatgtcagtgggacggtcgaggcagtggtcagcacattggagagcatcggaaacgcagaggcgaaggtgagaattatctcatctggtgtgggggacgtgactcctggagatgtcagtatggcacaaacggttggaggtaagtctgttgctttttactctttacttctcgttcttcatcttgagatttctatccgtctcatgattctgattatgttggtcttttgttttaatcagctacgatcgtcggcttctcggtcaaatgtgacagacagaccgccaatcaagctgcggtgtcgtctgttccagtctatctagagggtgtgatttatcgactagtcgaagaagtcgtctctcgatgttccgacttgttgacaccaatcatcgaagtcaaagttttaggcgaggcattatgtcagcaaatctttgaaatcacgctgcccaataggacggtcagcaaaatcgcgggttgtagggtaaataatggtctcgtgtcaaagggtgaaaagatgcgggtgttgaggaagggtgaggaggtgtttgttggttcgtccatgtgtttctactcagctgctgcaatcgcttttgtttcatcgatttgaatcgattgtaggagtactaatgatatgtctcttcttatctctgtgtgtttctatcaggtcctatactcacactcaagcaggttaagaaggacgtgaccgagattcggaagggatctgagtgcggaattcaattggtgggcttccaggatctagaagaaggcgatgtgcttcaagtcagtctacttcccctcctcatctctatgctgggtacggccgatatctgacgagattacgttttttcatctcttcattcctgcagagtgtgcaaattttggaaaagaagcgttctctatagaaacccgtttttggcttctcatacatgcgagcatcccccgtcacaagagagaaacccggtagaatgagaagaacaagggaaaggctgagttgagaccaaaccgttggagacgcgtgttaacgcgtgtctttgacgcgtcatgttcagtgaacatttctacctttccatttgcggtcatctttcctcttttttcttcttcaacttctacttctccttcttcttcttcgttttccttcatcatctcttcataggacgcctggtgcgccttgtaaatcaacttcaaccatgtttaacccttcctcccctaccgtatcccactctaccttccagcgatccctccccccttcttctccctctctttccttcaaccaccagtcgaatgctggtgatgtgctacctacattcatcaaaccctctgctcgcccttccgtcaaacgcgccggcctcgctacacccgctccttcttcatcttcgcctataggcaaatctaagagttcatctatccgcattcttggttccacaaagacggtgtcaacagcagaaaagaaacgaaagttgactacaaccggcaaaggagacggaatcagaagattgaaggtcaaagtgacggatggatatgtctcacccgctacatcttcgcctgttcagaaaagatccgaaacattcttgaaaggtcggagagttttggacagggaagacgaagaagagaaggaggatgaggatggtgacaagacagaggatcctttgtccgagattgatctagggtcgcgaccgttctcctcctccgtctctccagccccagtctcacctgtacctatctcccgtagcgcatcaagcctggtttctcctagttctttctttgcaggatccggaaataaccccctaaagagtcggccgtcaacccgattgacgaccgaacgaactctccaggtctttccaaaagaatttcttcaatgttcactaccagttctacatagttccgactctggatcactatcgtctgtgacgcaattgatcctctttggacggacgcaccagccgtccaatccactcaataaacctaccctactctctccttcatcctcgactcgtttggacttttcatcgtttacttcttcgtctaccccggaacgttacgtgttttcgctccctcgaggatctcctcatgcctctaggcaacacgttctcctttcccggtcctctcaatacccacacctgatcactcttcggatactcagtcggaatggcgcgcgtatcaacggaaagcgtgtgcttcagggaaatattgttgtttgtgatctcgagaaacaaggagaagtccgggtgagcgaaccggagggtaaggaaagaatcttgaggaaaggaaagggtggaagacaagactgtttgaggattggttattggggcggagaagtcagagttgagattcagtctgtgaacaagcaagttcaaacagacgaagaagaagctctttcttctgagatagactctgagtctgaggcggaatcttcggcgctgtcttctacttcgtctgacgaagctgaatctgaagccgaggctgagtgcgtgagaacccctgtccgaactcgactacctacccggacaccctccccagtgttctcgcccagtccttcacctcaaaaaccgagtttacctatcccagctcgacctctcgagccatcgcctgtacctgccgaggttgatcttgcctctctcctctcgtcagctttggtattctcgagacagacatcattaactctgaaggatctgacaaaggcggtgttggacggaaacccggcacttgtacagttgggttcggaacagagatgggaaagctggctggagagcgagttagagagtgatggaatgtggggaagaatcgtcagagttggaaaggttcgattcattctttcttcctcttgttctgccgacattcttcgtatcctgcaagttctgatggctcgatcgttttgaacatttcttcggtttgtttccttctttcttctctgcttctgcgtctcatgaatctaggatgcatccggtcatcctcttctagatcaattcttctatgatcccgccaaagacgcagacaagacccgagcagcagagctcggcagtcttatgcgacccctccgaggaagtaagtcgctattctcttttcctctccctctttcttctcttcgttggatattctcttctgacttgaagctcttctgtctttcttctatttctcctcaacttattctcagctcaacggcaaggaaaaacatactttttcaaaagaccatccactccgggaaagaaacgtagatgacagtagaagaacgcaatgtttttctttctctcttttccttgccattttttccctattatctttcctcgtatccgttctttccttgttcgtgtattcgagcctttccataatttcttccttctccttcctgagctaggcgagaaggcaaaagaagaagggcaagaggtatattggattgaccctgcgggtcaagtcttttgctctctctctgggttgtaggcgcttaccggtctaagcctgccattcgtcccatccgtctctccgcccttccagttctcagactgaagaacagaaagtgaacaaaatcaggaaccggttctgtctctttgcatttacctttctcttttccttacatatatatttagttagttagttagttagttggttagttgagttacagtcgtatcagatgcgcattttgttccattctcttgcttccatagtccctttgtcgttgtctttgtgttttagtatcatcatcgtcaattccttttatgccgatttcctattgacttgatagtaaatcggtataaaagaggaataagagaatgcacatatgttccacaatgggggatgatcacaatggataaacattcttctccgacaaatacaatttcaattttatagtgtacaatgtacaaacaaggactttacctagaaacggaatatgtcaccgaaaggctcacttcaagaactagagacgaatgacaaaaaattgtcggtttgagtgaatcaccgaaggataaaagggctcaagaggcaaccagaacggaaccagaacacacctgtacacgttcttcttccgagacatcactcaatctgaattctgaatcctcgttgacggagatcaacccaatctcctctccttgcccttggttcactctcgacctcgcttcggataggaagaacgtccaaaaaccgggcaagttcggattcgtagccgccgtgcttgatgagagacatgtggaccggagtgaacgaatgaatctgtgaagaaggaaaagataagatatcgcgcaggttaggttcgagccaagagaggtagagagaacggggagacgaacccattgaatcggggggattcttcgccctagaatccaaccgacatcaggagaagaaaccactcgaacattacgtcaacacgcgtccgttctctcctcgcgattcctttcctggactctttgtagcaacatgaacaagaaaagacaaacctctagggattcttttctgagtttcaacaaacaatccaacgcgcgttcgttggatcctgcttgaacgagtctgaacatatccttctgtagacgctccaatgctgttgtcctcacggtccaaagattagaagacgaaggtgaacaaagcttgattggatctgatggggagtagagacagaaagatgaataaaaggaacataccaaaaacagtattatctccatcacgcttgatcagcttatcaaattcgctgatgggatcctcccggtcttcttcccttccatcctcttcatccatgtcttcatcctcgtcctcatcctgggtgatggaaccatcgcttgcttcatctcccactgccgttgtgggaatcttgatagttctatcgggcgagagatcaggcccggctgtcgacccgcgctgtttcttgatagacacctcggaagaaccaaccggacgacgtctccctgagagtcgctcgagcgggagaaacggagggatgggatccagagtggattgtgcaaacgtttcgcctgcctttgcgttggccatcgacgaagaagcgtttgctcttgcggctgctctgttcttaatcaaaacatctaacccttctcccaaactatacgtgaaataagattcatcaaattaaacatcagtctgaatttttttcgaatacaaagagaaagagatgatgtcgcgcgaaggataagatggagaaagataggggaaacatactctatagattcttcgtcttcttcatctgggtttcttctctttacacgaacgactgttcaaccatagaaggaaattctgtcaaactggtgatcctctgacatggttggaagacaggagaacaagacagagaaagagaaggactgtcatacctttatggacgtcaaacacgtcgacagcagtctggacggtctttgccgctgcttgaaccagctgtctcggagttgacagatgactcgttaggcttggatgggaagcgcatatcggttgatcgggggaggcagtgaattcatgatacatcgcttcttttactcgatgtagtcctgggttgtagactttagaaggatggtaccatggctggctctctctgatgttgttttcaggacgttttgtgccaaagaaaacgaaccaagacaacaagaaaggggcgttttcagatatgcagtccaccaggaaaaagggggggggggggagaaaga

SEQ ID NO: 1519 - DNA, 85556 bp, Xanthophyllomyces dendrorhous
  misc_feature (5171)..(5180): n is a, c, g, or t
ggggggggggggagaaagaaacgcatggcaagaactgacgactctgtctttgtttctagaaagtctaaatccaacgcgttgacaagatccaacatcgcgttgttctgctcatccgtgggcagatacgggtgttcctttacgatatttccgtctgtgtcctttagatgcagcagagagtcaaaccagtacctccgataatcatccgcgaacgggacttgaacgagttgtaagccgtgctgaccgtcctggtagaccggtttgcctaccatcatcctgggcgcagcgttttcctggtacgtgtacctgaacagagcgtagacttcaccctttggatacgttctcatcgctttcaccaagctggaaatttcaatttgtgattttgttgatttcggattcgcccagacttggtatacttcgcccatttctagttctcgttcgaactaaagcggaaaggatgaggagaagcaggatgaaaagggagaggaagggagaaggaagcaggatgaaaagggagaggaagggagaaggaagcaggaagaagacatcctgttcaggacactcacttcaggactcggcaaaaacagaaaaagtggaacacaccttatgagcgggcataaaccggtaaagccagagcgccttcctagtctcgaaccttcctatgtctgaatcctcgatcgagattggtaaccaggtgtttccgaatttgtgcgatctagtcaaatcctcaaccgccctgtcgaccttgacggaatctttctcggtctcggtgccagcctcggtgtcagtttcagtttctctggggagttcgacgatgtattttttgataggtttgagcgggttggagatcacatcatacaggctagccgttatctggaatgatccgtcgtatgttgaggaagaagagccggattgagaaaccgatcggactgcctgggaggatgatccggcggggaaagtagaggtttgagattgttcgatcttgacggtgggattctgttcagggtcatcatggtgtgagtcctgagtgactatttggcttccgcccaatctcactcccgctccgggtctctgtcggaccgctatctttttcgaccctgggggcttgacgagagcagtcttttttccaattacgacgttaaactcgagatgactggttacggcctcatggttgacgtccatatccggatcaccgataatgagtgagatgctgttcatcatcggcttgactgtcttggtgcttggcgcgcgggcatcgaggacacttcgatcgagggacgttcggatgatacgttcgggattttgtgcaatgagcccagacaatatttgctcgttggtaatcttgaatttaaaagagagaacccccggtcgaaaggtcagctggcttagctctctttttcttcgcagagagcctgggagtacacacaaacatcttggtcttctcaaacgaactcggtccagcgataaattcccattctgggtcatctgttccatagactctatatagaaggatgagatgagactgaggcgagggtttgtaattctaaagaagagtttgttggaaagattaatgttgggaacgcacgaaaagttcacagtcgcgtttatcttggagagacaattagcaatatggtcaaccagatcgtccgccagagcgccttgagaagctgggtggcggacagggaaaagacaaaggcgaaaagttaggatggttcgaggggaacaagaaaaaggaggaattgacggagaatttaccgtctgtcaaggccaaaaattcgtatgaccaggttgatctgttcctagcagccgtcctgtctaactcgctcaacgccagggtgagtccgagaaggactagagtggagaggaagaggagaaagagagcgcgcacatcagaacaagaatctgaaggagtgcaggaagagaagaaacttgccatccccatcattcgtgccgtttccaagcttgagggatttgaccttgtcaaccatccatttcgcggcggtggccggttggaagagaacgtctacaccttcatatccttgagtttgtgggttgttggttcctgagtgatggagagtgggtaggtgtgtgggtgcgcggatgtccaacgcatacaacgacaacgaccttctgtcagtcagaataagctggtcgatggcaaggcgagaccaaacgagagcattactcacggtcacctgtagcaacgaccatgacgtgttcggtctttcgttctctcataatctatctcgtttgggtgcatacacacacatatacatgagatggaaatccgatatatcagtttctgggacatccaatctataaatcccatgtatatgcgcatatatatatatgtgtgtgtgtgtgtgtgtgtgtgtgcgtgcgtatggcttgcttgagtgagccaatcttacttaccacagacacgatctttctcataacaacctctctggcgagctcaaacttggaaacgacggctgagtgcagatgcggattcgaacgtttttccgggagcgactgttgtgggtcttggacgagtgcacccatcggctgagagcaatcgatgacaaacacatgggtggtgtatcctcctctgtctgccatgagaggaacggggtgaaagagtgaacggagtattgactgggcagagtgtggatgtgtgtgtatgaaggatcggattggatgattgaggctgaatggttaccgagggaccgcgaccgatggtcacaggcacgatcaggggcacggtcaaaaggaacggtcaaaaggcacaggcacaggcacaggcatccaaaccttgatgcctaatcaaggcgcattctgcagccgtacctgatcgacagagcgaccgaaagaaggaacgagtaaaataaacaacgaggcgctttcttggctactgtagtagagtttgctcgctgagcggccagacctcacggtgagaccggcgggcatgcgcagcagacaggcacactgtttttacactctccgtcctgtttagagttgccggcgagaacaagcggacaagcagacaagtaccatcactttattattccagctaacgaccgacgaagcgatcggtctgttgacgtcggagtgataccgacaagcacaacaacactcaattaatcaatcacttacttcatttaggtttgagaaaaaaccggagaggaagaagaagcagaagcagaaacagaagtagaagtagaagaagcagcaagagaagaaaagaggaaagaagacaacatcatcctcgataccttcgtgatagccttgttccttctatacaacctgctcggtacagcctccgttccttccagtctctctgttctgtgtccttctaaaataaagccatcctaggacacccatcaatcgacggaaagacaatcggcagacgactcatacataccgcacacacgtccagtaggtcttctcttttcttgtctatgcacttgcttttatctttctttccttctttctttctctctctgttcttccctctgttcctcttcactctttttagagcagctcagagcagccaaacgagcagtcaacatcgctcagacgatctcgtctgggccacttctacgtcttgctcaacactttgatgtcactcgctgcacagagctcaccgacggctcgacatgcatacaccttgcccgaactttgttcttatgcttgcacttgcacttgcacacatacacgcacattcacaacacatatcacacacccactctacttgacatgagctatgtgctgaagactgtccatccttgttcttcctagattcacaaccgcaatcgtccatctcgtttcccctccaatatggcgccctcatcattcaaacagccacggatctccgtcagcgaatctttccttcctggcccagggttttcatcgcggagaaactcctcgttcagccatcatctccctggatccaagcgaaacagacagcgattctgtcttggcttgttcgctctcggcttgaccgtcatgcttctcacctactcgaactcgcctttttctagctcattacaatcaagtagtgtgttccaaagagaaggccgaacgggcgtgtcggctcctgcctctactccagcccctgccactctcccagtacaaaccaaggacaagcagaagggcatcctcgccggctggagtctgaacggtaaagaaaaggcacaagaggttgagggcgagtacgatcttcattcaattgccgaaccggaagacactgaggagactgtcgtggctacctatgtgcctgttcaagaagagcaaagtgagctttcgttctcttttttattctttttttttttctcttcattcctccagttctcttttgccctttctgttttctcactcgagcgtctttttttttggcttcttccttatcctccttgaacagaacccaaaccaatcctggcgcacatgaccccggatggaaagattgaacagatccaaacgttactatactttctcctcgacggaggtaccctaccctctacagacaagctcgacttagataaacccattacattagagactctctcctccttgggcatcggcggctcgacgggaaccgtacaggacgaaagctggaaggcgatgctcgcaaagagatatcctcttgttgtcttttcaaaggcaagtcccgttgctcctctctccctatctctctgttctcgcttctgtcatgcccatacgctccctgggcttatcttttatcaacttttctactcttttttcccttccttcttcagtcatactgcccgtactcaagaaaggcaaagacgattctgaataacatgttcctcaccccggaaccgctagtgatcgaggctgatctgcgccgttcgtgtctttttctcgttcttttgctctttccctctaccctccaatgcgcttttctgatatgtttttcattcctttttttctctttcctttctgaactacagccgacggggcagccttgaagacattactcggtcatctcacgggtcggaacacgttccctaacgtgcttatctcgttcgaatctattggcggtggagacgacgttgaaattctctactctgaaggtgggctcatcaaaatgttgcgcaaggcaggcgtcagcgttcagaaagcgtagaccgctcttctatcgtctttgctctttctctttcttcctctacttnnnnnnnnnntcgatcttgcttggttctattttcttttttttcttcttgtactcttttcggggcttttcttctgttttttttttcctttaaccttcatctatctaccggcgcgtgaacgttgtcagtcagttgactctacctacactagttgtatttgtatttgaatgacattccgaaaagtgtcttcctctttgcgtagcatgaacaatagctcagtgacgaaagaatggcagctggtgaatgggtcagatggaagcgaggtgtttgctgagatgtaacatggatagaccgtcggatgaggagaactcggtcgggtataaagcaaaggggatatcgttgtatgccggcttaaaaaagagattacacacgcgacgattgtttcgtttccacgctcattctaacaacctacggccatcctctctccttccctctttctttattcctctcttcgtccgtgtttctttggatcaagaggaccaggacgttggatcctcgatcgacactctcttctttgaactcatatcttcatgcccatgcctcatccgtcggctctgcctctacatatactccggctgatcgcactacatcatctcgcgttcgttttcaccttcctccttcgttttctttttcccttcctttcctttcctctcgcgaaccctttccttgaagactgattttctctgttcgcttctctgatgtcgctgcttcttggacttcccgatctgttcataagtcaacatggattctccgcatcccatgctcaagcatccttagcactgacagatgtcctcgccaggtttctttcccttctatcgagtgaatctggctcgtttgccgaatcggcaggaaggacccaagtcagtcttcaagatggaatagcttgtgttgaatcattagggatctcggtgggtgatttggaggccgtctggagaggagatgatcgatcgagggtggagagtgcgataggtctgaaacgttcgtctttgctttcttcctcttctttcttccttcttgctctccttctcgcttgcctatgttgctttgtctgacccttcgttttacacatatctcatctatttctccgtattgtttcatctcgaaaagattacctgaacgaaggacttgacctagacacgtcggatcatcagcattatatctatactgacgtcccgcccgaactagaaacactgtctccatccggacgaaaacggtcggcgtctgacgcgttcttggtcgatagtctgtctgatcaatccgaagcagagtcggatgagcaggacgaagacgaggatgaggagaagataaaagaagggcagaacgtgtcggtcaagcaggaggaaaagaaggatgtagagatggatggaggatctggaagttcagacgaagaagacgtgtctactcctttcggtggtcagcttagtgaaggtcagaaacccaagatctttacttcggaagaaccttctttcgctgaaggaatcaaggacgaaggcgagatagtggatgagagggaggaatggaaggcagagacattgagggaggttgagttgggttgggttcaatcgtggaaaaaagaagagaacgatggtccgtacggcagactgtcaacctttcttccgcctctcccttcggaagaggcgtacgacccaatcccactctcgacgcctggaccgctgtctggtttggccatggagaatgataatgaggacgggaacgggtcgttgacaccttcattagaaccggtccttcttgaacctctccatacatctctcgtcccttcgttcctacatccttcagcattctcttcctcttcatcgacaaccgtactgccaactctgtcgaacgacccaccagctccccttaccacttcgtccgctcctaccttcaaggcgctcaaggcagcacatgcgtcccttccgccacctcagaccgtgtcgtatctatcccgaaacccaaataaacctcgagttcgagcggcctacctgttgtcgctcgtgtcgaacccaccagaaaattattcaccaacaagctcactcttcagttctgtccctgtgcccgcgcctagatcaaccgggatcgtccctacgttacctaccgacccgaacgtcagtcttccccccggagcgctcaaatcgaaaccgacggccggtcatctcccgacatcagcgttatacccatcgactccccatcgctacccggcgttactctcttcgttggctagacatatgggtaacccaggtttagtggcacgtacgacaaacatgccgtatccagccccgttgatcgacaaggggaacccaaagttctatggcttgccccgggttggaagagcgacgatcgtcaaaccggtagaagtagaggagggcgaagaaccggaggaaggagaagagatcaggttggaagcaaagagtctagatgtagagttgaaagctaccgttcgtccctgctcttccctttctctatctgtttcttacatgcgtcccctatccttgctctcaactgagtaactaacgcaaaatgattgtctacttctgttatactggatggggcatctttagtgggacgcgccgatcagagattggacggataccgaacttccgtttcaaaggaaacgaccgccgccgcctcctaagaaagaaaaggagaaggtcaaggagtaaaatggcacagagatcgatattgtatcatctcccccctattattttcaccaccggttcttttttccatttcttgtgctctatccctttgtttcgttcgtctctttctcttctttctgcatccttcatatcacccccaactcacttggcatccacgattccctctttcctcaatccctgataatcgcatacgcatctcataaaaaggaaaatccttgtacaactgtgtcctaacatatactctcatacgcaatacctgcccacctatctacactacctatttggctcgagagagcccttcgcgctttttaatgaactttgacgatcttcaacctgacctctactcctcccgttaaaataaaccaaagtagagcaagccatacaacagaatatgaaacgtgaccacagatcacggccgacccataggagaaagagaaagaagaagaagaagaaaagattctctatatagaagaaaccgcactacctgtatcgaactttcgaggatcacctgctgcttcccagcccgattctggtgagaatttcacagcgcatgcaaccgatagcccctttgatgttcatccatcgtccgtcatcgttttaaaaagagaagagacaagtagaagaaagattcaatgtcaattttatttctttccatagagcagttcgcatcttgaaaggaaattgaaaggaagaagcaaagaagaggggacatacagtaggcacataagtcacgttgtgccccaacgacgacagatagtctctggtctccatcgagaatctatcatagctcagaacaatgacagaaatagatatcaatatcaggattctagaacaaaactcaaacaacgaaatgaaaagataggaaagaagagaaaatagtcggaccctttaaacccaagagctggcatatcctgctcgatagccgtgacggccggatagacctgatcatgcaatctaggagctgtcaacgcttgtactgtaagatccaccaaacggttcgtataaataacatcttcagatcagatctgtcgatcgctctgcgtgatcgcggttgtgacaaataaagaagagaaaagactgacgagcagacattcctcgatcctgtacgatgagaaccctcaaaagatgttagtctggcatcgtttgaaaaagatccttttccagttcatcccactctctctgggacacaaaaggataggacagaaaatcttcgtgacgtacaacagcattcaagaccatctggatctgagccgagatgattctcgatccaccagcgcacgagctcgcaaacatgaatttccctgatggatcatcgatgatgagaggcgacatcgaagacaaaggtcttttgaagggaacgactggtgagaggagggggataagattggcgtaggattcaagtcaatcaaggctgaggttaaggttgaggttgaggttaggatttagtaaaaacaaaattggtgggacttactatagttcgcaggcgagggctgtcgatcatgatgaggacaaaggcagtgtcgtgtcaaaaatgaagctgaaggcgtaaagaaaacaaagagacatacgatgtaaccgaaagcgttcctccttcctttcacactaaagtcgtctaccccgtcattctacgcagagagatattaagcggcatgaaagatttaagtacattgagtggttaacggaaaacagaaagaaagaggtgaaagtggaagaaactgacaaggatgactccatattcaggtgtcatgatctgttgatcagatagaaccaacagcacgtctcgattagtcagtaagtcggctctgaagatcgcatactagaggtgttcgtactcttgatccccagtacctatatgccccatccaaccagaccgaaaagaagcaaccgaagtcaatattgttttccatcaagacagaaatcagccgagatgtaccggacaaatcaatgaggaatagaaggcctttacaaattaacagtcgtcgtcaccgagacggccaaaccatcttcgtcgccgacgactaacgcgctcgtccctttgtcgtccaacacctcccatccctctggatcatagtagtcgccttcatgagtggtatggtcattgatgagcgatctgacatgctgggcggtcgaaggtaggagaaaagctcgttgaagagtcgaggcgttggtgtatccgatgtctcccagaagtgttcgttctccataagcaaacttggtgatgaaaatatagacggatgatcgcatagtggaagaagtaaagaaaggaagaaatgagtaaatatcagatgatgcttgtgcttccttaacatgatgacgtaccttcatagattctacaagtcgatggatattgacatctgaaggatcagcctcccgaccaaaaggttcatatccgttcattgtgttcaacgtcgagagcaccaagctacctgacgaaggtgcttggggagcataaactgtatggtttctatatctcatagagagcgccggtcgaacatgggcttgataatctgggttgaagccgtcagattcattcgaatgaaaagaaataagcaggtgaaaaagaagttaagatagtgtcaactcgagaaaaagaacatgatgggagagagggagaacgaactggccatgtcatccaaggacaaaacaccgccattcttccttacgctcgccactatgtcttctgcaatctttccgttgtagaacgcgtctggcccgtggtctgctacggcctgtaacgctcgggcgtacgtcggcctggtggtgagtgagccgacagagaggagtgtgccgtttggggcgaacactttcgagagctcagagtcctatttgtttggcaagcgcgatcaggatgacagaacaaaagaacggtctcagatgggtgagacaacacgcatagaagatgaggaaacgaacggtgatcaagaaggactcgttgtagcctggctcttgacctggtacgagtttctcgtttgcatatagcagggattcgcctttgaagtttgtcggccctctagattcaggtcgagtaagattcattgcctacagttcatagcatgacaaaaaaacagatagtgagcacgagaggccttgaacacacctatagaaggaatggatgggatgacaataggataaagactgacgacaaagaggtcccgattgatctcaaacccgtcactggcaagcttgatagcaggctggaacagatctttccaaggcaactttccgtgttttttgtggattgcctctaatcctcttagttcacccggcacaaggaccgcgagaccaccaaccattgtggattttgttgggtcgtcttcgaatatcgttccgttaagagctccctttgggttgtcaagattagacaaaacaaattcatagttaagcgacatggatattttcaattacgcgagagataagagggaagggaaggagttagacaaacaggtgcagctcctctgaaatcaatggactcaaacgttccatctggtgatctaacgagagcgaatccacctgatccatacagagtttcgtagttgcgaagcattttaagcaaaaggagggcaagtctcaatcagctaccagctattggatttcctcactctacatatcctgagaggtgtaagaggaataatgtagaaggatgaaggcaggataactagtagaaagagacagagacagacctccaccaaaaccggaatggtaattagctattgtgcctacacatgctaccataccgaccatcgcatccgccgcactccctcctttctggaggaaacttgctccaatatctgttgagaaggttttaccattagtgaaattgaaacagagatatatgttagggtattttccatctggatggtcaagagacaactttgttcggagagagaagagggagacaaagtgagacaaaccggcacatagttgaacttcacacgaggccgcccctttcttcggagtcggtttggatgtaggttgtaagagcgaaagggtgggtaagagctgaaggatcagttgagggatgtacatgtattgctgcttatactattattgttctgcttcttctcttgttctcgatgatatagacttgatagtgggaaaagagagagagaggaagaggggggagaaggagtttgttggtgttcgtcagaccaacggagttggccgtcagataaaatccagcaggcgataaacataacaaataagattgtattcacatcctccgctatcatcaccttgccatacatcaacagtcccttgctttggcacaagaacattcaaactcatcagatttcgcatacacatacacgcaaatgaggccatcagaacgttggaatgcatcttgtcgtcacgttttcttgtgcaacacctttcattctggccttcgtttcctccagttcttcaccagagagcactcgcctgtctactctctgaggactattgcgaatcagatcaatagtctgcagaaagcctgttgaatatatctaagagataattacagaagctcagactcgcttagaatcgattgagggaggctgagttggggtgaaatattgagatgccgagaaggtatatctgacggacattcttcaaacaggatcttggctgacatgtcaatgagctacaggtgataagacatcatgacacacccattgtgagaggcggagagtctatgcgagaatgcaaccatatcgagcccgaaggcagcatagtactgagaggggtaaagtatgatttttcatatattaattatgtttgacagatcttgaattgtttctcgatcggtttgttcttttccagttcttttctctttgtacaaagagtgtttgcaagcgtggttgctttctagagaccgaggcgatttttatgtaccgagagagggaagagcacacagaaaacagagttcaggagaggaacgctgataggatttctgcgtgaatgacctggacgagaagtgctagatgaatgagaagaacagagaagacatattcagcatatcgggaaaggaaagaaggtcttttagaaacgacaggcaatccactcacgaatcacatagactctttcacctcatcttcatgtgccgcatcatcggcttcattcttgttgtccttgctctcctttctcgttttcttccttctctatctctccttcttctcccgcttccaccccttcctccccttcctcatcgatcataccacccagcttgtctaacaagcggtctagcatgccctccagtccatccgcgacttgatcagcctcatcgagcttcttggcgagttctccggctgcgttctctccttggtcttcttctgaatctagtgtggcggtctggttaaggagatctatcatgggttggagtagtgcgagatcttctggcgtcaggcttgacaagtcgatgttggctagagatgatgcggcaggaggattactgtcgacgcctttgctgttgctattgccgttgctgccgttgctactattattactgcggtcgttcatgtaggacattgagtctgctacaagagagaggtcgaacgcgtccgagtctgaggatctagaagacggcatgggtatcagtgtaaggtatgggtgtatgcttggacaatctttttaagacgttcgcagaaaacagagatgacgggacaagccaaagaagaagtgatcagacataaccctaactgcatcatggtcacgtgaaaagcaattgacgagcacccgcgatctcgaacgcgacgcgttcagcgcgtcaaatcggatgtaaccacgcaccggaacgtccggcccggagacgattgccgaccgctggcccaatgatcgcggcagataggcaagggtccctgcgacacggggcaaagacagatcactgggagcaagtcaacgggaggcgaatagaaggagagaagcgcagccaaatccgtgctcggttccctgataaatgaggtgtaaccgaaccggcgtaaccgtagccgctcgtggtttcagccggtgggatgtcccgggttcctgtttggggtgttttgtgtgtgtgcctgtccctgaaggtgtgtcggtgtatgctttgagcgctcactccgtcgtccttcctcttttttctcttcttcgttatacctccgtcgggttttatcaacggcagggattagacaacaacataaaccaaggtaaaagaaatcgcccttttttctctcttgtcagtcaacaaccatcatccatacgttcatactcacactcagttgtactcactcaccgtcgtcgatcgtgtgctgacgtgtgccctctggatcatctgaaatgtctgctactcccggtcatgtcaaccctcccaggacagccaggcctaccatcagcaacagacaccgatcaaactcatcttctaagaccaacaaggctctttcgacttcacctatcagaaagtttaccgcgttcctgaacgctcgaacgaactctgcttcttcctcatcttcttcagtttcttcatcctcgtcactggtcttctcttcaccttcggtacagaatccgtcttctaacttagcgacccgtcctagatccaactcgaccattcccacgaccggtgtccgtcgagagctcactccgtccaatgcgatgagtcttgattctactccttcgccttcatcctcttctccttcatcctcctcatcctcctctccgttcaatggctcctctcctcttccgacgacttcattttcatacacacctagctacaactttgtcaactcgttcttctccttcacctctcctaccagaccatctgtgactagaggtcggtccacctctttcggtggtagaccaaagacggccgagttgacgacagacgatccgtcgtcaagagaggtccctaaaaagagctggcgaagctcgcttgtgaatctctctccattctctggcgcgtacaaaggaaagggcagagagatcggcggtaacagcaattccaaccgaaacgtccacgatgggtccgtcgaagatgaaggcttctgggagggtaccggagctagacgctttggttcgtcctgtatctgtggggtttcagacagccacctagtaacgagtcaactgacggccagtcaaacaatactttctacttgagagcagacattctgagtcaactccctacagagattgcactatacatcctactcttcgttccggcagagactcaagtgatatgcagcagagtgagcaagaattgggctctcctcgcgtccgataagtgagtcccctattttgttcagtgtatgcgtgtacagtttttgttcaataaaaacagcgcatacatcgacgcgttcatctttatcgagcaatgtcaagactaatccacagtcttttcaatacaaattggtagcaatctctggagggatcggttccagtccaatcctagatggaagctccgcccgacattcctcacgacgatcgaaccgcctgtgtctgtgcctagcagcctagtcgcacaactatccctgtcgccgatagcgagtcgttcctccgtcatcaccacagccactattgcttctacgactaccgtctcccagcccatccgaccagctcttcagagccgaacaagctctttgtttggacgaccccaggaaagatccgggctcgctacgctcgattggaaatatctgtacagaaagcgacgctggttggagaacagatggggcagatcagagcttgggaaagagactgtccttgagggtcattcagactctgtgtatgcattgcactttgacggttccaagattgtcactggatccagagatcgatcgtacgttctctctgtgccttcttatacttgcgaatgctttgtatccatcttagctgacagaaagatcaacataacaataaatagtattaagatctggtcggtggttacaggagaatgtatccagacgatctcaaatgcccatgacgcctccgtgttgagtttggcatatgacgaagaaactggacttttggtcagcggagggagtgattgtaaggttaatatctgggatctcggaggttagtcttttttgtttgtcgattgagattcgattaatgaacttacttatctcattgtttgatacattgtaggacccggagttcctcagcgggaagtcgtccggaaagcgacgatcgaaggccactctcaaggggttctcgatgttgctctcagtacagactatattgtttcctggttcgttccatctcttcatgcgaggatgggctgtttaatttggctcgctctgccgctgactatcctctgcgcatctcatttcgacttctctcagctcgaaagatacaaagctcaacgtattctcccgaacagactacactcatcttcgatcactcgtcggtcattccggacctgtcaacgccatcgctattcaaggcaaccaagcggtttctgcctccggagatggaaagatttgtctatggaatctcgacgcgggcgagtgtatcagggtgtttagaggtcacgaaagaggactggcctgtgtggactttaagggcgatttcatcgtttcaggaagtaacgaccggacgtacgtcatatgtcttttctccaacctcttttgttgctcacgattgatatttgactgatctggtcggtgttcgttgcgatttcccaccgaataggatgaagatctggagagcgtcgacgggtgagatgttgaagacgttagtcggtcatgaagatctagtccgaacgctctcgttcgatccaaattccggaatcatcgtctctggcgggtatgtgaccggttttcttccaaatgagagaagagaagaatgaaccagagcgaaactcatcaccgactttggttgactctttctgtcctacgaacatataataggtatgataaaaagatcatcatttgggatatgcattccggccagataatccgttctcttgaagaagatcatactagtttggtgtttgatcttcagtttgatgccggccggatcgcgagttcttctcatgataaacgagtggtcatcactaatttcggagatgctgagacaaccaaattatttgtgtaaaaggtttctttgtgtttgagattcctaccatctttctctctttctttcttatcacccacttgtttcgtcttgtcttacctcttcttctttgtttaatttcttccattttctgttgtgtcaaccgctcgtaaaaaagaaagaaattgtatccctttattttcctggtgtgacgctggtctcatctgtgctatctatatccatgcgcgttgtaactctccaccttctccgtttcagcctcgaccacgagctttgagctcctttgttaaaaggaaaaagaaaaaaagacccctataaagaatctgggaggtacgagaggacgaaaaggtatcattttacatttttgtactctgtatttatgttcatatctttccaagcacgacatcccgttcatcaacttccatcttctcgtctcctccatcgggtccatcagaacgaccgttcgtgttggtactagcgccagtagagaacacgtcgatacccgaagtaagggagttgatcagtaggttaagcctagatgatgtcaggcttggctcctgtgcgagtggaggagggaacagtcaaagattatcaatttcaataccagcggagagaaggcaaataatcagattgagggcaaggagggagatataaatcggttaggatccattaaacgaagtaagagaggagggaaagagaaacatggggaacgaacctgacgaacagtgtcgagatcttgaccaaacccgacaaccatcttgcccatccaaaactctctgaacttctttctcttcaactcttcttctgtatcttcttttgccaagtcttttgtcgagttagaagcagagtttacctccgaagcagcagggggagcaggaaggaaagaaggtctagttgaggtattaaagaacgaagggattctagccggaggaggtgaaggggaacgggaggtcctgctgggtttaggtcggctcaaagcgggtgtggttgtgttggtggtagaggatgagttcgggttgagggcaagtttcggttgggtcgtgtttggtttttgggtcgagcttgcagacgaagcgcttgatgaagaggacgaggacgaggcggaggaagaagaggaagaggaagacgaggattcatcactactactgtcgtcttcatcggcttgaacctgagcgaccaccgcagctaaagggacagatccttctgcaccaaaagctctttcctttcctttcgctgctcttgctgccaacaaagccgggacgagaggagcctcttcatcggatgatgaatctgaaccggacgacgacgaggaagaactatcggatgccacccgacgatttctctttcgcgctcgcctctttgtctttgtgttaacgtcctttgggggcattctttacctttaagctggggtgtgtagagggttgtgtggatgtgagcaagtaagtaagtgagtgagtgaatgtcgtgcaacagaagcaacaaatagcaatttcaagttttcaagctccgtcattttttcttctttttttttgggagtcgctcgcttttttccttctctagatttcaacactcatcaccagatccgtacaacacacgatgtctgcttctcttactttgcccgttagcctaggagccttgccctccaactggtccgagtcgtccaagtcggccggaaagctttcctgtaagagaattgttcttgtttttggtcctttcagccgcagagattgatactcaacttgctctttctttattcataagcccccactaagcactcgatcttccctgccggaccctccttcatccgatcaaccgttcgaaccaagctccagcgatcttttgccgaggatgacgaggtccactcttcccacgccgcttccctcgcttccaagtctactgaggaggagctcggacccgagtttgatggactcggagaggagcaggagagccgtgatgttttggatctcgacgcgaaggaatggaagaagcaggatcactacgccgttcttggtttgggacacatgaggtacaaggccaacgatgaccacatccgagtcgctcgtaagtttcttgatttctctgcagaagtccatccttccgaggtttggtgactgaacaactcttaacgtgtcttttcttctccttcccctgacagaccgacgaaagatccttcgacaccaccccgacaagaaggccaactccggagacgccaacaacgattctttcttcaagtgcatccaaaagggttcgtcggaatttattgtttgacctacgtctctattaaagtttcgccaactaatctatttttccatctgactgtgtagcccacgagacccttaccaacttggaccgacgacgacagttcgattccatcgattgggagatcgaggactttatccccgaccccaagtctgtcaagcccgagaacttcagtcagtattctctcgttatcttctctttaaccctctccttgaaaacaagactgatacctccactcttcgggctacttttttccatcctctctatagtcaaggccttcggacctgtgttcgaccgagagggtcgattctccaagaagcagcccgttccttctttgggcaacatggagagctcaaagcaggaagtcgagggtttctacgatttctggtataactttgactcttggcgatcgttcgagtggcacgataaagaggtcaacgagggatccgacaggtttgttcctttctttcgttctttcgttcttctcgctcttctctatataacggcgcgcgtctgtcggtgagaggctttgactgaccggacctgctttcgtacactgttctcaatccagccgagacgacaagcgattcactgagaagaagaacaagtccgagcgagctcgaagaaagaaggatgacaacacccgactccgagagcttgtcgacaacgttctcgcagtcgatccccgaatcaagcgaatccgagctgaggagaaggccgctcgagacgcaaagaagaacaagggaaaggcccctgtcaagctcgaccccaaggctgttaaggaggccgaggacaagaagaaggctgaggaggccaaggctgctgaggaggctaagaagaactctgtcgaggacaaggtacgtcttgtgttttcttttcccctttctttctcttgttcttgattcgtccttctcgtattgttcatcgtcttacggcctccctttccttttcattatcctctaggccgctcgtgaagccgctaagaaggccaaggaggccgcccgaaagaacctcaagaagttcaagaaggccatccagacctctatcactaacgtcaactacttccagcccgccggtcaggctccttctgcctctgcaattgaggcttccttgaacgagcttgattcgctttgcgcttcgctcgagccggaagaggtcaagtctgtcaaggatgatgtggagaaggctggaaccgatgctggggccgttaaggctgctttggcaggttgggttgccaaggccgtcgccgctggaaagactgaggacgccaagtttgttcagttcaagtaggagaggctcctacttgaatcatcttcagaagaggagagagattagattctctcctcttttctcatatgtgtagaccaggtttattctctgccgcaacttcagctagaattttagatcaatgggctattttctaattgtacaggtcttccccttcctcttctttcgaataggggaaggacctcaaagtgaaagaaaaaaagaatatatatatatcaaaacgtcgcttcgaacctagttgtctcgtttgcgcagagatacatgcgcttgatacagctcccaaagaagagaacgtttgatatgaatgcctcgataaagattgataagtataataatgattgataggcaacgatagtaaggtgacaacgagcgatccaacggtcttttgatttaatgctttgtcggctttgcgccgtccacaaacatgtttctcgtcgcgctcggcaaagagacagagatcccatccatctctttcgtcacgatcacttgacaacctagacgagatctgtttttttttgttggtttgcaacagttgcaatcgaggagggacagatgtgcgtacgtgcgcgtcaacaggaaacggaccgagaaatcaggccaaacaggaagagaccgagtcagcatgctacactaaatttctccaaatatggccaaaaaaaaacagaagagaggagagaaagagaaaaaaacaacgtacgtatcggttaagccgaaagcgaggtctagcatgtcgttttcctcatccgacggctcttcaatcgcatcgtacatttctggttcgaggataacatgacatgtcgaacaagcaaccgatcgctcgcatgcacctatatatttgttccaatttagggtgagaaaacaaaatggtcagattgatgatagcttttgactacgctcacataccccacttcaacggaaagccttcgaggatcaaccagaacggatactgttttgagaaggaacaaaatgaacagacgaaccttctagatcgacatcgtgctcatgggctagcgtcaataggtcgtcgccttcgttcgccataacttccctgaggacctttcctttcgaatccttgtagatgaccttgactctatgtagaccatcaatgaacaacaatggatgcaaagtaagcgagcagatcttgttcaagcgatggcatccatgggtagtattaaaaaaaaacgagtagacgaacccctttccaggctcgggtggagtccaatcaccatgaaacgaaactggtttcgtcggtgatcaccgagtcacaaaagatttttcccagaaaatgtgaaaggaagaaagaggcaagaaggaataccggatgaacccagagattatggagtccaaccaaagagagaagttatcaagagatcagtactgttgacaaaatcgttcccttgagtgacaaacaacggcaagacactgactaggagagctagagaacgatcggccggcaagagaacagggaaacagagtggttgaccgtctgagatcggagaatgaggaaagagctgatgctgatgaaaccgaagcgaaggcagaagttgaagagcaagaggctcgggaaagagtgggcataagagcacgacgagtgaacgttcggatagacatagtgtttgccggttagatttctcgattacgtgtgtgggtggatggatggatgaagtcaactagagacggcttaattggacaagggagccacaagggatattcaaaaagaacagtatgagtacacgatctcgaacgcatagagttatggagatcatacgatcctacctgaaacgaaacgggacaaaacgagacgatggctgatgggtgattggcaaatggttggatgagagaaagaaacgaatgaagaaaaacggatgaagacgaaaaaaatcgcacagccaggccaatcagaacaccctctttcgatggaaatcctttctcttgcgctccctcatccatcacgtacactagcatcgataaacacaccatgagcatcaacgggctaggctaccagcgaccaggagctggaattgaggctcaggatatatcgagtgtgcggtcgggcgaagacgttgccggcgagtcggcaggaaagacactaagcgtcaaggtcgagttcgggtaagcacctttccttgctcttttcgcttcctttgctttctctcttcttcttttccttcttcctcctgttcttctgctaaggaaagagacatcttgaacaagatcatgatatgatactggcaatctagaggccgaaccaaaatgactgaagcagccgttcaaggctaggctggatagaactcaccttctgtagactacacaagctaaccaagaaaacctccttgttcatcttcatcaaccttgtgattcttcaaccttacaaaacaaatcagtggaggactcgacttgttgttttctaaacagcctcgacacaacctcagaattccggcaaccgcaccttcaacagcaacgatggctgaacgaccgaccgatatgaggttcttgatcgaatttcttgccaagaacgttctccaggagagagaagaattatttagagagggagagactgtgtatgtcttgtctttctcttcccggggaaggaaacgaacctattaccctgaaaatctaactgaacccgttatctgtgttggtctgggcgatctttctctctacttcttttgaactccttgtcttggaacggacgaccttgtcctctccctgtcacctctcacagccgacctggaattcttgtgttgatcaacgatagtacgtatttgacttgttaggatcgagagtcaatagatttgagaagatgcgcgatgttgttctgacttagtcgataacttgtcctttcgtacattgcttgtacagccgactgggagttggagcacgaactagagtatgtgctagaggatggggacgagtgtgtgtttatcagtactcttcatggaggttaaggctacaccgaacgatcatcttgcctctcatatgtcagggagagagagaaaaaaatagacagaataacatagaatcaaggacggttatatgatttacaacatgatattacaaactttaccccacaatacagaacgaaacggcatccttgttggtacaccgcaacagattataaactcagagcttggctggaacgatctttgtcaacagctttccctgatttccaccggtatagagcgtatgccacacttttggcacatcccggaatggagcctcgacaatggtagacgagtcctcggtagaaatctttccttcaatcaccgcctgggccagctttgcggagaactctttgtactttttcgcaaagtcaaacacaataaatcctgcaagaagggggtaagggaggaaggtcgatcaatttagagaagcacgcagaatatgaacggagaagaaaaggacagatatggaagaagaacgaacgaaccttggatggtgattctcattgaagtgacctcaaagtagttgttcaagttcatagtcgtcgggtcgttgtagcctacgtcgccaaggtcgagttgtgagagatgaatttactaagagcgccatgtgtatgtatttccgagataaagcgagataagatagatattacataccactgatggcgccgtaagcgatgatcttcgaatacctagccattcgcttgaacatcaagttcaggatttctcctccgacattatcgaaatacctatgttgttgatcaacaaggatgtcacgctatcagagcaggccagctaataccagagagaaaatgagaagtaaacgaacagatcgacgaaatcaggagtagcagcgataagatctttcctgaacgtaggcgacttgtagtccacacactcatccgctccaagctttttcacccaagcgcacttctcaggtccaccggcgataccaatcactcgtttacagccgacgatgttctttgcgatctgaacgacaaagaacaaggcacagagaggatcgatcggtgttcattcttgctgtacggataccaaagaagtggtggggaggaaaaaggcttacttgaatggcgacagatcctgtggcacctgctgctccagaaataacgacgacctgatctttgtgaatcttgccaacctcgaataacccaccccaagcggtcattcctgtgcgcataggagtcgtttcggataggtaagccgtgtattgatcgtcgatccttgacgagtagagcaagaggaaaagtcaggcttaccagtcattcccagacagcccaaagcaagctcaggcgccttgccaggtatctcactaccagtaggagagaagtatgaaagaggggtgaaaagaaaagtcaaacgtagcaaagcagatacaacctcagcatagtcttcggtagattcacatcagaagacactcgcgatatatatgtgatatgaagactcacggcacacggacgacctcggacgcaggaacaattgcatactcggaccaacctcctccccaggaggtcaccaacgtaccctccttgaagtcagacgatcgactcttgataacttttcccaaagaaccactgagaaaaccagacgtaatgccaggaagatgaaaacaaggaacacattcttctttagtacgattctgtctgtctatcctgtttgctaagaacaaaaaaaaagaagcaatgacaacgacaacagtatcagaatagaatacccacctggccatgacgtctcctttcctgacaacaggtccgtaagcgcgctcgactttcaacccggcctgcatccaagttcgctgagcgggatcgttcgagaagaaaagactctgtagcagtagttctccatctttgagctcgggtatgggcaggtctttctgaagagagaacgtatcctcctcgaccgcgcggcggggagggttactgacgatccacttgtcggaggtagagggaacggaaggcatatcttgaaagcaacagagaggagtaatatgaaaggcgatgtacagaggctagatacgttcaacagagatcgaacaagagtgaggaatgaaaggacccatcctgggaatccatcaagactaaatccttttaaaggcagaaaacgggatatgcttagtcggcctgaacgtttatcatttaccgattaccggttaaaagaaggccgataaatgtcacgtgagaaataagcaatgcaattcgccgagtaaccaggaatggtaagttgctttgtgactatcgtaacaacgttcgggagcttgctaaagatgtctccttattcagtccgagttgaacataagtattcacatgaagtgacactacagatgaaagagggactgccgagtttgttcattgattcattcatattatcgatacaagtgttgcaaataggaagactatgtaaatgatgaaactaggggttggttcgggaagccttatcttcatcagccttgttggtgagggcatcggcggatccagaggcggcagaggcggactggaaggagtacacgcaaagaacggtaagcgtctctgatgaggttgaagcacgagaaatagaaataaaacaaacctcgtcggaagatcccttctcggtcttcttgtaatcctctcccttggaagcaaagaaatctaatagacgcaatagaaaaaggagatggattagctgacatgcagcgagtgcgatttgaaacaggatgaacaggaagactaaccaggtcgctgctcctcttcagaggcaccctggggcttgtcgccaccaacggatccctttccaaggggctgggtatcagaaagctctgtattggcaaagagatgacgtttatagtagagaacaagtaagagaaagaagaaacaagtgaaagtcagtaagagtcttcttgtagaacacatgcaccatcctgatctttgatgagtagatggaaaatatgagggcttaaaaaaaaaaaagagagatggactcatgcgcccgaatactgactaggggagggaggtccaggctgagacattgtcgagagagaaatgtgtgttgtttttaaaaaggagttggaagtgagtttggagtggtggctagagagaaagagtgagagatgagatgaaggaaagaagaagagaaagaagaaagaaaagaaggatttcctttttcttttgaaccgtacagatggagaaatccgatagcctttctggggtagttctcattcttacgtcattcctctctttcgcggaggaccggatgagagccagctaggggtgacgttagatagcgatcgacagcatgaatcattcgaatgaacatcaatctagctagctggctaagtagtatttcatcccatcttggttgatgcagtcttaattgccagacatgttgctgttgccaaccgaaagaagcatcccggtgtccaagttccttctagcgcatagatcgtttcccccaccttgtaggcatcatcagatagagaagaaggcacagacagatggttacgagtccttattacgagaagtaacaaatgaaccatgctgcttagtcatcttgcaccatacgtagcaccgatatcgatggccgtaaccattcacagccatggttacgatcctaatccgtccgtctcgtctagagggatttttctttctgatcatcttctctgactctttggctttctcactctttcacacctcagctcagtcgatagtccaacgcacacaccacacatagagatgagggcatctctagcacatcgagcctcgcgctcttatctatcctttgctcgatctcaaactagcctgcggtcgaacttgatttctgctaccaccaccaccgctaccacccggttccttgtccaccctcgcgctcaactccaatcccggacattccttagcaagcttcttggaacagccgatgacgagcctccgatcccaaagaccacacctcttgcacctccgtaccagcctgctccggatccaaagatcattcttgagcaggataacttgtttcacccgctctcgacctcgccttttgaggatctaagaatgagggcagagagaatcaagatgatggccccttgcccagtctgtctcgatcacttcggagagagaaatctggtcacgttcgactcgcctcaggctggttggccaacacattgctcagaggaacactatcttgccgatgaggaacatggcaagtatgtagacaggctcagagaggcaaatgaggatgagcatgatctcagatccggaagatatctggccgagtttgagaacttgcccggttcgtctccttctcttcctccttctctcttctttctccttgactctcagcgtcgtcacctggacatttgattattctttattgacacaatgactgacatttgtccgcaaatcgacatcctgaaaccaacggtaatgtaggtttccagccgtacgaccaggtcgttaactacaccaactgggatacctttttctacacccgaacattcccctccatggacaatctccgtgtctatcgacacatgaccaaagttcttacctaccctatcaccattgcctccacgcttgatcagttcagtccttaccttaagaaaactggtcggctgactcaagaagggcgacggtcaatgatcggtaagaagccttcacgattgtctggtgtaatttgattatgtagctcacctgatgcctctatcttgtctttacaatacaaaacaaacgaacgcaattgattcaacgataatatacagcccttcgatcgactcttcaccctgagcagactcctaagcctgttcctgggctcaacaacgtcgtccgaatctttatccttggtgctcgatcggaatcgtctctgcctacggccaattgggaacagctctctcgaatgttccccaaggcggtgctgaaggtatactttgtcggtccccaagctgcgttgcccagtaactggactccaaagccgacgtttgagagcgagaacgacccgctctacgaagaggagatggagaatagacgaaaacacgaggaggagctagagagggagcgattgaagtcggaaggagctgatccctttggtttcaactcggctccgacaaccggacaggccgagacaaaggcagagcccaagaaggagagcccattatcgaactcgccagccggtgcgaccggttctgttcctttctcgacagttgatcccacctccccagccggacccgcctctgcccctactccgtccgccccagccaaccctcccgctgcgccctcaacttcttcggtgacaaagccaaaattcaggtcgctcgatcatctccgagcggactctcctgaccgtcaacaatacccgtacactgaaagtctggccgatcagtcgatcgcgcctatcccctctcaacttgaccgaaactctctctcctctaccgaagggtcctacggcccgacgttcttcgttccgcccactcccgccctcgttcacgtgaacggaccccgaacgaacattcccggaagagacgaatctgccaactatggtgtccccgcatggacgattccgatttcaccagagatcacagtgtcctcgatccaagcgccttacgaagcgatccacgatcagttcggtccttttgatccgtactcggatgtgttctttgcgttctcgcccggattcggtttcccgtccagtatgtcacccggtagactccaggttcacaaggacgccgaatggggagagacccttcctttgatattggagacgaagtgcccgttgtttgttactggattttcaccaaaagatgtggagagagatgtcaaatcgttggaaggattggaagacgtggacggccagttcgactggctgctcaaccctggtgaaaacttcttcgctagtgagagatgggaagtcgccgacttcgatccaagagtcatggtcaagaccaactggggaatctggggtatcaggtttgttccatcttttatctttcactcccttcgtttggttcattgcgtccctttactaatcatgcatgtcattttttggacggaatgataatccaacagaggaaagatggactctcttaccaaagtcgaggaggacaagtggggattggtccagaagcagactaggaagctctgagagtgatggagaattattcatgtcgtttcaaatttaattcgccttctcttttcgtccgatttcagtcgctgtttccttcgttctttgttctgatgtctcttctttgatcgtagctttttcgcattcgacatgagaaacagagaaattggctcgtatttctcttcaccaggaaccagaatgaagtcctgatgatagctaagtgggagatgacatgacatagaatacgaaaaagactttttttcgggactgagacttcttatacccgttggctcgaatcgaccatcttgagaaagacgcgcgattcaaaaggaatcaaaacacacaagacgaaggataagcattccgaacgctacgaaagggaaagaaagttatgatgtacttaccctaaccaaatccttggaatcgatgacctgtttcccaccccctgataacatctcgacctgccactgttcatccgtctgatagaccgtgcggacttctctgcccctaaactgaccggcgatcacacaggccaactgttgttccgtctctggttctacaggcgccaaacaatcgggaggaatgttcattccctcggaacctaactggacgagtaccgtcttatgtccggcttgagcttcttgaaggattccagtctctccgttgtactttcctcggaggtactctgcacccgtatgactctgaatgactcgaactataacgtccttcaaccccactaaccaatcaacagctcgacctgtgtgttcaacaaagagaattgtcggacggaaagaaggaacgatgtttatgagaaacggcatacagacagacgaaaactttagagaacgagatgtttgggaaaaccttacctgaagaagacattggcatcatgcctccatggtctctggcagcacccggcgtaggcgcagaaagaccaccaggggtatagtatgctccgggggtagtcgcgctgaacgctccaggagtgggtgcagctccaggagtaggcgcggcgtagcctgcacctggagtgtatccggatgctccaggtgtaggtgcagtgtatgctccaggagtaggtgctgccagagctgcaggagtaggtgctgccgttcctccccatgcagatgtcttcatgtaggtaacaaggagggagaaaagaagaaagacatcagtccgactgatacttctcagtagttgtgttccaaaaaagaagaacatacctcgtagccagtattcagatgagatccttttgtatcgtcgccccaagctgcataagcaggttcgttattcatagcagaagctcccgcccccgctggcgtagcgctcgtcgcgttccaagccgacatcccagctcctgccggtgtccgactggaagatgaagttccagcaccgaacggcgttcggctatctgcactccatgctggtgttcgagctcctgatcctccgtaagcgggagttcgaccatcatttgcagcgtaacctggggttcggttcccaactgcatacgcaggcgttcgtgcgcctgccaagtgaggtgtcgcagctccggcagaccaaacaccaccaggcgtagctcctgtaaatcaaatcagttcataaaaataaggaaatggacgagacggtcaaccaagtttgctcttttccgacacggggaagcagaagcagtgagacttaccaccataggcatttggcgttttgccgacgttgaaagccggagttcgtccaccactggaagcgtacggatttggtgtacggccagtgatgcctccagaatatggagtagaagaagaatacgggttgagaccatagcttgaaggaggggccatatctcttggtgcaggtcgagggccagagttggcaaattggccagagggcgcgatcagttgggatgtagcgcctgttttgggactgggaataagaatagccgccgtgccataagtacataggcgcaggaagataggaaagctacaaaattactcactcttttctcatcagagcagatttgtttatcgtcacagtcttgttggatgattgtagctcaaccctagccatctctccattgatgtctttgattaacccaactaaccccttattaatccccttaatgatgaccacagtcgtatccgtcaaacgatcccttcctcttgatactggaccgccagcattgacgggattcatcttgaggttggcgattgctgggttgagcgatgcaaagtcagtcttgaccgcagcctttttggaagcttcggagagcaatcgatcggatcgaagaacgaaaactccattgttctccaagatatcagagttgtgaacgaaaacgtagcttccccgatatatatgaaggatctgtccttttcgaggctgataggcgcattttcaaaagataacgaaattaacaattctgtttttgaaaagtaagaaaagaatatgatgaatgccttacgttatggtcaactcgttcttgaacagagtccccgactttgaggttcactccagttgcatcgctcgcatgagtaaacctcgagtctaatttcatgttaacctgcccaggcttgacaatctgagacgttccctcctgatcaatgacctggaaagcttctcgctccaacttgcagatgactccaacgtttctagaactgtttgagtttgacagcagcaaacccatagatagaagagtaagaacagatgcttgaagttgaataagactgatgagcttgagacatacgaaagctggactaaatcatgaagctcgtattgagctaccacagccgaaccgtttccaacttcggatgcctcacggatatctcgcgcgaatacaacaacctagagcatcagaggatgatacggacgataagtacttctgagcacacattttatatgacgaaaaagaagagaaaaaggatagataactgacctcttgttgggacaaatcagacaagaagatgacttggttggctgccaccgagatgattagaccagtctcattcatattctttccagagataaccttgatatgatctcccggcttgaagttctttctgactgttcgtccaggagccgtgataatcgttccatccagttctccgtggatcgctttaatagttactgtctcgccgataacactttccactaaacccaactgtccagcctgctgaccctcgaagatctcgacattgtctcctggctgtaaaccagagatggccgcctttcttgaagcttctgagatcatcgacagatcctgattcgagctgagtccaccgccaagagcgtcggttccggtgaacatctcgatctcatccaatgtaggtttcaccatttcggtctcgatcgcggtgatcttcatatccttctcgataaaaccgtttcggtaagtctcgccttggaagacaaacgcgccccctctcatggaaaccgctttagaggtatatatcttggaaacctcctcctgattgaaatacttggcctcgggtcgtttcgatccggacgcgactgttccaaatccccccttctttcgcttcttgtcggcagcggcagcatcatcggtcggggagaggtcgattctaggtataaatttgagtccaacttcgtctccattctccgtcacgtctagcacttgagcgagatcaccctggtactttccacgcttgattcggacccacgaacctggaagcgggtcgacccggatctgcttgatcttaagcaaaggagccatctcgtccagagggaccagattgatccctcgagagatgtatactccaacaagacctttgatggcagcttcgacgtgaccaggagatcgtgcttctacgtagataaggccggggagtgtatccctctggaaagcagagtaaatctccaatggtgtggaagaaaactcaaggtcgagtgccttctgcattaagctgagcacaatatctttttctcgacccgtctgtagagtaaaagcataatcagaatgatttagtcttgatatcttctgtatagcgcgtcaaagatgctaggagaagaagtgggcgtagaccgaccttgactctgagctgccatagatttggatcctccacactaggcattagcagcctctgaggggtgtgcgatgagcttcctttaaacctggcttgttgactcctgctgtgtcgctctttgaattcagcggcaattagctcggcgtctcggtcgtccatctccattcttcttcggtcgagcttctggtgctctctctcaactcgacgagcgtcgaatccatcttcgcctacgggtaaatcctgatcgatgaaaccctcgtctagaagttattgggggatgaaggtaagtcgaactatatgctgaacacgcgaagactttatttaaataacggaaggtaccagtacggtagacttactttctcgggtgtagtcgtcctcatcttcgtccacgtcttcgtcctcatcatcgaccacgacctcaagatccaggaacttgtttcgcttaaacttcttttttggctgaacgttcgagttttatgatcatagagcaagacaaagacggcatggacaatgaggtgaatgctttagcgagttctacacatgcatacgagaataatagattctacgcggatagaagcaaaaacgatatactacttacacgtcttcgacctccgttttgctcttcttcatcatcctcttcatcctcttcgtcgtcttcatcatcttcgtcatcatcttcgtcgtcgtcgtcttcatcttcctcatcctcttcttcgttgaccgctggccgggttgtctggttgggtgaaatccatgaaagtggaaacatgttgtttcagttaaaatcacccgaaggaaatgtattctcgttatctgctccagctaaattttcttcttcttctaatccgactcgattcgagagacaagagaagagttgaaaagaaaatgccaaaagacttaccgaaacctgttctgctgatggctcttcatcggactcatcctgtctgttcaattcgtctcgctcttggttaagtttgacatcgacttttaggtccggcttctcctcgtgcttcacgcccgagttgattggagaggacatgactgaacgagctgatccagatgatggtatgtttgatggaccggggctgaacgtacaagggagattcatccataaacggccaaggggcaggacgtacaacgtgatgatatttgattgatggaatttcaagtagttagggttctctaaggattcgtctagtatcaaacaattcagcaagcttcatcatatagtcttctcctccaacccaagacaaccagatcctccattatgaccaggttagtgcttggtactcgctggataggctgcttggaacgttctgttatgtatagttctagcttgttctgctcgatgtgttctatttgaggcccagtttttcatcagattcgcgtaccatcatgtcctccacacgttgtggacataaacgtaccatgctcctgacaaggcaatctttcgttctttttgtgtaatcgattcacccattagacacgccaaaaacagccattcgtgagtatccttttcacttgtgttttgttttcaatgctttgtgtgtttgtgtatgggattcatgtttgtcttgcccttattacagttcaccgttcttcacataccatgagaagtctatgtatgtcgtccctactttccgttcatcattttgtccggtcgcacccggataggagcacacacactaaacctgttgaatccgtgttcgttataaaaggcttccttatggaaccaagaaggttggtttcattgtttctgtctcttgtactacccattcgcgtaaccttatccacccttatcttgatgacataaatctagcaacgactaggtgccgagagtttcagaaagtttgatgcttgcatgctttgcaatagtaccgtccggaacccatgcgcatgctctgatggtcacatctactgtcgtgtaggtagcttcggtgtttcttcatatcgtgagaggttccgattgactgacctctggttactttccctctcttccgccgcttcaggaatgcatcttggagtctttgctatctcagaagaaactcattaaagcccaccaggacaaccttgaacgtagaagtaaggaggaagaggaagagaaagccaaggcgagagaagacgcaagggaacgtgttctcagggatttcgaacgcacgcagtctggattgggcgcaaaggtcggtggtagctcgacaaccgggacaccgtctgggaacgcgtccaaggttgagggagaggagcgaggacagaaaaggaagtttgagcttgatcaggcagatatcgatcgaatggctacagaggctgaggacgccgctttggccaagattgagaaggagcagttggaagctcgaaaagcgaaacttccggctttctggctgtatgtttccctcttttctgtcggtctaccgttcgatcaagttctgctctctgatttactgcctcttgaatatgacagaccgagtttggcaccggatgctggaattgagaagatcaaagcaatcaagatggaaacgatgtgccaagcctcggagcacccccatcctctaaggtaggttatcaggtgtgaatatagacatgcgtacgatgattgctaatgtcggtggcgggtgctattttccaatctacagcatcaaagggctgatccctgtcaagtttacgccgctccctacgtcgtcgagctcgactgccggttcctcaaacccaacagcgtcgatgtgtccttcgtgttcgaaggaactgacaaactcatctgtttccatcctcatcaaggtctgttggttgtcagaatacgagtttccattcttctcttcctggtttgtttagctgacctgtgtgtatatgccggcaatgtctccacagacttgcggacacgtctgttgcaaggcatgcgtggataaagttgtccgaccggggaagcagtgcgtgacatgtgactcgagagcaaaggagaaggatttggtcgagcttgtcagggatgggactgggtttgccgctgttggtaaagcagaagccatcaaggtttgttctggattttgcttttcttcactttacgatgagcatgttctgttgaaagcagtactgaatatcgttctgttttgtgtgtatgtgtacacgttctttctttttccttttctttttctttatggaatactgtagcaagaaactgctttccagtagaccagatatactcaagaagtgaaaaccgaagaaaagacagcagaagacaattgaaatctgggtttgcttctcaccgaaggaggagtgtttcggctttgagatctattccggacgacatgcggacaagcatgttggttgtacgatatttgtcaacagactgatccgcatatacgcatggtacattaggagaagcagagagagactcatagacacaaagaaacagaaactcgcgtataaagagtagaagcaaaccagtgcagatgatggcattcccacctaccaaggcatcagaaagtgatttttgttggggtgattatctgttgctttcaatactattcggataaacttcacacgccgggcggttccggtaagtattcttaaacgggaaggactttcaacggcgggacgtcaccaaccagcccggttcaaacaggtttgatctggttcgtgccggttcgatctggttcatccagacgtccgcgcagtcgatagatgatatcccaagccatgtttgggtgtcctagcaagcgtgcatctattgacttctcgcttacattctccatcttcctcttcctctcgttagagttcattctcttctcttctccgtctttgacactctttccatccatactttataacgactaaataggcttggtcaacggagaacatcaaatcgtaaaaaagcaagcctctcctcatccgaaggctgtcttgctctggcctatttctatctgtcgctagtccagcgttttagggttcgtacagcttgaactatccaaggttttttctcgtctaaaaaggaagaaaaaagccgaaactcatagagaaatagcgtcggcgatgagccatgtgtctgaatcgctcttgtgactgacttccttctcaaatcgcatctcttgatcctcctcttctccttcctgtcctctagcagcggccgacgactcgaacgccgaagcgtttcagccgaacaacatcgtacctttccctccatcttgtcccgactcatagcctctggcttctagtatgatggatatttccaagccttctattctctcagcagatccaagtgaagcctttcaagatcatcttctcggtatcctagctggtctagccaaatctattcccccaacctcacttcagccgatcgagttacctccttacagagccccagatgcgtcccttaagacagagacaatcttggcccagctgggcctaatcgcctccaggatgttcgacgcagaagccaaacaacaccactatgatcatactcctgcggctgtcctccctccactttccacgatgccaaacagatttacgctgaatcagccgatggacattgacgagcttccatccccccctcctctagacccgcctttggatgtaaaccttttgacgaggaaagatcttgtagcctctcagccgatgagtgcatcaaatagcttgtcgggagaatccatcctgacgtctggtcataatatcaattccggagcatacgagagtgggctggggccggtcgaggaacttcggctactacgagctcaggttcaggacattgctcgagtctgtaaggtatgttggccattctcgaatccaatctagcgcatgtcctgtcaaagcatacacaatgtttatcgtgctaatatatacccaacaaacttaatgtacggacaatcatatacgatgcgaacaggctgttgctgctggtgatttgactcagaaaatcgtcgtcccggtagaaggtgttgtcatgattgagttgaaggacatcatcaattctatggtctgtaatcttaacactccaccccgtacttcgtgtcagcctttaattctgaagatatatgttttggacatgtgcgcatgtacgtgtatcatcattcgtctcaggtcgacaacctcttcatgttctcgtcagaggtagagagggtcagtgtggaagtcggtactgaagggttagtgatttgtatacgatcctgctacgtcgattgggcaagcagagaaatttgtgcgcctttgaaatgagagaactggatgatatctcagaccatttttgatttcatcttccttacagaaaacttggagggtcagttcttttctatactcgcgtcgatcatgtgtaaagattgaagattaaaaactcgtggtatctcttgtatctgtgcgctaataggcaagctgtggtcgaaggcgtccaaggaacctggagaaacctcacatctgtcgttaatatgcttgctgctaatttgacgagtcaagtacgagctatcgccaaagttactaaggttcgttgacttgctacttacaacagactttgcgttgggagttatataggcccagctgatgttcactgtctatcgtcatcttcttttcaaatccgagtgtaggctgtagctgtgggagacttatcacagactatcgatgtcgacgcgagaggagagattttggaacttaaactgacagtcaacaacatgtacgttacatatacaccaattctctgtctatcaattcagcttcagctcttgggtcttcttgtttaaaatgggacgttcggtcgcctatatgtgtatatacagggtattgcaacttcggacacttgcagacgaggtgtcacgtgtatcgttggaggtcggatctcaaggcaaactaggtgcggatctgttctctgatttagatgtcggatcagtcacatggacactcgaaggaattaacagcgtatcatacttgggatccaaacaggcggacaggccgttgttgaaggcgtggaaggtgtctggaaggaattgactcagaatgtgaatatgtttcctctctcttgttccttttcatctattcttctctctagactcaccgagactcttgacaaatactgtatccaattgtttttctaaggtaaatcaaatgtgtgcgaacttgacagcgcaggttaggtctatcgcagcagttactactgccgttgctcgagtacgtgtcaaatacccgttttcaaagttggctttttgtttctgatgaaactaataggatttgtttctcgatcgctaaaatagggtgatcttacaaggacgatcgccatcgaagttgatggagagatggcgaccttgaaggatactgtaagtgaatctgttcgtctcctcaagagcatgcgcggtcaagtcgctcatcgcgtgaataaatttcttcggacattctctgtatgaccaggtcaactcggtatgtaccttctcctcgtgatcgggttatttaaatacgcgctcaggtcgctaacatcaaagccgtttccgtaatctctcagatggttgctcaattgacgatgtttgctcaagaagtcacacgagtggcgctcgaggttggaacctatggccaggtctgtcgaatcctcgtctttctttcactatcacgaacaatcgtgaaaccccactcaacgcatgtatgtttctatgggatttacggtttcttgtgctcagttgggaggtcaggccgtggtagagggagtcgaagggacctgggctgatttgacaacgaacgtcaacgtgagtggtcaccgcattcgttcccttctatctttgctcacgggactgctcactgatcttgtaaacacgacgtgaattgagctgaaatagaatatggcagcaaatttgaccaaccaagtccgagaaattgcacacgtggtatgaaatagatactcatagcgttcgaagaaatatgcctctatatttagtggtattcaagctaattccatgcttctggttccccgattcatagacaaaatcggtagctcgaggagatcttaccaagacggttagcgttaatgtccagggagagatgttagacctcaaagtcactgtgaatgagatgtaagtcttgttcgagtcttattatggtcttattcgagcccggtcttactgcctcgtgctcacttccgcttggggtttcatgtatgcgatggactgccgtgtctaaatatagggtgagtacctcttttctattcttgtgcacgagcccttcttcatattcagccaactcacaatgatacgcttgttgattcggatcaggtgggtcaattaacgactctagctgatgaagttactcgagtgtctctcgaggtcggtactgaaggaaaactaggtggtcaggtacgtcttttgctgtcgtatccagcagctgctagacgtttaccgttgattaattttggtttccttttggtattacactcttcgttcaacaggccgtcgtgcacaaagttgaaggtgtttggaaggtaatctatttagttctccactcttatttgtttgaagattaattccatactgatgctttctttcctatccatcttacaatttttcaaggatttgaccgacaatgtcaatctaatggtatgttcatccatcgtatcaggatataaacaactcatgtcttccatctttacaacctccattgaccactatccatctatcatctttctttaggctttaaatttgactacccaagtgcggtctattgcggtggttacaacggctgtcgctcaaggaaacttgtccaaaacgatcgatgtaccggcccaaggagagattttgcaactcaaagtaggggtttcttctcagtagcttccacatatctcgaggcgaacaccaggctaacgatgcgacacgcctcattgacttcatttaaagaacaccgttaactcaatggtggaatctttgaacaacttctcttctgaagttacaaggtctgtagattcgtacatcatcgacgcgcacatatatgcacgacgatactaaattgttctttggctgctgggatcagagttgcaaaggaagtcggaacagatggtcaagtaagattgatgctcttctgtctctctttgtgtgaatatttcattgaaaagatgaccagcagctgatgttcttgcctttgtgcatgcgtagcttggtggtcaagctgtggttcacaatgtggagggtgtctggaaggtctgtctaaaacgtgaattctaacaagatgaatttgatggactgatcagcttctttgtgccgtggtaaacataggacttgaccgagaacgtcaacttgatggtatgtttccctcaaactgaggtcttcaacgaacttgaccaaccttgttgtttcaattgtcaggctctcaatttgactacccaggtgcgatctattgcggccgtcacaacggctgtcgctcgaggaaacctttccaagacaatcgatgtgcctgctcagggagagatactgcagctcaaggtaagtatttgtgttcagtctgactggccattaggcggtggtcctctatcgaagctcatcatttagggtttatatacgtctaggacactgtaaacgatatggtgtattctttgaatgagttctcatctgaagtgacaaggttagtcgtatcgatcccatatatcaaccgtattatatagcacgcgtttaactaaaccccttcctcgtacaatgtcttccactgacagaatggctaaagaggtcggaacatatggaatcgtatgtactgcgccatttaaaaatacaagtaggctgccaatctgacctggtgttatcgtgtatattcagcttggaggacaagcacaggtagaaggtgtcagcggggtctggaaggatttgactgatagtgtgagtccaattcatctacttcataggggttcactgagtctcaggcttaaacatctccattcttaattaggtcaacaacatggccaccaacttgacggtccaagttcgaggtattgcgcgcgttactgtaggttcttctacataccgacacagatagctagtcaatctaggaggttccgagatttttttctgatatatttcaatccacaacagacggctgttgctcgaggtgatttgactcagaaattcgagggagttgctgtcagaggagagattttggatttggtcaacaccatcaacggtaagccgaagaaggtttcttgatgcaagtagcgcggataatggctagtctgatcttgaccaaacatttttacatcataaggtatggttacctctttaacccatttcgcttccgaggttatctttgtcgcaagacaggtgggtacggaaggaaaactgggggtacaggcaaaggttcagaacgtagagggaacttggcaggaaataacgttcgtatccccttctcatattgcattcgcctttctgcgatataccaactggctgtgctgattgttttattctgcttgtagatcgaatgtcaatactatggctcaaaacttgaccactcaagtccgagctttcggccagatttcggcggccgcgacgttcgttcctcttgtttctttaaacaatcataacgctgcgcgcatactgatatcatgaaattgcattgaactcttacagagacggtgatgctacagagtccgtccaagttctggtttccctaggatggatgcttcttgtctagctgacttcccttcaaatttcacaatcaggttcatcactgtcgaggcgagtggagagtaagtctatcttcctatcatttgtatgcagcgagcacgctcacttggttctgacccgtatccgaatgatgtttctacaggatgggatcgttgaaacagactatcaatcagatgttcgcctttctcatttcttagtttgctcgtcgctcgcctatctgattgtaccatgtggtattattaaacagggtctttaatctccgagagagtattcagttcaacaactctgctcgtatcactgccgagctggcgaacaggagtaaatccgagttcttagcaaacatgtcccgtacgttcctttacggctttgcctggtttgagtttttgcgcttatcgttattctctctacatctgttttgttcgaatagacgaaatcaggtaacattctcctgttaactaaatgcaccaaccaatgctgctgatcgcgactgacttgattttttctcatccagaacgcctatgaacggaatcattggtttgacagttcttacactggagagcgagcttacacgtcaacaaagagaaaatctaatgattgtgtctacattggcaagttctctgctgacaatcattgacgatatcctcgatatctcgaagagtatgtttccatcttctctcatttttgagtaacacaatgtgatctacaggtttgctgtctaacatccgccttctccttgttttgtactctagtcgaggctggtcgcatgacgatggagacggctccattcactttccggccaactgtcttcggagtgttagtcgttcccccatccaagttttagagaggctacaggtttacatgttcatcgatctctgtttggtttcgcagtcttaaaactctctgtgtcaaagctgcccagaacaagcttgacttgatatatgatggtatgtgtttatcttctaaatagattttatattgaaattttaaatttagaggacgatctgattcgtttcttccctgcggacgcaaatagtggatccgaagattccggattgtcttctcggagatgctcttcgtttgaaacaagtcatcacgaatttagtcggaaattctgtcaaggtatgttgcatcacgtagaagaatacagtagttctctcgatcgtaagctaatctcatccatggtgctttagttcacgaccaagggtcaggttgctcttacgtcgagacttatcggaattgaagacaacttctgcgagatcgagttttgcgtagccgatacgggtattggcattaaaccagataaactcgatctgatctttgacacattcgcgcaggccgatgggtaagtcacatctgtcacaataaatctgaggtttgagtaaacccactcatgcttatctggatcattctctttcgctttaggtccacaactagggtgagaatttctttcagttccaaattactgtgttaggcgaaggcattctcaattttgctgtcttctctttttgcaacagaaatatggaggtactggtttgggtctatcgatatcaaggaagctggtagctttgatgaacggccgtttatgggtagagagcgaggttcgtatacagacctcttttaccagctgtagtttgcgtgcccctaaacagttttgcctacgtttgttttgcgcagtacggaagtggaagtcgatgtaagtgataaatagatgtggatagaggacgttgggtttcaaattgacttttctcctcttctcatcactcatgcggtgttacctcatcacagtcttctttgtacgtataagctgcactaaatacggaagaagattggctatcttactgaacagcctgcttttgtttgtataccaacagacgacacgaacagaaatcagtgaagttcagccaattacgatactagagagagtcgctccgtgagtgattctgctattgtcagatgtttccatctgatctcgactgactgaccccttttgaataatattcaacagctatgcgggccgatgcattttattcatcgatactctaggagacaagacaggcgtgtgtgatgtgattgaacagctcaagttgaagccccttgtcgttcactctgtcaacgatgtctggaacttgaagagtctgccagaaggcaagcctgctttcgacacggttattgtagataacctcactacagttcgtctggtcttgatatcttgtctctggtcgtatactcactgacctaggcctcgatctgtaaactcaaacaggctgaacaattgcgagaggtagagaatcttcgatatattccgatagtcctgctggcgccggtacgtgttcttcaatttcctctttactctttcgagacacgtctgctgacaaataaacaaataactaaacaaacaaaccaaaaaccatctgtgtttcgtctgctaggcgtcacgtccgagcaaccctcctccgccattcattcagatacctcctcctaaacgaaggttgttgaatcttgctcagccacaagaggaaggtccaccagcgattcctgtaaagagctgtctagacatgggtatcacttcatactgtactgcacccacaaatgttcaagagttgtatgtctactggcttagtctttatagcttgtgtgttttcaacgcctaacgtggtttacacttctgttgggtagattcaacgctttgacacctgcgctcgagtcgcatgtcgcggtaccaacttatcctgtatgtctcacatcttattcaatcagcgacctaccccctttttatgtttctcaacgtgatttgttctcgttgaatatttctttcatcaggcgaaggatatcgtgctggatattctgcttgcggaagacaataaggtcaaccaaaaggtatgtccaacagacgttgtgattgtttatacgcagctggggttctcattgagtttacctttacaattcctgtactagctggctgtacgtctacttgaaaacagtggacacaaggtcgaaattgccgacaatggtcagatcgctgtgaacttgttcaagggccgccatcaagaacgtcgttcatacgatatcatcctgatggatgtctcgatgcctacgatgggtggaacagaagccacgcgtcttatacgagagactgaggctgaattgggctacgggcgtattcctatcgtcgctctgacggctcatgccatgatgggcgatcgagagaaatgtctagaagccggaatggacgagtacatcaccaagcctctgaggaggaacgatctaattggcacgatcaacaaggttatgcaacctattatacagcgcaggagcgccagctcaggctcagagggcacggtctgatcgagatgtctcttatcctttttctcttatggggtttactatcatcattatttaggtttcttggtttcttgtgtctctttctccttttggttggtcttatcgtctgcattatcggcatcttctcttctgggtggtttacctgaattctcttctcttttggtattatctatcaatacttgctcttctcacactctcttcaggatcgttctcttctttctatccttattctttcttgtcttttttgagtggatacataatagaatgaacggcggtttcattaattgctctcctcttctggttcatttctggtgaacgcgtaactttctcgtgaaaccatcttaaactccagcttgatactcgacaatctccgactatcaactctcaactcactctcatccaccgtaccgacataacgaactatcgacctatctgcgtctaagaacgaggaagaaggaaaagaacaactagtgacagaaaataccatgtccaacaactctcaatctcaatcgcctgcaccagaaggaccagctcctactgctggctccccatctggttttttgaaggtaccgtactcgtcctttcgtccttattttcttagctctatacccattatttctccttctccttcctatgttccttttctcgcttgttcttggtcgaatcttataccttgtgatgacttgctcgaaggcgcatccgacgtgttctctggactgacgataatcacctcacacttacttttcattgctcgttatacgcgtatgcatctgcattctggaacgatgtcgaacgacaaataggccgttgtgggcaaggaagttgtggttcgattgaattctggagtagactacagaggtccgttctcatatttcttctcttcttcactttggatgcatacaatcggtttccttttaggttattgacattggcattgaaacactatgatgacaaaacccgccgcacacacccgtttactcacatgcgaacgtacacgtatggaatgaataggtattctgtcatgtttggacggatacatgaacatcgctttggagcaaacggaggagtacgtgaatggagtgaagaaaaactcatatggtgatgctttcatcagagggaacaatggtccgtgcttgttcgctttctcttcttcctctctgtctcttacaaaacaactaatcgtaccgagaaagtttcatttcttctttagtgctttacatctcggcttcggactcgttataaaaagaagagcgtgcactagatcctctggacgagatagatacgagcatataaaacacaatccaacagtctttttgtttcaaagagagagaaaaggtcctttctgaaggattgcatgcgtgagaaggattccttgacatgacttgttaagagaaagaggtgacaaggggcagattaagaggactacgatatgactgagaagaaatctcattatagattgatgtcgacttgcaatttaagataactgcttcgaattcgtgttgactatgtattattcactatccgctattcaccatatactgtctactactgtttgttgtgagttctcagaacaagagcgcctttgagctgacctctatcccgttgacaaccactgtgcccttcctactccctgctctacttccactttcttctgtccctgtctgagattctctaggcgtgtcgatacctgaagcaccgtcgaacccagcatcgtcgacgttgttgacagaaggcatggtggcttctaccagtctaggtctgattcctaaagatgagcagacaagtttgtattttgcccgaattctttcaagcagagcagagatatctacctcgggcgatgcagccgttgaagaggttggttctgtggaaaggagtgccggtgtggtggaaggtgctgaattagattcgtccggtgtgagtgactgtgtgggtggtatcgaagcctgattctcgggatcggatatgttgtgagtagggaagagagagatcaggtgaagaagttgattgatgtgattgatcgctctacttgccgacttgctatatgatacaaggggacacgacattgttcaaacggatgagctttgagaacaagagaagcaagaacaaactagccagccagccagccagccaacaagctatcaagcaagaaagcgaacaagaaaccccaacatacgtttccttgccgagtagatctctccagaacgtaccgacaccttcgtagaacccgacttcttcccagagttcgaatcctttctccttgcctaacgctctaccctcgaacaacccgtggagcgctccgtgctcgaagccttctctatagcctgtttgatagaatgtttcctccacatggttcaacgagtcgagcgaatcaaacaggtcggccatcgtgtctatgagggagtgtatgtgtacgtcaaggtgagtgagtaagtgaattgtgacgatcaggtacaggcatacgcacaggcgcaggcacagccgcctagtccgtcagtgccctgagtgttacgagcgtcggttactgggcgcagcatgtgcacagctttttaccgatacgcctcttcggcacgggtgcggccatctgcgttcggtctgtttattcttctcactttcgccctttcgcccttttcctatccttgcacacttacttcagtcggctttcctatccccctggttttttcagtcttgagttgtctgtggaactgcatgagatactcggtcttgggtggtcaatatctcgtctagaaggaaagaaggaaaggaagctcctcaggaattcattacagcgtcagtcgttagagagatctcggaccataatcttctcctgtttcttccctccagccgtgttttctcctctcttcctggatcttaccgcagtttatacccacatacaatctccttcaaagactgcagctcgtagcccgaatctcgtaatcttgcaaaaagattcttgagccctgctcgacgcgatgtccattctctcaagatccgtttcgcctagcatatcttcctcgtcctcggtcgggactagtggatcgatcacgagcctagccggcatacagtccgcctcatcttccgttagtgatggtcttcgagctgaaagctgggaggaaacaggctatcaggctggccttccttctggtagcgaggatgagcaggagagagcatggcgggatggtgtgacccttcgcaaaggatggcagtttctagacgcagcagccgctcaaagtgacgacatgggtctaggcaaccgaacgcggaaaaggtttagccatactgagggtccttccggcacgccaggacgtcaaagcccaggtggtttcaccataagcagttcttcgggggaaatgaacagggtatctatcgcagagactgtcaagccttcgttgtcgaacgtttcgagccacgaacaactgtccttcacgctcgaggggcagcaacaacaatcttttgtgccgtctccttcttccgactcgtcccatttcatgtcgccgataacaccgttagggagaaagagtagggcgtcatccatcagtgcgcttggtgtatcacacagtcttaccaaatcatcctcgtcatcttcatctccttcttcatcctcttcatcgccacccccacctccgccatcgtcgacgaaaccaacttgggtcgagctggcaagcccatcaaactccccggcatcagcatcgccattattctcatcatctttcggatttccccacagttcagcgagacattctccgcctctccaaaatattcaatcgttctctcgggcacaagcctacacgcccccatccggaacacctccgcctgggagctcctccactccttctctacccgcgaaacccatatggctacaatcaaatccgctgtcttcgtcactgtcacaaacatcggttttggagccctcgaatgccagttcatcatgttcaagtaccccaaagaaaccgtcgtcgtcgtcatcatcatcatcaacccgcaacggtaaaccctacactagctccaatcatacaccctactcgcaggctgtgacctcatctctctcgctgtcatccgcgccgcctttgcctcctcgttctcctcaaattcaaaagcacgtggccgaagccgagttttcttcatcttcttccaaaccgtccggtggtagatttggactcggcagtgggatcaaaggacggctggcagcgatcggcggtgccgtaggaggcgtggcaaccgggttttataacgagcgtagcacttacactccgtccttttccaatcagtccaactcgtcctacccacaatcattcaactcactttcctcctcctcttcgatttctactctctcgacctcgtccacgtctagcccttacctttcacaaccttctaccttccaacctgactcgtttcttccggctgtgccaaaacaacggacgtttcctcaagttttgtttagtgttcctgggtcagccgtcaggcactttaactcatcttggcgagcccgagcgggttctccttcgtcttcttcgtctcttgcgagtcaagcgtcgtctactacgagcggaacggtgtttcaatggaggcagggattcccaagacctattgtgtacgacccagaggcaatcatcccgacaggaagcggcgcccgagttttcggaaggaacatcgatctcgtaggcagggagtgcggagttgccccggaagataaggacacggtcggtcgattgattggtcggaggtcgagagagatcctgccggccttggtggtgcgatgtacagagtatcgttcgtgcttttcattctctttttctctctgccctggctatttgtttttattgatcgattcgtacggcgtttatcttaacgcactctatgcgtccaatcctcttctttctcaacagtcgaaatctgggcacctagagaggaaggaatctttcggattagtggtcgaagtactcatagtcagtttctttctcttcttgccaatggacagggcaaggaacatgctagttctgactgactattttacgtgtcccttgaattcactctatattggactggttgttttgattttctagtccaaaagttgcgcgcccagtttgacataggggctgatattgatctgaaattatctgatcctggggagctagaccctcatgcggtcgctggtgtcttcaaagcgtacctacgagagcgttcgttcaagaaattctcttctttcttcactatcctttgctgagatgaagtttgctgatggaatggccatcttgttcttgatggaacgacttaacacagttcctgacccgatccttacgtctgaattgacacccgggttcgatcacactatgcgtcagtacactggttcgaccgccagagacggagcgttcggagcttcggctacttcaccgaatctgaccggatccgagttgacgagcgatcgatcgaaagcgagcttggtgaccgagatccagacaaagctcggacgattgccagagaccagttggtacttgctccaggcggttgtcggcctgttggaccacactgttcgtctcttccttcctttctctctcgatatgggacaggtggggttgtgttgaccaagagaacgttcgttgaatctatcaatccatttcatctacaggctcgttacgaggaagtcaacaagatgacgctgtcgaatttgttgcttgtattctgcccctctctgtgtttttcgcctccatttctacggttactcgtcgagaactattctgtcctgtttgtgactccacccttaccttcaactgtctcgtccaagccgacacttcctcctcgacctcttggcccgagtcaacacaccaggtcttcctcttcctgtcttgaccaaacagcacctctcctcgaattatcttctccgtgccccgagttgttttctggactgagccgacgaccgtcgagggatgctcttaaggaggcgaacgatatgtggattggtgatctggggaaaccattgcctcctcaaccggttggtcggcttgatttgccgaccgacaggaatgttgaccggaacgccactgggctgtcaaccgggctgggccgacctgtcctcaaggtcaagacgacagaggaggagcagaagggggaggaaaggcagaatgaagagaacaagaaccgagggattcaacacggatcggccaagttggcagagccctctcggcaaaagccggtgtcctgctctaaacgcttacccgtcgctcggtccgtttcaggagaaagagagggctatccgacagagcgaaacgtggctgaccatgtcaccgttcctggtatcgccgccgctgccaccacctcctcttcgacaacgtccacggctgagaagacagttcttacgggtgtggtcgcctctagacggtatctgttctctactccgatagccgaccgattcaagtcgaccacggttcctcatctggcaccgctacgacctgttcataatcgaacaatgacgatgtctgatctacctgtgccgacacccgatgggggggtgatctcatctgcgtctgtctctgcctctgccttgtcgtcttcgctatccgggccactggtcaggtcggcggattcgtctagctcgttgaacagacagctccgtcggggtgcgaatggggggattggcggtggattcttctcgtctaggggtgcgtccggttcatcggcctcggcgtctctcctggcgggcagcaggtttggggaaagccgggtggatcccgataacggcggtcaaccggcggcggctaggaaaaagacaccgatgtggaagcgaagcagtgtggccgtcggatttgggagcggaggtgcgggtgggaccggcaatggcaacggcgatggcgacggactcgggtcggacgaacaagagtcgcgaaggtcggtcaaggaaacaattaaagctctggaagctcactctgatgagagagcctaaccgaacgtgtgtgtatatgtgtgtgttatgttcttgtctgataattaactagtagtactctctataccctttctctttccttccttcttcctttttggtctttaagctcttcagctcttcatctttcgtttgttctattggtttgaacgttgcctgtcctattccggatgtgaatcgtgtcagctcttgtataacccgtccgaccggataaactcctctcttctcccttttctttcctatccttctttccccttttggacttttttctccacttcaattcttcttcttctttccctccaaacacttatattgccaatatgtacatccattctgttccactccaccccgtcccgtcccattccgttcttgtttatccaggttgtcgttatcatctaatctcatcaccatcgggtgaaacaagaagtatacctttcggatcgtccggccctgacttccgagttcggcccgggccggtccaggcggactaaccatgagaaaacaacgggagttgacgacgatagcaacaacaccaaagaatagcttatggcgtacgtcttcttatgagcacatcgaagaaagaatagaagagaaaaccgaaagatgaacgtgcccatcgctatagagagtgtctatttcattggaccatccctgtgctcccagtgtggaacggtcattggccaactctgacgtaagaaaggcaaaaaaaacctggggaaaacttgcaagacaattggggcagagcgagaaagtagcctctcgttgatacaatgcccgtttccctctctctcatcggacagaatggatcatacacgagcgagtactaagaacgaaagagtcaccgtccacattgacacagcatgaccactagcatccatagtcgatcagctcggtagagaagcaagtgggagagcaagaaagatctcagcttcgaggggccccagtacgctgacgtgcgggcgaaaaaaaagggaggggggaggcaaacaaaaagggccgtcttttttttcttcccgctcttcttctccttcctatccatcactcacttccttactcactctttctttcccaactcttcccaccaagatcactactctatcaaacatgacttcttcccttgacgctcttaaggcttccggcaccgtcgtcgtctccgactctggagacttcgagtccattgctgtttaccagccccaggatgtgcgtctcactcattctgtttcctttccaatctttccatctcccttttttttcttttttttctttcgtcataagctgatctttgtgattctttattctcgtctcctcatccaggccaccaccaacccttccctcatccttgccgctacccaggatgccaagtacgccaagttgttcgagcccgctctcgagtacgctaagcagaagggagggtgagtatctttgcgttcaatggttcgccatgacaatcatcggagaagaaattcttttgggctttaaactcatcttgtgctttgtctcggctggtatcgttgtagatccgttgacgagcaggctggacacgccgttgaccgactcgtgagtatcattacattctacccggaacaccatcccgtgcaggacgtctatccagagtcttttagctccaccgttcaagaaagacaccagctgatcattctagcttccttctcccattatttatagcttgtcgagttcggaaagcagatccttgctctcatccccggtcgagtctccactgaggtcgacgcccgactctccttcgacactaaggctaccatcgctaaggttcgtctatctctttcttcttagctctattgatttatgtccgaaccccacctctaaaattcttgatcttgatttctcacagggtcgagagctcatcgctctttatgagtccatcggaatcaacaaggaccgagtgttgatcaagatcgcctccacctgggagggtatccaggccgcccgagtgctcgagcgagaccacggaatccattgcaacttgaccctcctcttcggtttcggtcaggccgtcgcctgtgccgaggctggtgccactttgatctctcctttcgtcggtcgaattctcgactggtacaagaagaccaccggcaagacctacgagggtgatgccgaccctggagttatctctgtcaagaagatcttcaactactacaagcagcacgactacaacaccatcgtcatgggtgcctccttccgaaacgtcggagagatcaaggctctcgctggtgttgactacctcaccatcgccccggcccttctcgaagagctcaagaactccaccgaggatgtccccaagaagctcgcttccgagaccgccaagaaggacgagccgattcccaaggtgtcgttcgtcgacaacgagcccgagttccgatgggctcttctccaggaccagatggccttcgacaagttgcacgagggtatcgtcaagttcgccgccgacggacaggagctcaccaacctcctccgagccaagcttgcttaaatttaactctaaatttaaaaagaaaaagaaacgctcgaccccccatatgtttttaactcacgtctcttcttttaatgatcctttcaagttttcccattttataccaccaactgtttctatatgacttttgagatacaattctgtccttcccacggtggcgaagagttgagagtgctgacgataacaagagaaagagcaaaggagaaagaagagcttggtggataagtctttcaaaggagaatatgtgtacatgtatatgtcaagataaattagggtatcatctagtatctacccatcaaccataaaaactccttccctccatttgagaatctacctgtcctccgctcctactcgcccgctcgttcggttctcctcgtcatcctcttctcgtgagccactaccgagtttcccagaagaccctctcggcccgagcgagaactctccgataggaatggcagacagaaaagcgagcacgcccaacgaagcagtcaggatgaacgtctggcgaatggagaccgagtaggaagtaatcgctgcgtgacggaggtgaggtgagagagtgaggatgtatgatttagagtgaacgatggacgatatgatcttttgtgtgtagatagtgtgggaagggaatcgatcaaataatcaaaggagaaaaaaaagaagaaaaagaaggaggaggagttatcagataagattaaaatataaaagaaaaggtcgatgagcgaaggaaacacggaagcaaggaaacaagaaaaattcacctgctcgcttccttcacaagtgatccttctggtcaactctttacccaagacagcctgctggaaggccgaacagatcgcaattcctagagtcatacccagtgttctgaacaggtaagatatcgacgtcgctttggggatttgcgaccggggaactaggaagataggacaggccaaaaattaggttgggcgaacaggcaagatcatacaaaagacaggtttgtaataagacgtaagtgaaggacggacctgaagagatgatagctatcaacgaagtcaccaagaacgaagagtatctgtttttagttcagcaaaacacaaagagcaggatcttcagtctcgacttgtaagatagacatatgacacagacaaaagcaagacgagggaaccagaaacgaacccaagaccggcagggacgagatctccccactcgtgccaactgtttgtaccttccgtatcccatctagacatcatcaccgagctccatatcggcagcgtcaagctgactacacccagaattctatatttcccagagaccttgatgatgtgcccgcttagaagactgccaatcgagagactgatcgagtttggcaagaggtgcattccggctgacgttgaggtagatgatcggacgattgtgtagtacagaggaacaaagaacaacacggatgcactggccatcgacctaaatgcatggagaaaacatggaagagaacggattacggattagtacatggatatcagtcagataccaagacggaatgtgaggacgtacatcaagaatgcagagatggatgtccacaagacgtttcgccgacgcatcacttttctcggaatcagcacttttccaccgttcctttccctttctccttctaccacgatgaacgtgacggtccctgcaacgcaaaacaccaacaacccgaagacttgaatgcttccccaagcgagaccggacgagtggaatgaaaaggccagcaggagggaggcaatggtaaagaataagatgagcgtcccgggaagatcgagcgaatcgaggagagatctgtgggtcatttcggctttcatagagtgagtgtcttgtcgaggcacaagtagagtaagtgccgcaagagagactacaaggaggggcagttgaaggagaaatgcgattcgctagaggtaaagagacagatgagttcgcaatcagagaaatccgtttatcacccttctcgttttggctttgaagacgaatgagtagacttacccatccgaatcgatcgctgacccaaccggcgaaaggcccacccgatgcacctcctaacccgaagattaccactacggtcaaataagagagcagtggcaactatgaatataacttgtaaatactatcaaacgtgtggaccgatgatactaactcatcaggccctgatagaaacctctttctctcatagtcgtcagatcggtggtgatcaagctgctcaaagtcaaaatgcctgctcctccagctcccatgatggctcttcctatgagaaggacattcatcgaggtcgcgaacgcgcagacaatggtgccaatgactgtttgaatttttgtcaaatagaacgcatctagcttgaatgtcctgatcatgcgaacgaaaagatttgagaaacgtaaggacgtacagaacaagacacctgccaagagaatagtgtgagttctggagaaatgatccgttaagcctatatagatagattggaggtatcgtattgttggaaagaagtgaaaggacaatatcagtatccagatcattcacaggataatttgggtattaaaaaaacctcttctctacctccaaacacgggtgttgccactgtcgagatcagagaaaatatggatccctataagattggcaaactcatacaaagacggttgtcaattgatgcaacatcacgaggccgagatacaacgactgacaatatatgccgatagttcaatatgattgaaatggccagcaatggtcggtgacagtgtggccaccgctgtggccgataccgcaaacgttaggtttgtaccccaaacggatagtctgccgaccaaacaggaacatcaataacagtttctgcaggtacaccacttgaataccccgggtctatcggagctgactaacaaggttatccccaacctccagccttttaaacgctcctgttcttcttgttcgccggtttgatctccgttctggattggtttcgtgttcgaatcggtctgcttgatagtgacatcacttctttcgacagcaccttccgtttcctcagtggctatctctactccttgtatcgcaccccaggaggaaggagagttggctgcactgagaagagcgtcgcgttcattgtgtagatgtttggttggaccttgtgaaggcctatcagatacagacttggctgaaggcattagctatttacaaacagaaagaaaaccccgatcaatgcaagcggggttagtgatagagaagaagaacaaataaaagaacgatgaatcagcaaaatgttcttgcttcttaaaaagaaatatacctggccgatcggatgggtctgtttcggagctagcctatctatacaaatcaagaccccagacggaaccccagatatgcccacaagatctcccagcgcgcattctcacttgggcacatctcatccagctaatcaatctggcaagcacctttatcttggtgtccacatgtattatgtctctgggttgtcctctggcgtttgggttaaggcttcctttgatggggtttcttctggaagaagactcattgaaagatgtttacattctgtgttgcaccctgcatctcgatcggaatttcaatggacgccattgctatacaccaggtagtattggcgtttgttttttcgacgtagatgcatcaaattagaaggcactctcagccttctttccgccgctttctttcttcttcacccccatttccatcttcgacgtcaaccgatccgtcctcaccttctcctctcttccgcttctctccaaccccgacggttcgtccatcagcgtcgttcgagactttcttcagtacccatctcacaagtccgaaaccccaacctccgatctttttctgaattgatatccgctcttcttcggttccaataatgattccttcctcggcctctctcctctctttacgggcgtcactgtgtccgttgttgtcggcatgttcatcggtggcagccggcacgtgcgttgtaggctcatccggcttggcttgttgtttgttttcaaagatcatccgaggagtgatcaatggtggtcctgagcccgggacaacagaaacgcgtatagaggcgggtaccgagtcggaaggagtttgtgatggagaagacgcgaatgagggttgagaaatatcgagttcgatcgaaggtgcatcgaaagaagatctcaaatgtactatcactgatatcatacagatccaaggagaaccaagaagaaaggtttcagacggtaaacatacacaaggaaaacgagctaagacataagaggtttaccttgacttggagaaggatgattagaggattcaggcttgacgtcttcagaaacgatattggatggagccaagttagagtccgaagtgccagaggacgacggttggttgaagacacctagaaagaactcgttgatgtaactccattttctggcccactgttgttatttgattcatttcagaaagagaggaacagatgagatttttttctaatacatcggtgaaacacatcggagaaagacgcacctgtagaacctgaacaacatcttctttcgacttgacgccgacccgaccgacgatgatcccctcgagtctcttgtcttccgccagcgtccaccgttgactgggtccactctgagatgcagaagacttccagaaagtggtccgagtaccaggctcggttgttagcggagtagaaagtgaatgtgcttgttgaatctacagggaacgaaattgaaatagttgaggatggaaagtactgtttagagagacagaatcaagacacgcacgagaaggtctagccagcctgctcttgtttcacctccttcgatattcctctcaggcgctccaaccaccaatggtggatccaaaacgatttcccatccccacctcccttcatgttcctctttctccttctcctttccctcttctccttttccttcgtcaatcctgtcacgcaaccaatgaggaggtaaggctcgagcaggcgcaatcttgttgatcggtggagaaggaactagatgcatcctttgatggtgcgctggagtgtgtgggaagaagaatggttcagatggatgaatagcgaatgttggatatgaatgatgagttgataaaggtgtcgatgcagagatttcactgaaactagataacacttcttgtcagatcctcaggcttcgtgattgctctcatgagaaaataaatggaagataccgacgtttctgtccatatgccccgctccttaagtatggcctcgatctcattccgtatgacttctccatcctcgtatacgttacctatgactgcgccttcttttccttctctagcttgttcatcatgttccaaaacctgctccatctttacaacttccaacatccgtctttcgaactcttggagcactcgagcggtcttgagcgctggagactcatcgggagaacagcctagcaagaggtgaagatccggcgaaacactcgacgggttgattaaagagtttgtcaagatttctagaggagcacgtagaaacgtgtcgatagatggacatggaatgggttcaggagatgaatggagcgcgatagatgttttgaatttagtgatgctgaaggaatggtttggtcttgctagagcaataggtggggattgcgaacttagtgcatcaatgttggtagttgttaatggagacccgaccaagtagatgtcctctatttctccgtcgggctttgtaactatctggttgggcgcagatcgttccatctctacctcgacgacgaggaacttgccgccgacgactaaaacctctctctcaacggttttctctgaaatcccttccattgtctccctaaagacttcgagtccgagggattttgatgtagattccaataggtcaggtaagctcgcggtcggcgaaaacgcaaaaggcgttttggcagggcgggggaataacgtattcgaaggtgattgagaggaagaagggaaagatgacagtatggctaacgttggcgtcagcttctggagtagcgcagtggatgatgacctatgttaatgtgtcaaggatggacagatacgaatgagttaacctcgagcctaaccagacccagaaggtatgaaacgaaatagacaaaccaatctttcatcaagccagcggcccggacccttccttcctctccgccttcttcccaaatggatttgaattgctccagaacatttctgatgcctcctacagcttgctggaagccctctctcgtgagtgggacgttggctgctaatgtcagatccggagggagcgaagcgtaagggttgatggatgaaggatgtgagcctggcgggtagtaggcagagagagaagatgccagagagttcaaatgggacagtacagatggcgatactgttggtgtgacgtccatactgacttctgcagtccagatggattcaatatagagcaaactgatgatggttggtcggtcaatggattgattgactgagagtgagggcgagtgtgtacacgagaggaagcgagcgaaaccccttagacagacgatccagatgaatgatagatgaattaattgcccggagacagccgtcgaaatttggatttttttacctgccgttgttttcgagagcaaacgtttcgaactctttcctctccttcttttctttcttccttacccaacacgtattctgttgattcatataaacacaatgtctggacttactcacccctctattcacggtaggtctaggtctttggcatcatcatcattctcttatgccgagtgatgtgctttgctttgcttctacctcggtttcagctaggatccgagcatgaaaattgatcctcttttctgtgcttctttctttccttttttttcttctttgcagacggatggtttcgagagatctctgatcagtggcctggtaagtcgggttgttactataatcgtactatctcaacctaactaaatgaaatctgcgcttgcctatcgatctgtgtttaggccaggctatgtccctcaagtgagtgttctttctctcgtgctatgttcacaatcaagaccggtcttctcaacgcctcttgcttgtctttttgaatctttacagggtcaaggagatccttcacactgagaagtccctcttccaggacgtccttgtcttctcttcggagacctacggaaacgtcctcgtcctcgacggtgttatccaggccaccgagcgagacgagttctcgttcgttctcttctttcttttctattagagttgaatgtctgcaaacagaagactcatgcaatgatgactgaacatccgaaacgatagctaccaggagatgattacccacattcccatggcttcccaccctaaccctaagaccgtccttgttgtcggaggaggtgatggaggagtcgtccgagaggtcctcaagcacgagtccgtcgagtctgttgtgttggttgacattgatgaggttcgttgagtttctgaagaaaacatctttatcagacatcaagagattgaaactcaagtgttgttatccaccggtttggttcttccatcatcgctgttggtcttgtcacctatcaggccgtcccccgagtctccaagaagtacctccccggtatggctgacattctttcccaccccaaggtgaccgtgctcatcgccgatggtttcaagtaccttcctaccgtcgagaacaccttcgatgttatcatcaccgactcttccgatcccgtcggacctgccgcctccttgttcgaggccccttacttcaccttgatgaagaaggctcttaaggagggcggttccctctccacccagggagagtgcctttggttgcacttgcctttgatcaaggacctcaggaccatgaccaagaacttgttccccgttgccgagtacgctttcactaccattcccacttgtatgtgcttcttttctgtgccgctcttgtcttcttctcattcaataggaacacacttgactgaccgcctatccgacatggatccttctgttcgtgttcatccaacagacccctctggacagatcggtttcgtcgtctgctccctcgccgctgaccgaaaggtttccgagcccgtccgacaggtccctggatgcaagtactacaacaacaacgttcaccgagctgctttcgtgcttcccgagttcggtcgagctatggttgaggagggtaagaacttgttgaacgagttcggaggtgtcaacaccgcccgactcaacaactagagaatattcccaaatgaaatctgacttttaaagtcgtaaaagaaaagaaagaaaaagaaaaggaaaagggctcgactggaagctgtccatcaagatacatgcacgttcaaagattttttactttttgagtcgtggaggcacataaatcttgtctgtaccgagcctctttatatatcggcagtggtcggacgtacacgacgacttcagccaaagcatctagtggtacagagcgtctacacatacacatccaacgagatcaaatacaactgtttcgaatattttgaacaaaacgacggtctcgttgtcgcgttttgtctggtttttatgcttggcattcgtcttttacggttcatgcataagcttcaagcatgtctcgtatgtactagaaggtcaaatagatgagggaatggtaagttgagtgactcggccatcgttagactatatattcatcaagcctggacttacaagaatgagactcccatcgaaggggctaccttcagcaagtttggccaaataccccggtaaagacccctgataccttctaaatatccctccgcgaaaaaaaaaggaaaagaaaagaaagaggaaaaagagagaaaacagaaacaatcacgtcgatcagccttgacttacggatgcacatacagacggctgcagtaacttgtaacgaaccatgtttgaagatctgaatcatagctcctgtgcctgatgaatatgtatatgcgtgcttggcggccggtctcaatgaatcaagtttgggtactgatgtggatactgatgatattggggttgatattgatgttgacgatggtgttgaggaggccatagcgaaggaagaggagaaagagggagagggggagacggatggtgccagcgcggcccgacgagattgctccaatccaatgacctgatgaattgacatcaaaggaaacacaagacggacatcaacatcaagtctctcttagcaaacatatgtgtgagatgctgcgaccaggaaggatttgtacgctacaaaacgcacctgcatctttcgcctcagtaaatcaaatggaaatgtcacggtctggctcaacccaccagcggccgctccacaagctagcttgatgagtgcaactttaccgccgtttgtcgaatcttcctcactcttcggtagccaatacagtcggaatttctcataaactatttggaaatggaacgaacgaaagattaaattagtgtctattgtctgttgaaaggaccgtttcctcacaagcgcactggggtgtgaggagaagggactcacggacgaagttcagagccacataaggctacaaatcagaggaagaacagaacagaacagaagctcggtcagtcaacaagagctggcacacttcaatatgaacagccaacgagctttcgatagagctacgagaagacaattctactcacagccacacctctgttgaaaataagcgaggataagacaaatttttgattcgatcaatactcaacccttgttttgaattcttcatgtcggaagcaaaagagtatttgatgaaagtcaagggacctacgctgcagtcgctagacaacctctatacaaccctcgaacacctccttcttctctatacactttcctggtcatgctcatgattcctagctctttcccacctaaatttccgtgtcccatgccattcgtccgtctatcagttgtcgctcacaatacaagtagagctgagaaaaaaggatgatacgaacggagcttggccgcttccagatcagatccatgaagttgagcagcggagatggaaagtctcgctcgtacaagatcgagcggaaatgtcaaggcaacctaaatacggaaccctcaaaattcaacacctgatgatacaccgtaactcatggctgaaaagagagaaaggaaagatacagaaacgtacagaagcaattccagccaaacttccggcgaacaacttcattcctgtcccgagctgtccttgatcagaaccgtcgacgtcggtcgcgagaaggactttcagtgtttcgtaagttgaaaactgaacggcgctgtaggctgatgcgatgaatttcgtttagagtcaggagttgagaagaaggagagggtagatgatgctcagcgcaaacaatcttactgcgaacaaaggaaggggtagtagagacgaacgcataattcgaagacagttgatcccgtttcctttcatgtatcctctgaatccctctctgttgcacgaacggaatcaatagaggataagtcaaaaaagtcagatctagcccgctttgcttgcttcttcattacttgactagagagaaacataatgggcccaatacgtactcgcgatacatctttactagggatgcaaatacacccttgtaaggttgaccggtatgtgccgattgaacctgcctataccgtccggagacagcaaacatattgcgcgtagcaagaaaaagaagacatcttcagaccacgtcgagctaagacgaacccaaccggatttgaaactatcttccaagaggaaatatagaacgtgaaaggaaggaatacagacatgatgatcttaagtctttctaaaggagagacaaccgtcctagatgtcgcacccgccaggccacccgcaataaagtactccattagatgctgttcaaccggtttcgttcgagcagaaaccaacatcaagatgttcccaaatcgaaagagggcgtaagccaaagagactcgatgaaatagcattcatttctacaactctaggttctattcgttacatagttgaaagcaagagatcccttttgctttctctctgctctcacacggacgcatgcatgagttcggaattaagcatacctgtttattcaaaagtaagttttgccagttagagtcgttctcgactggttcgtccaagtcaattatttcaagttcagctgggtcgtctattggtgtcagactggtgtcaacgactgggtaacggtcggaagagtatcgatgttcggggagattgctgttattatattctgatgacgaaggagaagacgaggacgaggacgagaaaaaggacaccatgatcaaggaagtccctccctatttgggccgagaacgaggagaagaggggtgagagatgtttaatgaaagatctctccgttgtctggtctgcagatgagaacggacggagaacgaaaagaaatcgggtttatgcggtatgtatctccacaggtttcttcgcgcccttccggttccgaccgaacgctccggtttggttctctccagccgagccaagcacaagatcacaaggactgctctctctgtccgccaaatgaatgttttgactccgtaagtgatcaatcaggaagagataaagattgtacatggatgcatgaaaaagtgaagatagaaagatatgtaaaaaaagaacgtgcagacgaccagtgaatatttggtcgagatcggaatgagagacagtaacgtgcaggaagagagtaagagaaagagagatacttttcgtcaagactggtggaagaattcggaagcgatacgagacgaggcaatcagagaccaagagagagtaagaaaagttcatgagaaggaaaaaaaaacaggagaggtgtgtccttagagaaaaatagagatgattgaagaaacatgtaaagcaatgggatgtgttctaaaccagagagatggagatgagacatgggtatttaagagaggaaatagaagatgaaaggaaaagtggaacgagacactactctacgaatccatgagtgcttgttcgataaattggttaatggcctctttacgagacgatagttcaacgccatattcgctctctgcaatacgtcgtcagagaaggtaagaactggttagggtatgacccaaaaaagatactttaaagagggtgatcactaacccaagtcctttcgtacacccttcttagtgaccaagttgaggtccgaattggccaggattcgtctcaccgaaacattcaagtcgtgatccgacggaccgtccacatggtctgatgggtccagcaactgcagttgagatgagcctggctggtaattggctcctccaccgggttgtaatccattatcattgaagtactctccatattgggtcccacgaacacttcggccgtccgtcggttgttggccgtagaacgagtttacaggtggtcggtagctgtgttgaaggccagatggttgcaacgaaggcgtgtaatgtcctccgccggctacacttgccggtctactgccatacattccttcaggactgtagtcttggtaccgatcgtaggaggattcatggcgagagacaggggcatcgtaaacggtttctcgaccatagagagagccagcttccgttccaatcgctcgcttcgaaggggggacccaagagccgacagacttgttgctctccctctcccacagttcgttctcgtattcgttccaggtcttgagtgggatagacttcgggtcgaaatgtccttcatcatgaatgaccagcttctttcctttctctccgacgaccacacgagtagaaccccaagagaagtcatccatgtaccagaaagaccagatcggaagggcgaaggagaagatgggaacagccagaatgtagaacaccatccaaccgatcatgtcccactttcctcgaagaaggaagattgctgcttgaagaccatagatagctgcaagcatgatgatggacagggtaggaatcgtttggccgtctccgatgaccaagtagagaaggtacacaatctaggaaaccccacaggcgatcaatcagtcaacgctgtcctcgacagtgcaaaatatgatcgaaagaaataaaaaagagaatacttacataagccacagtgactggagcggtgatggtagaaaccaagtcaacaaagacaacgaatcgcatggagaaacaacagaaaccgcaaagcttgtcgatgaacactaattcggccaagttgtggatggtagagttgatccatcgacgacgttgtgagatcaagaccttccactcatcaggagctacagtctgagcgtgagccggtcgaacaaaggtggttttgtaggtagggaaataggttagaagaagggtagtgaggtatcgatcctctcccaaatgcaatagatttttaaggctaattcaaatgaaccatcaagttcagcaaacaaactcaaccttttgaagagcatgtccatgagagaaagcttactgcagagtgtcaactcggttctcagagtacccactgattacttcatccgcgatgaagagtggcttgtgagagtcgggtgttctcagtcggtatatactgaaacaaccaggaagacaagtgaccgatccgaagagactttcgaacgatttggccaagtgatgagagataaagtattcgtagacctatgagaattaacgattgtgtgccttaggatcaatagaggtgtcaatgtacaggacgatgagaaatacaactgacctgcatcattgtgattaatgactgcttcgcgttggcaatagatgtctctccacagcaagcaataactttcttgtcattgaccatcctgttgtgttcatattaagcgacgcctgtcagtttattgcatctgacattcgtcggtgaccgaacagcggaacactcacgaggcaacaaggtaacttagagaatcttcatggacagtagtatcagcatcgaccgtgaagatatattcgtagaaactggggttgacaccaatgacgttcttgatctggtggtacatctcgagctccatgggattcatcggagtattatagtgaacctgatagattagataaaattaaacaacacataaacatggtttcagaaggtgaacttctctcgagatggaccgcgcagctaggagagataacttctattgaaaacaaaccttgttgaggaaatgcatgacagtcatctgagagtctcgctttcctctgttgcccggtcggtggccctctcctggtcgaccacacttgacgataacgatataggggaccacatgcccagcgcactcgtacaaacccgagtagatctttcccatattgtgctgcttctgtccttccccaagggacaggaaactcaagctctccggggtaagattcgggtcaacaccgagaatatccaagacaattcgaggagtacttcggtcattaccggctccaacaatgttaccgtcgcaaatgacggtgatgagctttcgcttgtcgtcgtacttgagctttgcgagagaatcaatagtctttttgagcgaagactcgccctccgtataacaaggcacctggcagatgataaatttgtcttgagattcggggagtcgagtcgatccaaagtaaagggctccgaggaacttgaaaccaatgatggataccatgaagattgagagtgcgagaagaatatattcagcaaacttacactgagcggattgacggttgtctaccaacccagtcaggaacctagaaacaaaagcatctgatcaattaccggccatgttatcttgtccgcaaagattaatgatgctcacaaatttctcaagcatgtaagctgacgatccaggacgtcttggccaattgtggaggcaagggcattcagactctttgtgatatcagtaccagatttctgctggaagagagagatgattttcggtgacatgaactgtgtgctcgaattagctggaacctgagtacccgaaggagttttgaagtagggcggggacttgacgtattctgagacatcatacacatggttgtcatagatagctatagcggctccactggttgctgacgacctgatcgttgaaggcaagatgccgacgaagccttttcggaaattgtatcgcatgtagaccatttgttcgtaataccaatccggtcgagaatcgttggtgaaagctcggaagtcatggtagccggaattcgtgtcttgggaactcgaactgttgagagagttaatctgaacccaaggactgacatatccatcaatcccgttgcacaaagcgctgacctgaagaatacaaaacaacaacgtcagaatttgcccatcaggtggatgagactcatattggaaagaatactaacctgaacagggaagagagaggttgcatcaatccctccgtattgaagaacagatttcgaagtgacgacagggacgatagtgagatgggtcttagcgataccagtaagctgaatgggttgaaccatgtcaatcatagcaaccaaaaatataacagaatgagaatctcaaaggataagaaagaccagatgagacaaatgacgtacatcaaagatctctcctcgaatggagacaagttcgttacttgggtcgttgtcatatgagtattgggaaagctctcccgtactgtagatatactcctttggacagatcaggtttcccaagatcgcaatcacaaagaccgcacaacccatgatgaaccagatgatgacattgatcgccaacttctctctccatgcctgtctaacatctggtcgtttaaacttcttccgggctgcaagcaagaaacttggacaccaccaggtgagcagccaaacaagggcgacccatttccgacgagcagaagaggtaccgatgacctcagtggtttcccctgcaccggccatcttcggatccatattggcctggtcgtgcaacccagttttttccatattgccaaacatgttcttggaaggggcgtatgcttccgttcccacgttggatgcgttgtcatcatactgactgttaaaacggctgggtgcataatcgtcgtaactcctcatcgtcttggaatcgtaatccatgtcaggttcatccctctgggcattggcgaccaggggtaaagcctgagaagaataattctcagcgaagttactcgtgctacctcccaggaaaggagactgcacgggtgaagagttatagaaagtgttccggtatggagaaaaggggtcttcagtaactccaccgggtaccaaacttcgactgtcggtctcgagctcttgattttgacgcttctcctcgacgtcatgaactcgaagttcgtcctccaagaggcggaatattcgaggactgacaaagatctgtcaaaggagtaaaccgagttcgcaagtccatttcgaacacatcagcagcaaacccgatactcaacagaatcgaacaaaagatgaacggacaaaccttgtactttcctacggccagatccttctctcgccactccttcctctcacgcaaactaatgactgcgtctgtagcagagtcatacccaggaattaattcctgctcgtaccgctcgcagaactctgcgtgggtcatgctgacctcaaaagagaccgatgctctcttcgcgaactctgtcaatcctacacttctcacttgagcttttaggcctctcgactcgagctggtttggtagttgaacatcgttcggggtcaaggcatatacgatccaagactttgtctcgtcgaacgtttcaaacaatacgtcgagcgtcgctttgaattccccgacaacagatcgaatttgcggagcagactgttcaccagtcttttcatcctgcacaccatcgtcatcccctgcccctaatcgggcaccgagccgacctccttttcgccgagttgagggagccctcataggcttgacgggctgttgagcggcaacgatcacctcttgatctcttgggtggacctgggtggcaatagcgttcgaagcaaacaagcctcggatgaaagtatttgaggagccagactcatcgatatcggcatcggtacttcctcttaggagcgagacgaagtccgggttgatcgcatcagcatttttctcaaggaacgactcggcagagtatgtggtcggtccattatagtggctgacgataaaagtaggaaatccggttcgatcctgtcctccagatgagaaacttgggtggttgttccatcgtttgcccattgcttcgaccatagtgtgatccgtcttcttgcccattttcttagtctggtcatccatgatgtggatcaagcctccaggtgttgtcgagagcattcggacgcattctgagttgtcgaagtactggactgaaggaatgagagaagagattccctcaacagcgtactcggcggtctgtcgctcgaacgtggattgcaagatccagttttgaagtcgctcgttcgaaaagttgacacagaactgatccaacgagttcaaccgtgctccgaagcctgagaggttttggaaaccgggtaagtcgaggatgccgataaagttggcaaaatcgtctcggcaaaggcgctcgttgatgtgttcgttgagccaagcaaagagcaaggaatagagggactttgcaaagtcgtctcggttggcagaagctccttcggcatcgaggaacacggtaactacgtctcgctggaccatcgcggtcttacagttgaagacctcttccagcgcagaagctctgactccaagaaactcggagacagtttctaaaacgtcccagtttcttactatagcagcgtctgggttcttatcgtggtctatgtagaactcgaggtttccaacatgcagaatggcagcgactaactggcagacctgggcaaccaaccgtttcgacatgccgaccagcttgaaggcctgcttcaactgctcgaaccgggtccgatcatcgttggcttcgcctcccttgagctgaacgccgaccgaaccacgagcacctagtagacggtaagcagaagcatcgggtgctagccgaaggtgttgacgttcctcgggtgtggcgccggcgatgagatagtagaagacatggaagttgcgttctccaggagaaggtccggccactcggctccgttcgaggtagtagtccaaagtctttgcgccgcacagtcgaccgcggtctgagaactgcagctcggtgtacttcccaaagcgagacgcattggcgttatgaagagttctggcgtttccgaaagattcaagaacgaactgatgacagtgttcgcaagttgttagttaccaaacctgaatgattcaaagtgccagagtgcatggcaaggaccaacctctgcatttgggatttgctgcattagctttgcccccttctttccagggccggtgaccgagaggtcaataaatgatcggatgagaagccttcggagttccgacttgccacttccagtctcgccactgaaggagaaatatcacacaacggttttttccataaacaagatgtcgatacacgtgtgatgaacatgtcaagggaaaacatgatagcctacctcatcaaaatactctggtctcggccagtccttctcatgtcaaaataggcctttccagcaaggccaaagatatgaggaggtaagatgtcccgcatttcctgcgtgttccgataatccttgctgtaggacgctagtgtttggtccgaattggcattgatgaatttgtgagggttgattgccaccaaggcagaaggcccgagggaagtgtatataagatcaagtaggtatcgatcacgaaggcaggcctgtttgatggataatgatgttacacaagatatgaagtcagttattgtgatttgataccttcactgtcttgtcaaggcgaacgaccagaaatgtatcgtagtcaaaggacttggttttttcttctttgtctcgagctgtctgctaagtgccaggtatagatactgagatgctaggtacggttgctgttcactcaccacgatcgattcttccgagatcgagacgagctctgtgagatcgtctgtttgttcgtgtctccttgtgggccctctgctaggcacgacttgttgacgggcggccatgtttgaagatatcagtcttcgttaagaagatgtgcgggagattgcaaagggggtgaaaagaggtgcgagctagaacgagaacaaggtatcagggttcgagcgatgagataaacgctaaggacgttgtcgagaggaatcggacggcttgcgagaatcttcagtgtttgccgatcaatgcaagtgagaggtaagatggtaatagagagaaaagaagaagctaggagagtgacctgaaaagtccaaagagtcgacaaaggggaaagtgagagtgaagaaagccccgttggcaggggtggtcgagcgggcgatcgtccttttaaaaacagtggtgaaccagagttctgtgtgaaagagacagagaaacaaacagataccaagggaacagttcagtttggaggttcctactgataggatcaaagatgttccaactcacattcaccttgtggagaaggcaacgaaagggaaaagacaggcctgggcgagcttgcaaacgaaggaacacacaaagaatacacctacatacacactggtgttttgatgcacgttgtattaggtaattgtaaccctaacaaatgataccgagccttggtcagtcatctggtagtcaccattgtaggagacctacgtcgttgaggggaaaagaaataaagacattctataggtgactattgagtatgacggcctgacgatgtttcgagtagtcttgttgaaaaattcaacctcgttcatagtagagttcatcgtggagtcggactaagtcgatggagagtagttcaagatatatttccttctctagagcgcatatagaaagaacaagaagagggcttgcaaatatctctccttacccctttactaaatgagaagaaatactcggggatatggatatgcagctggttagcccaacttatttaccagctattatcttgacagcgccgataggtatagagatcgactataccagatattctcaatagacttttaattctttcggagaagttcaggcagctaactctgctgcagaatcgagaatcgctctttccgcatcaagtaagaccagatgttcgatgcatgttcccacgggcacaacattttattctgtatgtctttcgattcacattgatgtttgtgtctttcgtccgtctcaattctatcagaactgcaagcgcagaggattctgctaacttgaacataactgacaagacagcggtatcgaatatgccagcagtagctatcacattcagcgcaacgatggctggaatgatgatcctcggttaagagttctgctatcatttccttgtttcctttttcttccttctttccatctttatctcgtttcctctcttgcccccatcatcggcgatgttcgtttcagagttatatgtacaccctacctcccactcacatctgtcgctcagctatgagcatgatcatatactatctttcgattcactctttgcctttttcagtgattgaatcgttaagaaggaaacaattcagaatatactccaagtttccaccaaatccgctgatccaagcgcaagtgttctcaagattcaagaataatctttcggaaattgacatgtgggctcctatatctacttgtagattaaaaaaagattcgaaagctctctctctataatcgaccatgttggcatacacagataacgatgccaaggaactccgatgagttcaagcatggaacctgcccaggcgatatagatcgggaatttgacttccttgcttagtatcgaaccgttccagtcgacgtgcttgctcagagagatggtcggaggacaacgaaggaaacacctgtagaaagcagacatacaacccatacgccatctcagaggaaggaaaaatcaagaatacgtcctttgtaggattgacgcgcacctgataaactcgagtcccaattccgatctgcatcaaagttggatggcattcagccaaggtatgtagatctcttatacttggttcccagccatattcatccggcggaggtgccaagatttgcaatgctctcaaacgtttcattcgtcccatacaaatacctaatctgttgagatctttcggggtccgtatgcgtaggaacaattgttcaagattaggagatgaatgctgttcaaaagactcccacaaaaccttcgacgagagtgacaagagagagagatttgggaacaatacgtttggtagagcgaacgagatgggcgatcggcctgtaggggatgttagatgaagtgtctcaagggtgttgtgaaatgcaataaggatatcgtctaggcaaacggcatgaccacttgggtaggtataagaaagatatttgaggctgggtgccagtgctgggaggtcaagagtgagaatgtcgacattctcgacagattcaagcccgagatgtgtgattgatcccgaggtagagcggagaatagatcggacgccctcagagctgattcttatgcaagcggtcaggctaagctcgttcaggttggataaatatggcgcccatgatttcagatgatggtctcttatcagaggtgatgactaggtacaaatagaggtcgttcaataagtatcagtagtatgaaacagaggacaagatgcatggaccaaagagagaaacaactctactttgcagatgatcgacaacctcttcagcccaagttttgtcttcctttctgcatcctgattctggtccaatactctgaaccactctttcaacacatcgaccatccccttatccggcatgatcaatcctaacttttccagcctggaaactctaagccaacaagtcgggtcatacacatctaaagtagacccgttgatctctagatctctcagaaaaggcatcgaggttgagatggcgagaattagtccttcggagagcgacctatgcctggtccacgcgagtgatgacagattgggaagggacaggaaagataggagtgtgtgagaagtgattatgtccgaccgatcgattcctggaagtggatacgaacgaatctcttcataagatatgcacatacgccacatagagtcagtctgtcgactcttgagactcctaaaggattatgatgagaatgaagtcacctagccgcttcacgagctgtccgagctccgagctctgagctaacgtccggaagagcaaagggagctgacaaacctcatcagagaggcatcagtgaaagcggtcaccttgtcagactcactctcttctctagtatgtagatgatttagattatgaaggaaaccacacccttgcatctggctctctctcccatggtctaacccagacatgtgaatagagcacctcattcgcatatttcctccacgacctggaaacgagcgatagtacccgaaggtcatttggcgctgtcgtataggatacaatcagtgggtagagctcttctggaaagttggctgacatgtcgatggtatcaatagcggctgatgatgaagatgaaggttttgagtcagtgttaacagggatttgaaactgaatgatctccgactcggtctaagccgaagttgccgtcatcgagcagttataactgggttttcaatatctcaacactcaacattcgtgacatcaatctttccgttgacgaagacgagaaagagaactatataaagtacaacatatataacatctagatatcaagaagagagtttcccaagaagaacatttgattccctatagagtcctgaaactggccgcagctctatcatcgctgagcgctcgattatattctaacaacaacaatagcagctatgacgaacgaatcctgatatcagtcatgattgcttcccagattgatatgaaaggaacatctgttgacaagaaagagaaaagaagagacaacatacatatgcttgcatatctttccaaccccacctcgagatcgcaaattctctgccgttatgggcaatctcctccgccaaatcgaattggccttctgaccccgagactccttcgaagaatgatgttatgtcactatatatgtaaacatgcgcatgcctccgaacatcagtggtaatgctagcgcgaactgtcaaggtgtaagatgaagacatacaagagatcagagtaggagacttgaacgggcacgtagtggtaccaggggatgatggtatcactgtttggaagcatcggcgcgttttcaccgatcgcaagattagccagcaattcaaatggcggactttgccaaggacaaatagaaatatcagaaggacactagactgacgagaaccattcgttgaagacggtactcttgaataccgcactgcccgaggtgagtaaccttcggaatcgggtggatgccccgtctccgtcgacatcgagttggtatctgaattttgacgctttgagcggttcgatcttgctcctaaagttgaacatgttcgacatctccgcacactgtatcacaagatcatccaaccacgaagagaagaagaacacaaagccgatgatgaagtataagcatatcagctatggggaatgtgaaaaagattaaatataaagcaaagaaaacgtgctgtgccgtctgcttcgacgcatcttgttggactgcctacaaaaccgagatccaaccaatcctccatgagctctctcttggtcttttctttgagcactcttccccctctgacgaccaaaacctcttccatctctccatcatcttcgtcttcgtcttcattgtctttggcctcagagtcctctttcggcctcccattttgttcgtcccctcctgactcatctccaacgtccttctttgctttctgacctccgaagaatacaagccgctctcgctgactctttctccaatcgacaaaaccatcatgccagatccctgtcgttgcccctcgccagatgactcgtttgtcggtctttttgaggaacgtcgtatggggtagcgtcgcattcaaacttgaaagcggaataccaagtaaggtaggtgagagcgcagcactgtagggtgagataacaggagtaaataacggcaagtttgacgaaggcggtggagggaggtagtgaccgtgaagttgaaagagtgaaggatgtgtacaaggcgatctggtctgggattcgtcatagatgaatgatctgagcgttggcgattcttcggcctgagtggtcttgcagagatctgaccagtgagtcttcttcgatgtttcaggttgaagcaccttgtcaagctcggattttttccatgtcttgcctgcccttcccaaagcctttgctttctccaagacgctctcggaaattgccagggtgggttgatcgagtaggttgaagtaaaggtcgaggtcgggcagtagatgggcgataggttgaagaagaagagagagtgaacttgaagttccaacaagaggaaatatatgaatggattagcatcgttacagcttcgttagataaagatggccgaaaactcacgaagacttcttctgatgttctttcacagagctgacttcctcggagatagcgccttttctgaagaacagattgagccatcccaagccatacgatataagttatatgctgactgatctcaaagctgaccagagaccaagacttaccgaatctggaatgtggagattccaagcatgcctttaagagccttcacattctctcttaacgtctttccttctacgctcaagaagggaagcacagaattataggctgtcgagtgtggccaaggcttgaggtcatactcgatgcaaaattcgaacctagagagcgcagagacagaggcggtaaagtcaagaacccgatctataagtcaaagctgttctgtcgtgcgacgacacatatgtgccctcactgaccaggcttcaaaccctttaggtggtaatgctcctccgttgagctcagaatacagttctatagctccggctagcgtcgtcggtatcttggactgctgaatctttgcctgctcttttgcctcctgaatggcaccaggcgcgttgtataggcagagcgcggagaagtcagtcatcgagaagatctatgccagcctctatgactctcaatcatgaataagacagtaacacatacagagatgagaacctctatcgggtggatcccgtcttttaaatctttgtcggccacgtataaaatgccattctctcgtttgtatgaagggatcgaaagagcatccagtgggcgtttctggaccggcttgacaacgataggggctgaagatgcggattctttggtagacacatcaagatggaggtgaggaatatgctgtgagggttcagttgtggaaggaaagagcaggaaatcagatctggtgtacagccggatcatcggataaacgttaaaaagagtctagagaacatgatcaagaaccgtacgagagcttcttctacttcttccagaaggatgtctgatcgttcgttatatggaaaccaagagaacgtcagataccagaccagaccaaccagatagcagaagagaaccgagaacactgaccagatcttctattgagaggaaggatgaggagctgtattgagtgtcaaacaaggatcatgattagcatcaaaacgagctttaccaggtcggcgggctcggcagagacgtaaggcttcgaactgaccaaaaagaaaagcataaagggcagcataagagttgcaaacctcctaggcagcctcggtctcaacagaagcatgtctacagtatgctcagaggcaagcgaagatggaaaaaaagaagaagaaaagaatacggtggatacgaaagcacccagaatcaacaacggggtagaaacactcgggtcgaacgttgtgaagaaaccaaggcaatagcgcgggtctttaattacgtaatcaaaatgcacgtgtcgcctaactggagtccggccggcctgggcctctatgacgacataggtgagttgcaactgatgatgcttactcttattattagcctggagctcgtccttttctctttggtcggacgaaagaacttacgaaagagaagcatacgaatacatccttcttctttctgattgactttatccaactctattctatcgtttactatcaaattcatctcttgaatctttcggatatatcctcaagtcgtcacagtcaagcgtcaaaatctatcatgtcgaacgagacctatattgccactaccgtcaccacagaatcggccgtgcttccggccaaggacatcgtctatcaaccaccagcatctgcgcccgtcatctcgtacgacactccaaccccgactagagagctcgctgaccctcatgaaaccttggtagcgacgtctgcgaattctctatccgagcactctgctgaacatccagaaggtcatgagctcaacagagtcctcagtgcctcaagtgatatcagcttgacgtccatcgcgagcgacatcaaaccaaagagggacaaagagtggaggagcacatttgatcttctggatgacgaagagctgcttgacagtaagaatccgtttccactctatacttgcaaacatttcttctctttctgcattcggccagagcgctaaacactgttcgcatgtgtctgttcgttaaatatcctttctgttccctataaagctcatggatgtgccatcagtaaagatatcttgtaggttgctagagctgcgcgtgtttagccaagaacaggaaaaaaaaatctcatcatctgttcatctctctgtttgtttcgtctctccgtctaccatcaggattcatgggcggatatatatctcgtcccggtcggtcgccttcaagagcaacatcttagggtttaagaccaaagtatgtgcgataatctacttgtgttctttgtcggttgctgatcttttacggtgccgtcggtcttgcgttcggactcaattaggttcacttcccattaacatcagtcacagaggtgtctcccaaaatgaccgccttgatcattcccaacgcgatagagatcgttcatgacggagagactgtgagtgattctgattcgtcatgtattgccactcctcatccgtgttctctaatcagatgtgctaacgagctggtgtttctctgtatctgggtacaaatcagacggtcttctctacccttcccactcgagacagcaccctcgaaattctgactacagcatggaagactcaagctccagaggcgtttgcggcgtttgccgctaggaatcctgaagtagagacccgggatcgatcatcttctatctcatctgtgaactcgacaggctctggtagctcgaaagcgccttcttttgcgaccgctcctgcaggaaccaccttcgctcggcccgctcctggttcatccaacaacaacccagcccaggcctatgccgatgaaatgaacactcggacgcccaccaatggctctgacgtccaggccggcggaaagccaaagaccaaatctggagaaatcgtgccaggtcagatgcacgctgccacccaacctggaagaccgcacatggaggaagatgcgttggacgtcaggtttgcgaccactccccagaagatttgggatttgctatacaaatctgaagagtttactcgaaaggtctgggaaggtttgggattcacaggtgtgtctcgtctttattcgtcactttccagttttatactatgcattactcatctcgatgatacggcgtttgacaactacagacatcaagattgctccttgggtgaacaataagagagactactcttacgttaaacccctgtcaggcaagatcggaccttcgagtgtgatctgctatttttctgatgagatcgttcgtaactcgtctgactttctatccgaaagctagttgatttgttctgacctcttttgtcgctcaatacatttgttttgtccttctattgctacggtttgaatgacttatcacacacccagatcaatgaggatgctgattcgtggtacggaatcaccacgatcactcggacgcctgatattccttctggcaagaggtgcgaatttgattgtcttccttgtcttagcgcatcgatgacaagatcactgacgatcgaactggctcgatattgacagctttgaggtccactcattgactacgttggcctgggagggacctcccaagggtgggtgccggatgaaggcgtcatcccgagttgaatggtccggaagaagcatgatcaaatgtacgtctgcctatcttatatttgttgatatctgatatctgatatcttgaactggtatccgcgatttcttccgaatgacatatgtagctatcatcaactcttcctctatcgagggtcaaacgacttataacaaaactctagccgatgcgacgaaggatgcaattaagaaagatcctgcacagtttggactcggttctggtcaaggagatgatgacgacgacgatatgtctatcaaaactgctcctgccaagacctctgccgctgtccctaccgccactcccaaccgagacgttggcaagcctgctcactccccggctgttggttcttcctctgcgtccaaaaaatcagaatcgtttgcggctgaccagctgaattctatgctggaggatcctgtcaaattggctctcgccgtgctccttgtgttttctctcctgttcaacctgtactatctgttttctagaggtcgggccggtccgagggtagcttcaaccgtgcccttggcgaccgccgggttcaaggtgtctccaaacgcgttcggtagtttggaaagattgcagaaggtcgagcacgagttgaccaccatcaaagcctcattggagaaggcaggagtgtccatctttacggcaaaatctcaggaataaataaagagaaaaaaaaagcagaagaagcgttctgtgttgtacttttcgtttatggaaacgactctcctagtcttttcggagtttctcccttcctctggatccacccatctgttccatacttgtcctctcctttctccttttccttttctttagtccatgtccctctgtgtattttcttctctctcactctagttcgtcaaacacggatcaaatgactagctaacaaaaccgaccagtctcttctgttcaatttttcaaatgtatatttgttaccttgagaacgtcttaagaatcgatctgattgacgtagccttactcgatacacaccgatcatcggggtgtcaaccgatagacagggtattgctctttcatgattctagccgctgagagaatcaggggatgagagacatacgtaaaacgaatgtgaatctaagccctgatctatcaagataaccctatcacaaccccaactcggtagtcattcggaagtatatgcgtgcgaatgatcccagaaacgcttccccatctcaagactacacttgtgtcttttttcctttcttgtttctttcttctttctttctttctgtctgtacctttccagtccggtccttttccatcttgtaacgatactggcttgtttcatcgagttttagttctaaagagacaagactcatgcactccaagggcaaagaaggaaggcgaagatgatcggttatggcagattgtttatcattgattatctcgtttctttttttggggaggacaggaagagagagattatataacctgaaggatgagttttaccaaaaaaaaaaaaaagtgaaagaaaatgatatcaatcagtccaacagctcttgtctgaccctcctttatgcgctcgtctcctgttgggcatgaaagagaatctcatgcgcgaaaagacaacaggatagaag

SEQ ID NO: 1520 - DNA, 49220 bp, Xanthophyllomyces dendrorhous
cacatgcgttatcgtcgaatcggatggatcgaccatctggacgctggatcggttttcgggttctaaatcgtggtcatcgtcgtgcaagaacaatcgagatttgatgatattttgtacgagcagaggtagatgagattccaaaggcaaacgtgaaacgcaatcagcaagtcgaatagagaatgaaaaaaaggagactcgactcctcccaagacaagttcgaacaagagacgaaaacaggggacagaccggacgatgacagctcgcttaacatctcctcttcgaaccttctgagtctgggcgttgacgacgtgggcaggagaatcctttggcaacactgctatcggctttgctcgctcgaccacgacggtaacctcgtcacctgattgtagtaaaagagtatgagcgactgaggtcatctttgaagagagaaaaggagagatagaggcagaggtagataggaatggaccgtatcttcaaaaggaaagtgtatctgaaagaaaagagactcaccgattttgccaagagcctttgcgggtcgacccataacatcgatgattgtcgcgatgagtgctcccgagttgtcagcaacctggaaggaaagaagagaaggcgtttaccaagatacaatgaggattaaacagatacttgtgcaacccacccgaatcagaaaagacatcccgacttaccacacattttgcacggagtcctaacatattcaataaacgataagtgaggtactgtaaaatggaacaaagtgaaggaaggaagtaagtaaggaaataaggaccggcgagttcacagtccacagagagcgagtgtgtgtaaacgtaaccacaggcaccaggtacggttacgaccccctgatcgtcaccacggtccgagcggcaagtaaaatgatcgagagcggcagctgcgcgaatatgcgggattccccacattaaaaaaatgatgaccgcacccgcggccagccgcctactcccatttttttttcctcctttctctttccttcccctcttttcttactcgttccgttctgatctttttctctttattttggagccttcaaacggattctttctcttctctgctcctcttaccatcacacacaattaacctcctgctcacatactcaaacacttacttacacactcactcactcgttgatcatgtctggagctactactccccataggcctaccgagcctgcccacgatggacagcaggctctctacactagggtacgtgtttcgtcattgtaatctctcttcattgagttgtcgctcgtccatttttttcttcttgtcttttccttttctgtccatgaaacctgtagtcttcgtttgcacaacgctactctacagcgaccatctcttccgtatatctttgccgttcaacattgttgtgatgtacatgtgcttatcattgcttccatctcgtctgtgaacgctccaccatcacatactcttcttcatctcacgtgattgattaattcgatacccggtatccaccaactttcctcggcactcaaattcttctcatcacaccctcaacgacccatgctgcctcttatttattgcacgtaacccgtactatatattcattcggaccggcttgtcatcacctctcatcctgaacttgaatctacaaagagcaacaacggatccgctcttcctcacttgagccaggagagcatcgatgctcacctccgaaaggtcagtaacactttcgttcattggttctatctattctgctgtcacctgtgctcttcagtcgacccatccagtcttggcaccagacatctgacgtagatccaaactatatgtctgtttcaaacggcttcagtatgaggctctcttcaccgtcaagcccaacaggatgaagacgattgtgggaggtctcttggagactttcgccaagggattgggcaagaacggaaacaccgtcgtacgtatccagctcattcttgccttgtcaaagttgaaagctagagttatactgaatatgtctctttatcaatttggaactttcttagcctatgtgtatgtatatactacctctttgacttcagaagaatgaccattaaccttgttcaattcatcttatcctgatgccctacagtacccgcttacgtcttcggagtacgtctcttgacctcactcttgatccatcaggtttgaaattacagaacactgatctttggttgccggcatctctctagtaccccaccggaaaggagattggcgactacattgccgtcgacctcggaggaaccaaccttcgagtgtgcttcgttactctccagggagagggcaaattcgagatcacccagaccaagtaccgattgacggaggagcagaagcaggaggatggaacgaagctgtacgtgctctttactgcccctagtaccacttcaaggacaaagctcatgaccttcgcgcgcgactcggtaatctaaatagattcgacttctgcgctcaatgcgtcaaggctttcctccgagataacctcggcgtcgaggagggacagagtacagatctcgttttgggtttcactttctcttacccgtgtctccagaacaagattgaccacggagagctcattagatggaccaagggtttcggtgcacctaacactgaaggtcaggattgcgcccgaatgttcagagagtccctcgagcgagagagggttcctatccgacttgccgcccttatcaacgataccactggtgccctgatcgcttccaactacgtcgaccccaacactaaaatcgcctgcatcttcggaaccggttgcaacgccgcctatatggagactgtcgagaacatcccgaagatcaaggatctcggcttgcctgacggtcaggagatggccatcaactgcgagtggggagctttcgatagtttcgaccacacctacttgcgtacgtgtcttggcgctctctcctttttcttttttcttttttctttttataatcagattgtgtctcggaacgtatactcaaaagcgtctattttctgaattttgccggttcattagctcgaaccaagtacgacgtgatcatcgacgagtcttccaacaagcctggagagcaggtaaatctcatttcctgttttgggcaacgaaaagttttgtgaggctgatcaaaacgtttcccgcactcgaacatccttatagtctttcgagaagatgatcgctggtctctaccttggagaggtcttccgattggtcatttgcgagctcattgacgagggagaccttttcttgggacaaatcacctacaagatcgagaagccctacgctttcgatactgcattcctctcgcttatcgaggcgtacgttctcatcattataatcctgtttctagcttttaagattccgactaacctcgagcattcttgttctctatacttcctttctgctttgaaatcaaaagtgatatcacggacgagggccttatgaccatcggtatcttctctcacttcttcggattggagaccacccaggaggagcgagtgttcttcaagaagctcgctgagctcatcggaactcgagccgccagattgtctgcctgtggaatcgccgctttggttacccagaagggttaccaggagactggatgcaccgtcggtgctgatggttcattgtacaacaagtatcccaagtttgccgatcgaatccactcggcattggtagacgtgtttggagagaagggaaagtgagacctcattttcttttctttggtttccgtttcgctctttgggttaggtctggctgaagatactgatcatattttgtttgatttatgaacctttcttcaatctcaaagaaacatcatcacccgacatgccgaggacggaagtggagttggttcgtcgatcatcgcggccatgacaaagatccgaaaggacaacaaatgtaagcaccgattctctctgtatcgctactccttttcctagccaggtatagaaagctcacttgacctttacctattcttccttacagtctacgagcacctctagatttcgtgtttataaatatctctttcttatatacatttccggtcatctcttgtagcgcatttctttctttttttgttttgtttaatgtaaagatgccatggatccaacaagataatcttgtcaatacaacgctcgaagattgtctggagactcaaaagttttttttgttttttttgtttttttgttttgtttttttgttttgttttgttttgttttgggaaacaaaatattactatccgagttactaaatctatctttgggggaaataagattacaagatccgaggggcgcttgagtagaagtgaacaagagggagattgattagatggcgccaaccaggtttatacaggcaattttgagttgagatttcgattttacttctttatcttataacccaccgcgaatgagtcatctctgccacatacacttccccaactctattgacctacaaagtggtctggacactgacgctcgatagctttgtgtgtatgtatgagtaggtgtaatggaacaagtcaataagtggggttggagacatagttctgttttctcgtatagaccgaagaagcaaggccagcagacctatcagatttatctgtcgttatcagaatctcccgtagcctccgttcggactcttcggatttcggactttcggcctcgaaccatcaaccggcgctaaagtcatctatatcccgtcttctcgttcttcttctcgaacacttccattgtatcttttcttcttttatataacttcttgtacttgaaaccttcgttctcttgttgatagtagacacacacccgtatatatatcggagagagaggaatacagataccaaaaagaagaccactctcttacaatgttacccccatccgcatcggagggaccctctccgaattcgccttcaactccaccagcttcgacctcgaatccaacactagctttcaacccactttcatccccaaacccatatcttcaagagcctcaaccgacacctgaggatcaacaggatcatcatgctcatttctcaaacacattggtctcggtaccgccttcacctgtgctaagccaggtgacgatatctacaactgccgaccacgtgaccacgccttccccaacgctggtcaatgtggatattgagcatgtggcggtggataatgaccctagattatggagtccgctaaagaagaatatagtacttgccatggtatctattggatcaattcccgtaacattgggtgccgtacgtcctttgccctttctttcttggtttatactctttcttctcggtcattctctttttactcgatcagtacttctggaatgttgtattgatctggaagatacctatctattctctgctggaatccaggcgatctacaatccggctttcgatgaattaaggagtcaattaaacgcaacagataacgaactttcgctttctgttagtttgttcatccttttccaagggtgttgtccgtgagtatataaaaactctttcctttttccatgcgcgcgagaaggcgcattgacaagagaatcacactccgatctcgattttccgttcgggcggtctagtgtattctggtcctcgatagcagaggtcaaaggacgaaaatcagtgtatttgatttcatatgtagtatgtaccccttgtctcattttgttgaccgcataatcttctctcgctcaacgactttgatgatgtgttgtagattttcctcatcggatctgtggtgtcgtcgagggcgaacacgatgactttgctcatcgtgatgaggtaagtttccgttaatgcaactcatattgtctttgagttgggctcacacatcgttggctttgctgtatttagaatggtacaaggtatgcctttctttcaatagatagttgacgatgtgtacgatctcacatatgttgtcatattctcttcttattcatcgttacagcctttggttcttctgccgtcctttcgatcggagcgggaactctagcgtcagtcttctcattctttcttccctagcctcctcgtgtggattcaacaggatgaagatgttgactgtctcgctgtgtcctatcctcaacttgtagtgatatgtttgagccggaagtccgaggatccaagatgggcctttactatggaacaccattactgggtaccagtatgggacctattggtgcgtactggtctttggtattcgtttgtttatttatttagatttcgacgtctttggctaaccaaacgttccaccggatcgcaacctctggcggctcttagtcggaggtgctttaactcaggcgtttggctggagatccacattctacttcatctccgcgttcggtgctgttgctcttgttcgttgacatttcttcgttccattgagacgttgatccggttcattcactgagtcaagctttacgtacccttgtcatcgttcacagttcgccttctgtttcttcccagattcatggcggaaggaacgatcgctggcgtaccaagcggcactcaagaaatcgattgctgattcgcttgtacacgccgaaaagaaacgcaaacgaaaattggccaaaggtttacgaagtacggacgcaacgcctgctccgactcgacccggttcaccgacgaacccggatcctgagaaacttgaacttgcgctcgagagtgaacagatcaatggcaagaagaaaggagggaggagaagatggtggttatttggagagagaacgggtgataaggtagcagatggaacggtcaagattggattgagagacgtcaacccattgttgcctgcgttagcgattctgaaatgcccgtcgaatctattgaccgtcatttcttctggtaggtttcagttcttgatttcctctgtatttgttaccatgattgatctactcttggatctatttctgaattttcaatcttgtcaggtatcatcttcgcggcccagtactccatctcgtaagtcgttgcgttaactctgtatgaggtcagaatgaatcaatgtctgatcacctagttcgaggctcgatctcacccccgttcctcctgcaacagtttcacggcagccgtcacgttcgccgaatcaccttacaactacaatgctctgaagattggtctcgtccttgttgccttcggtacgtttgatatatgcgttcgactctcgtgaataatatcgttgacaaagatctccttctcttactgcatataggtggtggtaacatcattggatccgtcgcgggcggtcgatactccgattacgttcttgctcgtttgatgaagaaaaacggaggtgtgcgtgaaccagaggtttgtccattctccttcctcacgtggatctcacactgtcgtacatttctcaacttctcagcggttctttcctttcttacattgcctgatggggccttctttctccagatgaggttaaaatcagttttcgttgcgatgccaatcatggttctttcattcctgggctatggttggaccgccaacgagaaggtgaatctttcgaactcaccgttctcggtttcatccatacttacatgtgttgcctatttttgacttctgggggcatatctgcagacgaacgtcgccggaccggttgtgtttttggtcaccggtgggatttctgtgatggtgatttacgccaggtgcgtcaaatcattggctcttgccctatcatattctctatacacagggtttctgacaaattgggtggttctttctcgtttaagcgttcttgcattcttggtcgactctaaccctggaagatcatcaagcgctgtagcgtcaaactcgttctgtcgaggtcggttgctatcaaactttcttgtcatatcaatcgtcttgcttttctgtattcggagctgatctatcattgggtatttcttgtttcatttgttaattcgttcttcgctcccccttaacgcaacttggttcgatgagcaggtcttttcgcatttgccttctctcaatcctcactccctattaggaatggaatcggcgatggtggactttactcgtgagtcttgagtttccttttgcgtactatcgcatgcacatgcgtttgtttatgtactggatagatggatggatggatggttgagaagatatagatacctacggtcatgttcaggtcttaaagaagccaaataaactgacgttgaattgtttgtctttgcgactgtttatctccttactcggtacgtcggtgattacgtatgtatccccgtcatgtctgacttggtaggttattctctggcatgttgctgttgacatgcgtggcttttgttgtcctgacgtataaggcgagtatctcttcatttttcataaaatcaatacgtgttggatcgggactgatccggaatgtgtttttgcccatcggggttctttacatgttgctcttcattgtcttacttcaaaaaaatccaatagggaaaacaatggcgagaacccgatcactcttttggttacaaacgacgacatcgtcatgacctcgaagcccaggctcagaatcagactcaaactaaagatcaggagatcaatccatcagatctcaaagatgttcaacctgtagtgccttaaacggggaatggtctccattattttatttacttccttgtccttcagatagatggtcttctgtttccctaattcaaattatatatgtctttttcaaagagtacggctaagaaagcgcacataggttgacgataggatacgacctagatgggccggaagtcaggagaggggttccaagggtttgtccgtcgagatgcttcttcgttttattattattattattaattatctttatttttatttttctctaccacgttatttatcatcctttctcgtattgtaaatatatataacgaatatcgctcaaacaattgttaatttgttttcaaagaccaactaaagttctgcatgtcttgagagatcttttagctcagaaggcttacgtacgtctgggaacgcgcgtttgccttctttgctttctctatttctctaatctcttcgttcgggatcatttattttctcatggatttcgccgtcaagcctcttgcctctctcccctactcaccaccaaacttgtcttcttgtgatgatcccctcttttatgttgttgctttttattttgtttcactcttctctacgcgctctaacgtgtcttgttgaacgtgccatcgcatacatcttcagaggctaaatccgtgttcttgaagacacgaagaccaatagaaaatggggcgggtgcagtatccatgacgcatgggagaagaagagaaaatagaacgaatgggaaagaggaagagagggggggggaatgtgaataaatacgcgggtttcccgttgatggatcgcccaatgcaaagtgccgggtgaatttcgagtcgggaagtacttttcttcgtcaaacatttttgggatcgaaatagaaaaaacacgtgagccctgtcgcgtcgctacgcatgacttggccccggatttagaaacaccattcaaccaaagctctaatgaaaataaatccgtctcggattcaattaataggattctgcttcctttgtgaatctcctatagtcaacggaccagaccaccattaaaggacgaaaaaagctgagagctttctattcccttacaaagcttgctcactttagttcctagttctcttccgacccttttcaagccccgtttttatctttcggattctttcatcttttcttctacgttcatggaacacttaggaggaaaggcaaaataggttgattcgacattcctacgtcaaccatcctacacgatccgaatccttttctttctccctcaatcggtttctttgctctgcttggcgctctcatttgttgtattcgtttcattacatatttaggccatgatcgatcacgagaatgaaagaatcgagagaggagaaaataaggagtaaagaaaaacaatagcaaatgttcagacccaagacggcacggaggaagagagagccgggtctctgacgggcaagaagaaagagtttttcctcttatgcatagaggaacacgccacgttatcggctgcgcttactgtccccggacgcaccagaacgactcctatgatgtaagtgcgcaggctgagccagtgggaaagggaaggcgattaggcgaaggcccaaacaaatgacagcgctggctcgatcgatcgggtgtcggctcggatcggagcaactgaggtcatctcgagccagggtctcgacctgctgatcgtcgggctatccacttctaaaactcgaaagtctatccccgggcctaaggcgaggcggggcgacgcgagcgtcagataatcgtcgacttgaccctgacgatccttcttgccattgcgtcagaggaatgtgggttcgtcctttttaatgttcatatgtgatcgtcactgtttttctgttttccccattccttcattctctcctctcctctccttcccctgtgtccgccttctctatctcctcctcttcttttcctaaccgttctgtactcacccgatcttcgggactctattttcttgtttctgttatatctcacgatgagttgttgacttttgaatgatcatcctgaagaagaactttatgcgcaaatgtggcaagaatggaaattagattccatagagatagaacgacagatttaaaggtataaaatattcgagaggtaaagagaaacaactttgaaaaaaagaagaaaagaaaaaaagaagaaaaagacaaaatagagagggattattaaaaatcacccgtcctatttttttctctggatcttcttcacacctttaaatggaagaagcctagacatcaaccgaatggtatcttcttcttcctcttcttcctcttcgttctgctttccttcttctgttcattcatccattcgcacatcgtgatattcttctctctgaattgattcattccgtttttcacgcctggagagacaaacgtttagcctcattttatccacataacatatacattcttgtgtctccctctctctctctctctcttccttctctcaatcacctcctggcccgttatgcagcccgtcagcctaccaccgatttcatccttcgacttcacagacagttgtccttcaccgtcctctctccttcctgcgctcgcctcgtcatccctgggccctggaccaaacccttccctccgtcggacggcttcaactcactctgggcaagacaggtcgacgtcccatgaccggacgcatttctcgccctccttgtccaacaggtacgtcacacacgtaatcagtttctctcaaatctcccggaatacacaacagcttacatcttgtttcttctgcttcttcttcttctgtttccatgtatcctcctcttccttgctcacagccgccggttatatgccagtgaagcctacgtcccgacgctcggcaccctttatgctcacgaccaaccgaaaccgctcggactacacgaaagctggccgtccagtcagtcacaaccaggacaaatctattcaaatcactcccatcaacggccagcctatatgtccagtccatcctatccatcggtcgatctaagcagacacgaacctgcccagtcttcccctcattctatccagaatctcttaaacgaaacaccggcgtcgacctctgcctccaaacactctgtccatctttcggtccactcacatccatacagacgtcaggcgtctcctcaaagatcaatcgccagtcctttatatccgacgtttgaatccatacagagcccacctaacttttccctaccccgactacctaactcctcgcctcgttctgcttccaatcatgacctttcaatctcctcagctggcgttatcccggaccgaaaccggacggagtctcctcctagcacatcatcagaggagttcacaccgcacttgagggcacctatcaaccgagccaccaaggcatgcaactcttgcagaactagaaagaccaggtgtctcgtccctgtagacgggccggaaggcgaaacaaagacgacctgtgtgaggtgcaaggaggcaaagatcgagtgcatttggtctggaggcgcaaagaaacgtggaccagttgcagggtaagtctcttgccttccatctactcttgacatgtctcatccatccggctgattcttatgccttccaaaaacgtgctcattctggttcctttcttctctttcttttcctctcgcttttgcttcggctttgaatccccctccctttttcagttctagttcaaaatatggtctcggaaaactaaaggccaaactcaagcgcccgtcgcccgagcttaggcagcactcctcaccgaacctgtctgatttgactgctggagaacccgtttcccctggtcacgcagcccagtctgtctcaccatactctgacaaatacactcttcctttcttaactccttcccagtcggaacgacaaaactggccgcctgtccagtcgcaggcagcatttgcgtcctccgcctcgtcctcactctctacttcttcctcgtcttcgtcatccttcctgttgacccctcgatcgccgttctctatggagtctcttcctcccctggatttctctcgaccacaagctagagatggaagcggcagtagtggctccggcagcgacggctctttcaaaccttattccccaaactcgggatacccaagaacgaatccgttctttccgtcttattcgaaagtaccggctcatccttccttgatttcacattccatcaacgtcagtcctggccgatattctggcgaacgagacggggtccgccacctctattgagggtgtattcaaatgagggcgtagagatggaacggtagatcatggcccagagatcaaggaccactccctgcttctttctcttcttatcttttcgcttagcatagatcctcacgttttcttttgtttctcctacacaaacttggtacatccctcacttttcgtgcctccactcccaagtttgtttatatgtttctgtcttgtttcgtttctaagttatctttcctaaaatgatgtatacctcaagatcttcgtcgctctgttgtatcagtttctcccaaaccgtcgtgtcaacctctctttgcttcccttatacctccgtcccgttctctctcttctctttccctttcctttcttgtttatttctgtatctcataccacacaaacgaatcatcgaggaaacaatacttcgagaaggacattttcagcttctgtacatgattgagctgatcattcatatcgaatacttttggtcctttctttcgtcacgaagcattgtcaaataacggaaagaaaggttgtaatctttaaacccgctgtccggttcgtcggtctaaatcttagattctcttttatacatgcattcttctttgccacagcatattgatactgtcgagaaagaggtttttctatctagaccgttttgttaacgttgatgaagagcctgtcggaggaatcggtcgcgtcgtttagaagatcagactcggccttcatgctttccgccaacgaacgaggttccaacacccaggcaacagcgcgacctgtcaatctgtgctctcccctatccgtcccctcttcctggccgacgatcgacccaccggttgccttcgccgtctctatggacgattcttctacacgcgtcccggtccctagacttggatcgtccaacagactccagagagacctcagactgcttcggttggtggtgacagtcgtcatctcccgttggacgccgacgagtagggagtcgagtgtatggggggttaatgatgcagagggtttcatcgaactgaccgatgggtcgagaagggctcgtagggtgggtgccaagttatcgaacgatgagcctgagctcgggttcacatcggatgaggaagagggaagatcgagtgagagcgaagcgaggttgggtatcgatgggtttattgatgttggtgatggcggcgatgatgatgatgatgatggctctaacggttctgctgttgattgagaagattgggtagggtgcaaataaatcgaagacaatgcaagatggatgcttcccagttgatcgttaaacctcgattccttccagaatgatcgagctctcctttcattttcttcgtctgtccagtcaggtcggtaaaacatgtcttccgtcctttcagtctcgtcctttcctgccagctttgcgcatattcctatcaacctttcttttgcctccacagtcgtccaacatctaatcctcttcgattcacccaaaggccctacgctagcctccagagcggtcgaaaggaaccggacgagttcgctcactatcggcgcctggagctcactttccagctggatcgtcaacgccctggcgttggagcttcctccgagcatcgccttggtcatctcttctggttttttgatagagccgttcttgaagtattgtctgacgagtggtttgaacacgccttcggtccctccgtcggtcggaagtggcaagtgacagatcgcggatacgagcgccaggagaagggaaaggtccaggtttaaatccagagtaggcagaagaagacgcaatggtggtggatgggaaatcgaataatgcgccaagggtacaggcgctttctcgagcacagaggaagagggcgtggacggtggagttccgtgaacgacagagatacccatggacctgatctcatgaaccgttctgagcactcgaccgtcgtctccaggtccacctggttgaagtctaggaagctgaagttcaatcctcggcggaggagacaataagttggccgcccggagcatgaaccgagcggtcttgtgtaatgaggtcctcagatgatctgggttggcgtctttggataggactgaactgtccgaatcatcggagaaagaagaatccgagttgtcgtacgaatcctgctctaccagttcgaacaatagtcgagagttgacgatggcgagcactttgatccaaagctttccgccgtccgccaacacatggacctttgtatcaatctttgtcttcttcttgagcgatcctggcttgttgaatactgtggcttcggatgaaagaaagctttgattgaccccgacgactggatatggagcagagactagagttctgtacaaagcgagtaggtgaggagcgtttgatgacggcaagttactcgaccggggagcttcgaatacctaatcatcaggtagagttcgtacacatcgaagctcgtgagcgagagaaagagcaagggagaagaagaaggacagagaaacatgcgcgactcaccctgtctagccagtctatctctttcttgaccgatgctctaagcttcttgagaccgggaatgtacagcgactgtataggcgagtccccaggggcgttctcgtcaatgatcggagggggcggaagccgaaaggatgccagtagaggagtgatctcggccagttgatctctgtaattcctgagagaggcaaacacggcctctgactgatccatcttgagcaagacaaataaagcaggagtgtacgtctgtggtatgtgtatgtgtgtgtgtgtgtgtaggtgtgtgtgataacagagcgaaagagtaagaagtcggtgaaaggtgaaaacaagagaaaagtctgagttcttcaatccatccatcaagctaacgtcgttctcttccttcttccatctcgagatgatctgatcgatctggctttggtgcttgatatcttttccccatcttcttggtctctacctgtttcatcaacagcagctctctgtcttcttgaaagatcaggtttcattcgtcggtcgggcaccttgctgagcaaaacaccgtagtcctcttgactttcgccgtcctctccttctttcttaggagttaaatttggtgatgtcggtcgtgcacaaaaaagaagcgcaatccggaaagcaggacatggatgtcactgtagaccgtttgaatctgtacgagagtttgctttctattcgtgtcctattctggttgaaacacgccgaacacgctcatgatgctaactttcgtccgttcactcttactctcccgtgaaacttcaaagcgtattgaaaagcctcaacactacgttgaccaaggagctaaatgtcaaagctccatgggatgcagacatagaatcccaacggctcacgttagtagcagatgattcctgtctttgttaggatctgtgtgttcttatgatcggctgaatgaaatctggtctgatcgaatcgaccctccgtctactcagcattcgtgggaactacgtccggatcctcctcaagtttcctgaccaggccgacccacggcatcttgaggccctctggattcaaacgacccatgcgttcatcactcgctatagagctaggatttctacaccatcccagccttctagatccgctagttccaacaacaaaaagaaccgtcgagacatacagtacgagaagaaccgaaatctcaaccggtttgccacgttcctcagggaagaaatcaaattctacaaagcgtttatcggtcgaatagcctcagcctacgaacttgaatcaaccgaaaaattcttagaagggtttagcaatgagaacagatcggccaaaagcttggacggcatagttccgttgaaagaagccaagtccaaagggggagccatggtcgtcagaggattcatctttttaggcgatctggagcggtacggagagatttatgctgtcgggaaggactctgccacaaaggagtctgggggacagggaaaagcaatcaagcaatggctggggacgtttgaaaagcagtccgagggatttgtgaaagctaaggcaatgtaccagatcgctcatcttttagatccagacagcggttcgttcgtccagtcactttcgcaactcaatccgattctcatatctgtttgtgctttcgttttcttgcaggcaatccattcaatcaactcgccgtagtagccaccaatcaacaggatatctctggcgcttcttatttgtaccttcgagctctggccgtcaagggcttcttcccaacagcgaacgagaatctacagcgtatccttcgaaggccgatggaccacttttggaatagattggaagaagtctcccatagattctatcattgggacagtaccactctgctttcgttcaccgaagacttcatagtcctgataggtttatttgtcgttaacccaaagtgagtcctctgcatacgtctcaaaatgctaagttcggttgatcttacagttgttatccttgattctttttccagtaaattcggtgcttcagtcacctactccacttggttcatcgccgaatatgaatatctgcttgggcgccaactgctatcgactgaaataattctacgaacgttcgtctctctggcttctgttcactggagtaaacggatgactcgccgagtgcctcggcttgaaaaagagagcccccacagcactgctcaatctgaattagccatccttgatatcattctcgacatcatcatcgtcaccctcgatattgttgtcaatgatctgatagagtgtctcgacccggtgaagcttgcccgataccacaatcgaaaagagcgcatccttccggaagaattggatgccagaagtaaagaaacattaaattcaaaagcaaccgtcgactccatggatcagttctcaagctacttaacagttattctaagacgatcacttcccactcttcgggtaatctcgaaatggattcggagccatcaatcatacctatctggaataagtcaaaatcagtcgatccttgcgtcaacaagcgatgagccactccggcaacaagtctctggcaaacctccctcttgcgcacaagacactcatcgatctcaggaaaagattcagggaacttatcgagcttacgcggatctacttaacgttctcaacatcacgttcccaagcacggagattgtttcgattgatgtgtcgcttgaagaggattttgagatgagaggatttgggccaactcataaactcatgggcttccagttccatcgaacgggcgatatggaacgacaaaccctcggctcacgcggaggccatccgaacagagaatatctgatgagagtcagtgatctgcaaaaggacggaacgtatgctactaaaggcgatgtgagttcatctgtaacatgcttttctctaagtacctagaagaaggaaaagtgtagaaactaatttgatatgaatttttatgctaccatctgtatcacttgggaaatagacatcggaccttttcattatcaaatacggccgttacgcttatcctcgtatcaaaacttcaaaactcaaaaaaagcaaagtagaggatcgactgccgtcaaatatcaatacacttcacgatgagattaccagagaagcgtggatcggtggacgagctggaaacgtctcctttgacagaacagacctagagaaaccctcaagaatccatgccgatcctcaaaatgtaaaaagtgctgatcatactcctgagtacgatatggtccctcctgccattcaggccgaatctttatcgacacctgatcgatctcctaaaccgatacgtcaccaagggttgtcgaaggaaaaacctttctctcagaatattcggcgcactcacccacctaaggatgtctctgaatcttctgttcctctacctaacactcgatccactgaagaagaaacagtaggcagcttttccaagccccgcgcgagcgcgtctgagacttccctttcgatccaaactcctctcgaatcgcccgtcagcatcgttgacctcaatacattccctgataagcattctgctttcagacattcccagaagcatcccgtatctcctccgacccttccatcagcatccgatatcaaagcagcggacttggctgcctccttacaaaactctctgctccttcgacctgagacgcctgtccaggatgaagagtcagcgtcagtcagcacggggacggaggacgatccggtgaacagggctatgcgagccaccttggatgatgaatcggaggtggatatgaacgagatggagcgaattcgagaagaaggaagatacaatgaagagatcgagttatctgcttggtcatctagtaataccgctgctgctccggccgaaattatcaagtgagttaatttttcctaccctgtcttttcaagaacagattctaaatactgctactgttcatatatagccaaggacacaatctctcgccgtcgatcaacccgacatcatctccgaatgtcgctcccagtgggaagctcactgctctagaccttctcaatcaaatcacatcttcctccggcttacctcttgcttctccacttggtggaatgggaacaccatcgcctcttcaccgccctcaatcgaacctccggtatagtcattctatggaacgaaaggaatccatttgggccccggacaaagaagattcccccatgggacgagatgttattaccccgtcttctggattgggctggtctaaaccaggagagaccacgtgggattcacctggttctatatcgaagagtagctttggaacacctatagggaagaggtcaccctctggccacccgggcttgggaggatacgagcaatcaccctatggatcgaatcagtcggcgaacttttctcaccatttttcttcgccgcatcctgaaacgtttgggcggtccactcaaaagtcgcctttgagcgcacaacggtcaagtttggccgaggttggtaggtcgccaacagatcaactctacggacactttggagggcagagagaccggctatatagtttgcctaacctagaggccggagctttgcctcactcggcttaccagcagcctagacaacaacaacagtcaccatcgtcgtcatcgttttcacctctctctcaccaaactcaccaaacatatgatccaagccctccaattggtctcatgattccttcctactcgtcgtccccctcccgtagtcgtcagccatcccatccgtcccctttaggtaacatgttcacagatcaagccagcccttcatctctgccgagttattcctccggagtttcacttccttctgggccgacggctgatcgagcggcttataacctaggagcatatggcgaccatccgtcaagctcacatcattggggccagcctgcccctgttctgggtaccttgctgcaaccccaacagcagcaacagcgacaatccaatttgtcaggttcgattgaatcgtcggcctcttatccgtccacgttggatgcacaacaagaacaacaacaacaacaacaacgcgtcttaccgaactctcatggatatactcaacagcagtggaacatgcagcgggattctcagtcacttgcatacgacacaacggctgatcagtatttccgaaatctaccacaaccacaaccacaaccacaaccacaaccacaaccacaacaacattatcatcatcatcagcagcagcagcaagaagatgcttcacaaacaggactcggcagaattggacctggaagtgaatttgggattggggcaggcccaggtatggggtatgagcgaccaggaaacatgtggaattaacatcggaaagctttcgtttttgccgcgtgtttttctatttcatactatgctcatgcacatgccctatacagaggagaaagaggaattgataaatcgaatgatgcgagagactgagaaagatgacggaaaattggaatgtgagaacgagacaagaggcacaaggaaaaagattgattcgatggtatgttcgttccgttgatgaagtgttttgaaaatgatatagatgtgtttttatgaatacatgtacaacacatctaacgacaaaaaaacgatggaacggacgaatgactacaacgaaatggaagagactaagaaaaagaaaaagaaaaacaagacaagactggaaaggatgagcatacgacttgcgctcaactctcaactcagaccctcccctcctcttgggtcacttactcaatcccggtcagaaagaacttttgctccaaaatcttctaggttgatgaacgtcttcatctcttttctcatcaccaaaacttccacacataacctctctgaaccgtcttcttcgtcctcttctcttgtgactcggtcctcgttgttggcatcgttattagtattggcgtcagtatccgaaccgacgacggtggcggtggaaacttttcgagatcgggcatggataactttggtcgcatcactcacaagaccagacctaggaagaagtgagggaggcggtctgtaggctctcaagatcggagacggaagtgagtttatatcggatgtgtctgccatggccggggtcgtcgttgtgttgttgttggtggtattatcggtggtggcggtgttggtagaactagatgaatagtctgggcatgagagtgttgacggaaggggaatatctccaggtcctgtaggtgtcgtcaagaatggactttcgatggaattttcttcttcgacgttgttgtcatcatccaacgaaagaggactgagaaacgagagatcgtcctcgaacattctgtcgacctgaagtagatcttttttgggaaacgtccgagcggcggcagcggctttttcggctttcttgagccgcctgatggctgctttggcttcgtccctcgacttcttatcggaataagctcctccgtgtttcctctctgcgcctacaagctcttgatttgagatcgtctcgggatgatctgcaggtcgttcccctaccccaagatctaaaaccgcaaacatttctagatcgatatctctgacgtgggctcgcggtcttgcctcgtttgtatgtattgccggcagaaaggctggttggtgttgcacaggattggagcagcttggattagctttcggattagatgttgtatttgtgtagtcgtcatcatcgtcgtcgtcgttgtctgaatcgaggagagactcaatcttcttcttccggcttgagcgatttgtatcatctggacgaaaggcgcgctcgatccggtttggtccaaggggatcagaggtggtaacagatggtaaagatgaggttgagcccgggaaggttgaccgcgcatgatctgaggatcgatgtctcggtcctctacgtcttcttcgtccgcctgtgccgaatctgttgatgaatctctgtccgtgggtttcggcgttctctgggccccattcaacagcgggcgatttcccgtcgatcgaggcttgatgggctccgttcatctgtgctagctttgcctcccatttcgtcgactttcgctgctctctgtttgatgcagtctcttgcgaggcggcccatttgagccatttgcctcgtttgccggtttcatcgccgaggtcgagtgtgctggtcgacaaggccgggagacggatttctttgacgacgagcacggtagcacctagttcttctgccatcttttccagtgtccggagtgacgacaagagttctgatcggggaagaccaacaagagttccatcatctatgcgcgcgggagatcaggatcgagcgagggttagaacggaggatatgagacagagacagagtggagagactggctcaccaagcacaccgatctcgtagatggcctccccacctccttccaatagtctccactgaagctgagtgacaagccgattgaatctgtctggagtggcggccgagagtttgagtttgtactcgatgtggcctttttcgtctacttctgcactgagcctctgaagaccgtccactggggatgaaccaggctcaagatcggtcgatgagattcgcctcgcgagcgagttgctttttctgatccgaccgccactgtcgaagctgatggcgagctgtgttgcttgatcatcatcatcgtcatcattaacgttggcatcgtcatggtcatagtctccgccttctgtcggtcgtttggacgaaagttcagacaccgagtcatcctctgttgattcttcgagtgactctgccgagggaagcccttcgtcgatatccctatcttcgttatcggattcgaaggtggagaactcggagagcgtgctgtcgagaagatcgcacggaagatagttgatgacgatcgggtttggagtgccgagctttgagcctgggagaggtaaagggtagagaagcaaagaaaaggacggtcagtcgagtcattcttggattgcccgcgggaatgaacatgaaccagggtggacgatgatgagacgaacgagggacgttgatgtacgggttcgaccacggagacgggagcttaggcgactgggacttgtattcgccgaacatgatctgctgttagttgcgatattcgggtcgacagtaagatataatccgagggagagaaggtatgagggtaccgccggataggtctaggatggttccgggcgtggtgtttggactggtggggagccgagatgagacttgatatcgataaaacacatgcacacagaggcacgtgtactgtttatgggtgagttcaacaacagcgctctcaggctcgtattgaagtgatcatctagaacgacggggggagctttgggatgagaaacaggatcgtcgtcgttggaggttgaacgaggattcccccgggggggaaacatccggatggtactgtatcctggggggcttgcttagtcagcggctgcctaggagtagcgcagaggattgcgcgctgctggccccatgggagtatctggtggggatcgtttcagagagaacgggaacatctagagaatagtagagagacaaagcgcgtgtgtttgtgtatgaacagaacaagaagagacgttcggtttgtgaccaggcagaaagaggtgaaagcggtcgttggccttgctggtagagtgccatcgctcggctgcgttctatgtacatcacatcacatcacatcgcctgaagcatggtgagaaagaccgtctttcctttggtatgcgacagttcatggtatacatgatcgcacatttgtatagccttgaacaatggaagacaatgaacacacaccagcagcgaatgcgctcatcctatacaccagacgggttacgtctgtacgcgttgcacataacgatacgctcatctgtggcggcctccctgatactatgttcgccaacatcgtatggcccacctcggtacttttgcccagtagtatagctaataaagtcacttacgaccatgtcgttcctgatcactttgttgcttttgatctttcgagcttcgttttcgaggaatgtgaggttgtgtgtaccaaacactttcagtcgatgagcccagagagtatacgtcaggcctgcctcgtcaggatcgagcccaaattgctcggacaagaagtcaaacaagctcagttccttgacttgggatagaacctgacccttcctgaacatctcgttcagaggcagctggtatgtgtattcatccgaggaacattctgattccgtctcgcaatcgtactctccttcttggtatgcgcaagcttgcgatggttccgtatcaggttgtgggtccatgctagtaatgcgccggagtgtcgagtcagatcttctggccgatagttcgtcacttggtaggagttcggagacgctaacgaagaaagaacaaaccatgagactcgtcagatgtggcaaagaacgagaacgagcgcattccacgtggtagaccgacacaagcctggcggcttggactgatcgaccatctgtcaaacagatcactcacgctgtgtctctgtagtctttgaacagagtggatgaggtggacgaggtggacgagatgaaccagatgaacgcttgcccccaacctggctggaccacgctggggagggtttatgagccatccgaacggactacaaactttttctaatagcgactacaaaacatttgtaatgagcctgacactacaaactttctctaatggccattagaaaactttcctaatagtttttccaccgcctgttttctctcttggccgtccgaccgtcgttcttcctgctcatcatccaaccatcaccccccgagtcgaagcgatcccatcgttcaacattttctagcatctctccagtcgctctcccccagccctcgctcagcccagtcagatgtggtccaagttccaagcaaacctgccaaatttggcaaacctccctcctttgccccaggcgccaaacgtcaacatcgccaacaccttcaagaccacagtccaggccggtcggtcagtatcctcttcgttcttctacaacatctcacacgcttttcttgcttttcgtcctgatgaactgacatgtatctgtgtatccacccccggctaatcaagtgaacgattcggaaacgtctcgagtgacgagatcaccgagcttcccaagggtacatccccgtccagccatcttggtatcttctctggctcggcccgtatctgacctcgtccttctttcgttctccctccaaacagaatacaaggatctcgaggctagggtagacgccctcaagaccgttcaccagaacatgctcaagatcaccaaagtctacgagaccgagtaaggttttcttctccgtcccgtctatggccaagccttggtgtctgctccaacgtgtctgattccatttgttattctcgctcttcgtcttctccctcgtctttccctcacctctgttctcttccttgcggctcggccttcttgatcgttccccatgttcattcctgcctcgctcgtctacacatcatcaatcatcacaaacaaccaggtcgtacgactacccgacccaggtatgtattactcttcaaaccacctagccttggctccaagaaacacgaccaggctcgcctgacttacccgccctcatttctccctacttttccccttcgggatcgtcttcctcagatcaccgagtccgtggccgagcttggtggaaacatcacccattcgttctccttgtttgcccagaacaacctcaaggtatcgtctattttcttctttctctttttcttcccttaaaacggtcgtctatccatgttgtccatacatgacccctttccgctccatgctcaaacaagaaactcataggcttatacccatcctgactctcctcttcactataccgccctctcttcgttctccacgctctttcccatacctgtctcgctctctccactccaaacgcctggttctaccatcgaccccgagcagggaacgaatcttcctttgcccgccccgacagccgctcccgtcgctcagccaaagacccttccccacgcgctctccagagctgcggcctcatccgctgtggaacttggcgatggagatgaaaagctcggcaaagcgctctccagctacagtctcgccctcggcaaggtttgtatctctcgttcccttcggccttccttacgttgtcatcagataccatcacctcaccaagcttttttttttctctcaccgttccatctatcgtctccaggtcggagaggccaggttgtctcaggacgaggagatcgccacccggttccttcacccgtggcaacgcacgctctctaccaccctcaccctcgccatccgagctcgtcagcacgtcaagcaagccaggctcgagctcgattcgtccaggcaggctctcaagaccgctgccgccgccaagcaggagcaggccaggctcgaggtcgaggagaaggaggacgagttggtgagaagaacggaggaggccatcggtttgatgaagaacgttttggaaaacgtgaggattgtcatctcttctgatcatcaatcttgctccttctgatgcttgtacggctttggctcacaactcttcttttgccactttacagcccgaacctcttcttcagttgaaccagctcgtcaaggcacagcttgtcttccactctaccgccgcagaggccttgtctgccatccagggtgagatcgaggaggccgccggaaaggcagagacagagtaccggttcgtctcattcttttgcttctcgtacttcaggttgatgccgcgtacgatgtgctgaagccaatgtttcatcaatactctaaccctctttagaacctacagggcctaagatcagttccctcgtcgttcgcactcacccagtggttctcgtctcctatgtttaccttttgtttaatctcaaatttgtctacagatgactccctctttttttcactatcttcggtcatatatcttcgtatctttgactgaactgtctttcttggtcctcggttctctaactttgttgttttcttcttcattctgtcacttactttcttccggcttgtttctgatctctctgatgatgacaaacgatctttttctctatcctctccccgtctttccctccttctcttttgtttctttttatgctcgcgcgtgaaaaaatatagaaaggataaagtacatgatgattcacaacatgatcaacacctcggctatcaacacaccacaacccaccaacccactcactatcaatactttccaatttctatcacatcatcatcatcgtcggtgatgaatttcacaataaaaggcgagagaacatcgaagtgagcaagggaaaaacagagaagcgcgtgaaaagacgagaacaaggagatgaatgaacacgcactgttttaaaaattcccgagcaccaatcctgatgcgaacccgccaaataaaaagaaaatcaaatcagaacaagacaaaagaagaaaagaaagaaataggccattcagtttggtcgttcctctccactttcgacaccgcctattttcgcttctgtatgatcgtctcgaacgttcctccacagaagaagacgcatgacaggaaggaaaagatggactgacttgatgcctttttgactcaacaggtctttccatagtaaacctgcgagggaagcagggaacgtgaagctcacagcacctatgttactcgccagtgccaacgctttttatttgttcgttccaaagtcaaaaacgagaacatcagcacaagggtcttctagaatgtcgctaacgcgtgaaaaggcttcttacagtatatcgaagccgtcagatgtctctgaggtgggttatatatacttgacctgtccaaccaaaggatcaccaaaagtacgtgatcgaaacatcagtcattcgaaacaagacggctcagagaggagagaactgaccaggtctcgaggatagaactcaggaggatgcagcacccgatgttcgttccaatgatgttgcacagcacgaccgctaggacactcatcccgaacacacagcccgtcgtgcctgttcggattgcccaagcctggtaccaagtcgaaaacacccttccccatccagaggaagtcactccctatggtaggttttcattcaaaacgttttccatacacaaacaacggtcagccatgaacctcatcggacactccgagcggccggatgcgtccatccgaatgacagagacgactcacatcaacgagaatgaacatgcagaacgagaagggcaagagcggaaacgggagacgctgcgctatataggtcacagtgggaaatctccgtgagagtctcttaccgagtgaggagagcgtgacgggtggttgaggccgagagacagatccagtcgataagcccaaagggggcacgatggtcgactgcgtcgttggaagacgagaactagattggtgcctcaaaaccggtttggccgtcctacacgttgtagaagatgatttaaaagaagggtttgctataggtgaatccaatgaaaaagtaaatcaagacggatcgttaattcatcccgttatcgactgactcgcaaagaagcagatcaaagagtcgataagctcaccgacatcccccgtgggttctgcgacttccatctctatcgcatcgtcatcagcggggacagaaggggtttgacgggcttcagatggtttgacaatcgaagcgtgtcgaatgtcgtgccatatatcgcgggtgagcataagcagagccgctgggacagtcacctgatgatttcgtgaaattggtttgacgaaggttgagctcgagcagatcaacgcaaggaagtgaaaaacaagaaaacggatgcctactcacctcccatactcctcctaaaattccagctgcactccctcccaacagggcgatcaatgcagccaagaatatacagcttcctatgattgccccccaaggatctaccagcgctttcctcgcgttgacgtcgatctcttcgatcctctccggaatatcctttcgatattggaaaagagagaggaacatgtaagccgcaatggcggttgccacagtaggtagaatgacccaggccgagtacgtcaaaaaggatatcccgaagctcgacgtgatgacaagattggttatgttgctagacacaagcgtcgctgacgcaatgtttgcaacagcaaattgagaaaacacccaggctgcaaatggttcggtacacaagtttgtgtcagatcctgagcagggaggacgagagaaccatatgcatttcacatcttgggatcgaaagacacctcaccttttgggtctactccgttgactttagtgaactgtatgactccgccgagattcagcttcgagacacgacgaacgtagaactcagatcgagaggaatcttacatataccaaaaaaccagtcccggactgattggtgacatcgatatagtgtgagtatgcgcgatcttagacaaaagagatacaaagcgtctttgaagaaactcactaggatgatggcatcattccccataagctgtactcgaaacggcgattcaatagaacttgtgaattcctttttaaatcgcttcccataagcgcatcatagatcgagtgacatactgatgcgaatatgaagaagaacccaaagaatccggcataaagcttccttcctgatggtccgcccttttggctgatcttgaaagcgaggtatcgaagaagaccggctgagatggatagaattgtccttttgatcagtcttagcaaagcgactggatggaaggagaaatcttactggcgtccaacgagatagcaatataggccaagcagataaacaaaagcactgatcccatgaagaaaccaagtatgaaaatttcagtccgaattcaagcacgtttcagcccaaaattgtgtacttttccactcagctccctctcttcaatatggaagacaatgagattgaacaaactgatatcatatggctttaatccatccggatcgcctacgatccctttcttgacggtccctccgtcgatacttttgcttgccaaaaggaccagcacaccgatcaaaggcgcagagaccagtccgaaggtggcccgtcgtggtttatggagatcacatattccatccgagattctgagtacagatgatacccaacagacgcatcgggtgtatagtcttgggattggaatgcgaagtggatagaccacaaagatatctatcagagacgacccagacgaaatcgatcgttgtttcatcagcagtgattcgaccttgggttgcatccttttgtggagctaacgcgtgaagaaaaaactctagtcaacctcaagtctttcctatagactcactaacgacgagaagaatgatgagattggctatcgagtgtccatctatcttgccatctgtctgaggtgccatctacagcaagcacgatggtcggttggtttgattgaagatacgaaagtctatctttccgatcgtttgcaggtaaaacaaattccataatcttttgatcttttggctctgttcaaaagccggttagtcaccgctcgcacgtttattctcttaatctcttcatttctatatctcgtcgcttcattcaaagaacggtatccatcccagcgagcttcatctttacagccatctatggtagtcgatcgcaaccaagggagttacacgagtacagatagatcgagtcagcaaactgggttgattttactcctctgtcttttttttttgacaagaagaacagtgtaagtgtaattgaacaccaacctcgaacaagtaatccaagcattcggcctgggtctttgccttgtcccacgtaggtcctttgtagaacaatcaagaatagatgcgccaatttcaggctggtcagttgagatagaagaagccatcagatcactatgcactcaccccaaacgtagagtccgtgtcggcgcaccaagatcgcaggggctatacaaagatacaaacaggtagcgcgaaaaaacatgctcagttcatgagagtgaaagcgtagcagagctaagaaatactgcataccgtctgggtatcgttccatagcctaaccagatggattcagaagcgatcgagtcatcagttttcagacccgaaaccttcatcgtatcagacctgtgcaggaagagagaagagtaacgagctgatacatacctccgccatagagtctgtcaaatcttcctcatcaggagtgttttcgatgatagggatcgtcagggtatcgaggaatgaaagcgtcttgcccatcccaccgattcgaacgcctttgatcatctacaatgttttatccaacacatcccataccgatgaaagttgcgttcgagagaaagcccaagaaggaaaggggaaggttgaatgaaagcggttttttttaaaaaaaattaaactttaaaggaagaaagaacgtagcgatcttacctcctgatgggagatcttgaactcgtttccagggaaaagcaaagtgaccataactgatacatgttggcagtgagcatagattattcggcaagtgacatcgtctcgacagggtcaagtcacagacgagccgcagacaaatgacgtgctaacaacgggtgagaaaggaagacctgataactcaccggcatgctgcgaatgagtatggatgcaagcgccagcctctctcagtctgaaagccgagaagaaaagcggacagcaggcagactccttcaagccagctgtcgtcggctccctcaggaaaactcgcttggatccaggtcgggggatcgtaggttggggataggggaggacaaagatgtgctccggaaggattttctctttctgaacgccggagggagcaaggaagaccttgtctctatttgaattcatatcggtttgtatgtgtgtgtgtttgtgtgtgtgtgtgtcacattggcgataatatagagagatgaccgagagtgagtcaaccgacaaacaccaaagaacaaaaagctcggaaaaaatcgaatgcaacagtgaaagcagtacgaacccgtcccggatagagattcctcccccagttccagtgacccagcccaatgtataaaactgagcacaaagcgaagggatcaagtttgccggctgcatgaaggatcatcattccgttgagatacgatggtcagcttcaagacttgaaggaacattacctctcagctgacccagacaatgtatctaaggaccttcaaaacggtagagaaacacgtacatgattgggatcatctgaccttacgaggtcatccacatcccgaggagagttttgagaaacggccatgtcaatcagagagtcgagtgtctatatagattggattgggcaaatcgaaagagaaaagcagagcaattggaagccccgctgctacggaggaaaaaaatgggcgaaaaaaaaagaataagaaaattcgtctgtcggccaagaccggtccatttttggagtaacaacaccaaagttcctgccaaagagtatcattcttgcaaaccgaccaggcaaaaagtccaaggcaggtcagaagagtcgagaaaaagtaacgaacatatgcatggcattatcagacggtggatagtaggaagcagatagagtggtggaaaatttcgaaggtcccacacataacgtatgatgtataacaagatagagcaaacatgctcttcagacatagctgagatatatataagagacagacaaaagtcgaagaacgagaagaacgaagagagaaggtctgtatgtacaaagtttgaatattcaaaatgttcaaaggcggtctatgagatctagatgctattcgacgtctagaaagataatagagagcgacctgaagtgaaagaagcgacgaaaagagcaagtagaggtctaacaaacacataagtgggatggtaggaagcataagatatgaacggagagtatgatacgagatgacgttaatgatcgacacgaccggtcgagtgtccaggaaaagagaacgacgtgacgaaagagaacagtaggggaaagaaaagacaacgaattgatgcaaagtatgacacatagagaaagcaaaaagagggtttatgctctggcaacagcgacggcccgtttgaacccgctaaatgccttcttccaacctttgcctttggtctcgggtgattttttatccacctgtccagacgagattccaggtttgttatcggacgacggggtatgaccatccgcgctttcaccagagatgtgggtcagcgcgtcagagaacgaatcgatcgacgctgtctccagagagagcgagttgtaagagcagagggatttgagggttggctgcggttcgacggatcgaagaccactttgtttagcttcagacgttccagacttcgcggaaaacaaggatgagcttgatcgggcgtggtgcagcgattgaattgatcttggtcggtgtagcgaagtggttgaagatgatggggatcgacaaggaaggaccacgctcgaggcggccgaggaggatcgggaaaacgtgggcgcgctgcaagcaaaaggtgaaaggggatccataaggattgaatccgaagactgattgctcgactgtagggaagctagcgaaggctgttgccgcggtctctctaatggctcgacggcccagatggaagctggtcggggacgagctggggcgtgggtagggacagctttgccgagaggtgctactggctttggcgggacggcaggaggtgagggaatgactgtgctggtagttacgctggacaaccttttgaaagaaaacctagacttgtttacgggcttatcctcaattaacaacgtgtttggccaagacgttatgcccggtggacgaccgtcaaatgaagtggatcctcttgcgtccgatcccgatggctctggagaagatggcggagtgattggacgtataggcgagaacatgctgccgatcttaagagtggacttctttcgagagcttccggcactccattgaatagtctgaccgacgctgtgaccgctgacaaccgagtctgatctggatcggtgtccgacgtcagacgagtctggtgttggcggctgctcggggtctgaggtcgactcttcttcctcttcaagcacgctttgaatcagaggcgaccgacggcgaggtccggtttcaaccgtcagagaaggagggggagttagagagctagacgagggttgaacgaacgccgagtttgccgcgttggatggcgaggggccggcggcactggtagaatgagcggaggcgagtgacgaagctggacggtgccgcatgcgtgatcgggaagatttagatttcgttgaaggcgttgtcacgtgctctctgcccaaccgctctgtcgggacagggggcaggcttgatggacctgcgaacccgaatggattacttgatgaattcgtagagtcctcccatccgttctgatgcatggacgagtggagcaggaggatatacagaacagggatagagggatgcgacaggacggatgaatcgaagtcgaggtggggccgattgaaacataccccaaaaagaatgaattgaatatgaagaaagaaacgaatgaatgcatgcataaatctaagatcagtattgtccggaggctgatcgctgcatggttaaggtggagaagagaaataactcaccatataggcgtccgctgcggagagtgtacctggtaggaaaaatgatggagcagaaagcttgatggtgaacggcaagaaacatttgataggggaacagacggtgagcgcacgtacggaatgatctgaactgagggtttggcattccctgtaaggcgcaagacgtgatttgcaaggtcatagacaaggaaaggcatcaacggagaatattagatggtcggggaaacgttgacaagaatttagcttcgggcacagataagcctgccaagtgagaggcaattgggccacgaagagtcggactaattctagagacgagtgcgcaccttgatggcttcctcaacttcacgccattctttgaatatgccaacagtcctgagagcatagtatccgttgtgttgcattatgtagatgaggtagaacgaccgacctgtaaggaaaagttgagtatgagggagtggagctgtcgagaaaaagaaaggagcgttcggtgagggccgatattccaggtagtatatgcgcggcagatcctgataccaatgtttgaggctgcttctgttcaaaagaggaaaagtagatgaggaagtgcgatgggaaacgaaggatggttgacagaaatgaacgtgtagatgattcgaatgtcgtcaagggaacacgtagacggtgagtgtccttgaaggagaaagaaagaagaagaagaaggagtgacagatttgaagcgtgagaatccaaaggtgacagggacaaaaaagagggctgaagaaaatagaaaaaaaaaaggaaagaaaaaaagaacaaaaaagaaaaaggggcggagcgggcgccgaaacataaagctactgaggcggcacgcgagaggaatcgcatgtccgagacaataaaaagaaatggaataaatatatcatcaaaaaaggggttcgcgtgggagaagggaaggaaggccgagaaactatatcgactgggatagccctgatcttcccggcagcgcctcactcatgttcgcgtccccacaccttgctcggtgttcggcgactgcgcgtggttactaacgttgcatgtgctgattagattgtgacagtcgatcgtcaagaaacacgttagagtgggttgatccatcgatcaacattctatctattcttacagctcgacttgatagtcatcgtggttgtcatcgtagtcatttccgactgtcgtcgccgcctcatccgcttcatctgctccacgtcattccatccgaccaaatacttcgccctgactacttccaccacatcgttcccgtcttccgtcttccgtcacccatctactactttccccttgatcggcaggaactggtcgactcggatctacttcaactcccttgcccggtatggtcaaacgagagcgtttcttccggaatctttccccgtttgaaatcgtcatcggcacgaacgctggtaacgcaaccacagccatttccccgggtggctcggccactctcggcttgaagcatcccgggccggatgccatccgattgacggccacacagctgggatcgctcacttctcccctctctttaacatttacactaaacaagaagtcacgaccgtcatggacccaattggatgcctgtatgaacgatgatctctcagatagaccacccagtgtcgcaagcgaggacacattgaggccgtgtgtctggagacgtctcaaggtctttcagaaggtgagtcgttatctttcgctcttctttggttcggtagatcaatcttaatctattctttgtttactgaacaatttacgccattttccatcgtgcgttgtttcatacagggacaagaactcttggcactgtcgacacctcggcttgatggctggatggcacacatgccagataccatgtcgcttggtgatatcagcctgcctgggacccatcagtcaaccgctctctacggagttccggtcagccaatgtcaacagcccagcacgcctctcaaagttcagctggccgatggaatcagatttttgggtaagttagcggcagccttgaatagtattcctcgggacacctgtgttgaacaattggtcgttcttccaaaacagatgtccggctggcagagaagaaagggaagctcatcgcttaccatggcattcgtgagacctcggctcatcaagttggatccaatgctcacactaactgactagttaacttcttctcatagtcacccagcgggcgaactttgaggatttgctggccgatgtgaaggccttccttcagagtccagagtcaaacagagagacggttatcatgtccatcaatcaaggtggcgcccctttgtttcttcatttctattcttttctttctttgttttcgattatttttgtataattcttttgatctgataagaacggtcttgtggttctccggattgatctgatcgaccaaatagagaacgcgtctacagagctatttctcaccatactcaaaggctacattcgggcatctgatccttcactttggtttctgggtacctatctctttctttctcatcttccgaatgaagaatataccacagattgactttctcacttccttgttctccttacgctctcctccgaatagccaaccgaattccgccgctatcacaagttcgaggaaagattgtgctgttctctcggttcggaggggacgatgaaagttggaaacttgtcggtggtagagggattcaccctattgattggccgaattctgtccaggaaggtttccagactacacttccttctcggccggctggtgaaaagagggatgatagtgaggatgataactggggtcgtacgttcggtgtaaacgattggtctgtccttctctttttctcgctcctattctttctttccagttgatttcttccccctccctttacgttttcttccttatgctcatttgcgctcgcaggtacgacatcaatacaattctctccatccctgaaaagacagacacaatccaacgcacgctatgcaaagaatctgccctggacgggcatatcccactcgtattctgttcggctagttcgttccctctagcttttcccgtcaccgtcgctagaggctttggctggccgagatgggggttgggcgtgcaaggtgtgaacgatcggatggtcggctggttggttgagagactggccgctggtgccagtcgattgaacacaaaaccaaaagaaaaagagaaagaagagcggaacatgaccgcaaacgacgatcggaaacagtccagtcagatgatcagaggatggatcctgttcgatttctataggtcgccagatatactggtcgataccgtcgtcgcactcaacttttgttagtcacaacgggcactaaagtcggcctttttggttggcgctgtctgtttgtgtgtattcttgttgttttaaatactgtaaccacatatctccttcatacagaatgtccatttttcataactcaggttgcgttatgtttgttgatctatcgttacagcgaataaaagacgagaaaagaactttaaagaaaaacactagagtgtatcaaaagtcaagtggatgaggggggaaaagctatttctgaactgtagagaacaaagagagaaaggagaagaagtagtggtacaaaaaaaaacagctttgagccctctcgtccagctccttagctcccttctagagttgatgagagaatggattgacaaggaaaaaagacaaaagacaagataggaaacaaccaaactcaatctgatcggtcctgttcgtcagttaaagctttctccacgtcctccttagcgagagaactgtacccgctcggtctaggtgatcccagggcggcttccttggatttcgcatacacgtaagcacaagagcctagaatgattgcactgatcgaggctcctcgaccactaaaatcgacaagccaataccgagaggtaagaggggaaggtagatgttgacattgtcagttgagtgtatttgtatgcgcgtgcgtatagatatagatacttgtatcgagaaagatgaagaaacggaacgtacaggttgatgatatctccgaataaccagacactcacacccgtctggatgacacctcgggcggccgagctaaccctataagcgttaacattgattccggtgatcagttcaaagtatttctggatctcaaagtcgatcaaggacgggagaaagagaacacgctgggaaagcttacatgtgcgagactgggctggtgactttgattgataacagtccggcgagacagatgaagaatccccagaaaccctgatttacaaagagatggataagaacggttaattcaaattccactcagcatcatgtctggtccctttcgtgttccctaattgttgagcatacgagaaaagtgactgacggtgatagttccaccccagatgaatcggttaagcaaatcaggatccctccaagtcctcatgatttctggtccttcaccgatcatcagactaataggcaacaaggcgatggccgagaggaagtttgagtaccaagcgagactcatcgtcgagccatcgacgacgggcaagctcgatttgattgcgatcgcgtgacaggcggtcgtgatggacgacagtacaccaaacatgacgcccatcctgaaaaaaatattgttgaggacaaagaagctgagttcagcaggatgtttgtgaagagggtctcctcatgagtgtcaaagaggagcttcttacgggctgatcgagttctgagcgtttcctccccagatgatgccaataaagaaaccagagctgacgatcacacaggcgacgagcgcattcctggatggaagactgtggtacgcgatgaatgtgataagaacggtaagaggaaggaccatccctctggcgacctgagttgaaaagaggaataatacatagtgagtctttctgtgcgcacgagagggagaaaaaaaagaacaagaaagtcggacaaacctggtagaatgacgcatccacatattgaagcgtaaaattattgaagctgtgagtaaccacacaccaggaggaagaaaaagataggggaatgattttcaatcggacagaaggtcagtagagatatttgtgtgcatatatatatatatacatatgtcagaacgaagggttacttaccagagaccggtaacattcaatgcgagcaatttccacagtccctttactgtagcgagcgacattttggggatgacaaacactcgagcaaagtgactgattaggaggagaacgacggcaatggccaactgaatgaccaagaaaaatactggaatcgatgttttgatgagaacctatccgatggatgaatatgtgaagaggcaaacatgagctatacgactacgcttcaggcttgcagtctcgaaacagagcttacccatttgttcacagtcaccctgagatgaatcgacaacgaaaagagaaaggacatttgtgtccgtttgtgagctgagatacactccaaatttgatcaagggtacatttgcgatttgaaggagtgtgcgcacatctgagcaaaacggtgaccaacattccacatcaatgagcatgccagattcacaagaaattaaagtcaagggcaactcacaatgataccagagatcatataaaatgtgacggtggcaatctggagagacagtgttagacaaatgaggctcaaaatgagagattgtaccttggcgtttctaggatttcaaaacttgaagtttgtcacccaataaaaagaaggcgatggcttaccaccaaagccctagaaggggctgattcggattgtgaagacattgtctttttctcaaactgaatgataaaaggttggtgcaatcggaaaaaagtagcaaagttaacaggttgcttctcgtctatcagaacagcaaagttggatgaagagggcgttataacaagaaaggaatgaggatgaaggaaagagaggaagaaggcaaaggatgcgctcgatttatattgggaacaagggatgcatacatttccacgttgtatgtatctctccttctttcttcccaaaacggagcgtgttcagcaaaacgggcggtggaaacgagtccttgggaaagagaaaaaaaggaatgaatgaaactatattggcagcgggctgggagtggttttactgtggggttttgaaacgagaaagacgaagaaggacgagggaccggccagagaaaggctaggtggctcggaacaacgagagatcaaagagagcattggagacatgcaatatgcacgtacaaatactgatgcacgggcaagctgaatgaaagaagctatgaatgctatccctgacggcttgacgaggcttggacgacggaagagatcgattaggtgagatgtgcaccagaacgatagaatgaatttactttcgagcgggcatcagagtcaggctcggtgtgcatgcatgtttgagtgtgagtgttgtgatcgcttaggtaagctggtgcattgctgctgcataacacaattggatgtcactcttgatgtatgtgatcatctgctttttgtgtctgcgagggtgcgttcgtgaacatctacacacaattctcagtacacatcctatgtcttctgccaactttacactgttagatgccgatgaagaggtctgtcctcctgtccttactctatcggattttattttcaatactttttttttattttcgttgaaatcattctgatcaactacgcgacactcatgtcgccgtcttctcggggagaaattacagctcgggcaagccgataaccgtctagagttcaagagtcagtatcatgtcttgctcttttctttatggaaatggagagatctagaggtcactaacagcaatggtttctatctcggctgttgaaaattgaaaaggttacatcggtcagacatcttctagcgtgccaaatgaattcgacggacagaacagaggtgacggtagacaagataaccgatcggccggaggtttgtcttatgtgatcagcttgatatcatagtctctgtttatgtctgtctgatgttggaacaaacaaacaacctgcgtttccaaacaggtctgaattcgacagccttcaacgtagagtattatcagtatctgtttgatatagagctcaatgagcttcttcaacgatggtgcgtgtcaaagggaggcacgaaagagagagagatacacaggggatttttgtcaactagccatcgatctaatacacgtggtttacgtacattccagctggaaggcagtcgtaccgatagcgtctcaaccgacaggaaactttgtgcaggacgtgtgcgatggccggcctgatctatacggcccgttctggtcgctcaccaccttggcctttacactctacgtgttttcctcactatcatcctcgatctctgcctacctgacggatccagagattcctgccgcccaagatatcggaaagatttctctggccgctgggctggtgtactcttatgggattggcttcccggccgtcatgtgggccgtcgtcaggtggttcggcaagggtgaggttgaatggagtcttgtcgaggcctggctcgtttggggatgtgagtcccatgattagtcttttcccttgccacagatcgcgccagaacaacactgattggagaatgagagaattttccctcatttgtattttgctttgacgacagactctatgacggtattcatccctatctctttcctgtgcatcatcccggtgcccatccttcgatggatcctcgtccttgtcggagccggcacatccggttggttcctgtgagtctttcaatcccgtcttgtgttcgattgagattgagtccggcagaatgatctgaactgttgaaatctgttatcgtcggttcacgaaaccctcggcatttaggttgagaaacgtgtatccggtgttgtccgctttagattcgaaacttcctcggttactagtgattttgatcttggttctccatggagcaatcgctttgactttcaagcttgtctttttctcgtgagtgctgtcgttttctgcatctttctctctttctcttttctacctttgtgaatagtctttgagtgtttttctcattctttttataaatctggttgcttatttttcgggtgccaaacacacacatatagctactctgtcggtggcgttcaaataggaagggaaccgctagctggattgaatcctacagattaagattttggtgaacggataccatgctgattcattcttctcgcctaccagggggaaagtatctatgagggcggggagtcacatgatgttcaaataaagaatcagtgcagcatataaagctcttttcatagatgcgggcagatgaaagaggaaaaaggcctcaagcgcagaacgggaggaagcgaggaactaggaagaaacaagcaccgacccacaggcgagtgatggagggctgtacgaggcgatgcatggaatcgaaccaaaaggcgcagtcgtcgacgacgtcccggtatctatcagagagacgtctcagtctgatcgaaaataagaataacagatgggcacgagatccagatcttgtccgagacacacattctcagcgtcgagactgacaatgaaacacgaactgaatagatgagatgacgagcctggttactggccgaaggagaaaaatccgaagaatcacaaaacgtgtatgcatccaacgtaagcttacgaaacgagcgtgcacaggatttggatgagcaccaagagagagaaaatcgagtgcatattttgatcggccgatcagaacagagttttctagtgcgacattgcgtaagctcgacaacagaagttactagtttgaatcgtcagacagttgttaggcatgatcggcgcaggccgatcggagaacctttctaatcagtcaggcacgtcacagtcatctcggtcaagtcacaatcactttatccatacaatgtcggacagctattctcgagtgtaaactcccttttattcctttctcttcctacttctacccaccgtcccccactgtctattctttcttccacctatatttctccttatctgccccccttgcccttgtcatccctttgaccctggtccctggcccctagcctctgacactattttaaccggaaacgttcatggatcgacagtcgccctggtcgttatagcattcaatcaacagtttccccagctgagtaaatccacccgatcggcctcgtccgggcatcctccaagtctttgatcaatcacaccattcgccgcgccaaggtgactcgtccctcactttctgactgcacagacctcgtcgacaacgttccactcctcactcgtttttttccatctcgcctgtctgtcttctctgcaaaagaccagggatttcagaatacccatacacacccatacatccaaccactgatccttgctcaagtagtcatcatctgagtgtttcaatccattccacctcaccctagtttacaacatcaataacaacgaagacgttgacaagaacaaggacaaggacaagaatcacaggaaacaacaaggaaaacaaaaatatctgctccacccattcctcgagaatactccaaaaaaaaatgtctggctatcagaccgctcgatctgtacgtcgacccgactatctatcgctgtcggacttgactcttttgacctggctcgactgacagttgttgttggtctgtattttcaaaccgaatgccgaatgaatcagctacctactatcactaagaacgaccctttgtttggttcatccacctcggcgaacagactctgccttgggtttgacagcgagccaagaaagtccgcgccggacggacaagtaggacgaaaacgaagactgatctcgttcgaagatggagaggttagtgacatgtttttatcttctcttttcccatgtcttcttcgttcttcctctggcttctttctttctttactccctcttctttctagaatatgagctagacgttgacgacgcatatatacttcttatatattctcttctctataaaagacaatgcccaccgctaccaccacggcgtcatcctccctgtctcgtactcaaaccgagtcaacctcctatttactgagcttcccagacccatttcattccatcccattttactacgccacccctccgataaagcgtcccaatcagctgtccgacccgaccgcttcagacaccgtcgttccgaactcgttctcctctgcatcctcgaactcgtctttgtcgaacgtcagtgactttgcacctcgaacgccgaaagaaatcgtccgacaagttcgtcaggtccgtccctcgatagaaaagaaggacgacaccacagacaccgtgtccgactggctctctggcatggatggactggacgagagagaagccacggccgaaactgaatcgacgcggccgacagaacgtccgtcccatcactccgccatccaccagaccggtcggggcagaaaaggcggccgagatttctggtgaccgatgttcattgtaggcacggtcacggggtcttctttgtttctctgttcttctattcgtttttgtctttgtctcttttccttactataccttccatttttgtccatctgtcgtcacgttctgtatccctttttttccctttttttctttccatcataccaaaaaagagcaagtcatccacttatttattttcattttgcatatcttgttcattccgttggaattggccatgtacacctactttcgtttctatactctctcatttctttcccccaaagttgataccttgcttgtctcttttcgttcgtttccctttgtttgtactctggaaacccctttctctcccttctctttctcaacacatatttcatttttcgctctctgtgacccgccttcattcgttgtgttccctcgacgttgtacctgtagacgatgcatggcctatgttctttctcatatctgctttactctgttaggtgcaatcagttgaactaaggaagttagactgtcggaaaatgaaactcggcccggcccgaacttgccgagacggtaatagcgttggggtttgtcggcaaaaaaagtaccgagaaaagaggcagtaataagtgagcgcggtgtaggagataagccaggagcgaggactgactcactctttcgtgattctcatgatagaacggcgaaggaagagaaagagaaggagaagaataacagcggcaacatcagtatcaacggcaagatcaatggcatgagaaagagaaagatacagatcagatcgacagaaggccaaactgcatagattgccgataaagcaaagccattgagagagtgtacaatagggagaagtaagaaaaaaaaagtgcacagtcgattaaaatcaacccaaccgccttcggggttttatcgtcgtcaaaagcgcacacgctcttttctctctctctccttccctctctcttgcgtcctctctcacctgaccgattgcagtagtgtatcttagatcattgatcccttatccttccctatctcctctctacgatgaacacaaccagacggacgttcgccacttcaacagtcagacgattgtcatctgtgcctaaagctcaagtacctctcaactcgaatcaacaggtcgccagtcagatgtcaaaatcctcgtccgccaaaggtatctccatcgagtcaattcggtgagatttctttttcttttttctttttcctttttctttctcttttctctctgttctcctttcttttctacatcctgttcttcagatcgagtcggatcggccttgtctttcgtgttctacgtcgtcggcgttagaatccatctgggttctcgtctctctttgctcctctttcagctcgatcggtgtcaagaaaaaaagggttgagagttcgctctcttatctcattcttttcttcccatcacttttctttccctccgcttttttcttgtttcttgactctggtgtacgcttcgttgggttaagaatgcgagacgcgatgagattcaacgagtgatccgaatctaaactcgattttttttcttcttttcgtcatcctttttagacccgccgtgctcaaagtagaatacgctgtgcgaggagctgtcccccaaaaagcaacagagtacagcgaaaaactgacgtctggaaaagggaaagatctgccgttcgacaagattgttcatgccaacatcggaaaccctcagcagaccgggctggaccagaagccgatcacctggtggagacaggttcgttgctcgagcgttctatgtctctgtcatcttgatccatagctaacctgacttgtcactccatcggacccgtcatgaatagatcgccgccttgttagaatacccagcattactggaaaacccgttaagctcccagatattcccaaaagacgtgatcgaacgggcgaaagagttacaccatgacattgggtccgtcggcgcctacaccgggagtaaagggctagatagcaccaggcaacacgtcgccgcttggttggagagttcgtcgtctccttttgtctctttgttcagttgatcagaggcgcctgacgcgtaggcttttcctctcttctgttcgtctccccttcacactacagaacgagacgggttccctgcaaacttccacgacatttatctgacggccggagcatccgccggtgtggatcttatcatggatgttgctgtttgtcagggggacggtgtgctgtgagttctttccgtttggcatatcaagtcagaaagtccggttgtagaacaaacctcaagtgagcagaaagagactcaaatagaaaacgcctttgttcttgtgttcttgggtcgatctttatcttctgatcctcttatataggatccccatcccccagtacccactatacacagcgacgctcgcctcgcaggaagcagtgccgttaccctactacctcaacgaagaaaacaattggtcgtttgacaaacaatctgttctagaggccatcgagaaagcaaaagcggacggaacaacggtgaaagctgtaggtcccaacttttgtcaatgcatcgttcgaggcgccgtctacgaggagattctttttttttcccaatcttacaatctcttctctcgcccttcccttcaacagctcgtcgtcatcaaccctggaaacccgacgggtggatgcctctcgctttcggatatcaagacgatcatctcgttatgtcaccagcactccatcctcctcctcgctgacgaggtctaccaggcaaatgtgtttgatccagagaacaaaccattccattcgttcaagaaggtgctgatgagcatgacggaagacgttagatcatccgtcccgctcgtgtcgtttcactcgatctcgaaaggttactctggcgaatgtggtagacgaggtggctttttcgaaatggtcaacattcccaaagacgtctccgaccagatcttcaagatgagctccgtcgcgctctgcccgccactctcaggtcagatcggtgtggactgtctcgtcagaccaccgagtacggatggagagagttatccgctttggaaggaagagaccgatggaatattaaattcattgagggaccgaagtctatttatgcgatctcggtttgataaactagaaggcgtcagctgtcaggaagccgaggtgagccccccttttctcttttttttttcttctcatactcttcatcctgcgcgtgatcattcaattctaacaactttatcttttcttgtctctgctgctctttccatcatcacctgttctctttctcaaaaagggcgcaatgtacttgttccctagactgaacctaccgcgcaaagcaatcgaggccgccaaagccgccgagacgacacccgaccagttttactgtctcgctctgttagacgcaacgggaatctgtctcgtccccggtgacggtttcggccaggtcgagggccaggtgcatttccggacgaccgcgctcagcccgggtgtggagagctatgtcgagtcgatcgaaaagttccacaagaactttatggagacctacagggatgactgagcgaactcgttctcggactttctttcctttttcttttctgattcttctccctttttcgacctgtttcctgtcctgccatctcggttctttttcatgccctctggatctctccgtccgggcttcctacttttttttttctttctctttgctctctctctcgctctcgcaataacacaccgatatgcttgcttgcactttgtatgatctaatccccactctccctctcctcccctgccctcccttccgacaccctttttcttctatatttatctcactataagtcgatctgtaaatcaagaaaacgaaaaaagggctgatcgagtgaatcgagttatgataccacgatctgaaaaaaccccggggggaggaggggcaaaagag

SEQ ID NO: 1521 - DNA, 27371 bp, Xanthophyllomyces dendrorhous
ggaaacttgaagaaaagagcattggaacgatgaaaacaaaacaacgagagcgagagggagatcgaccaatagacagattataaatcgataagcgagttacaaggaagaaaaaaaaagaaataagaaaaggaagataggaaagtatctgattagagaagaagtggaatgcggcaaacagggcaacgagggtcagacttgaagaagacaagtcttgagagggagcaatattgagacattgactagcaaaaatccctagaggaatgtatcgaaagatggtcaactcatgcatcaggccttgttggcagtcctggccgagctattttaatgaaagccaacacagaagattagagaaaaggtaaagaggattcacgaattgagctcgatatcttgtgaaaaaaaaagaagaaaaaggatgacaagaagaaaaaaatgaatcttactcgtagttcttcacaaaccaatcgatgctggctttcatcgcctcctcgaacggagtgaactcaaagggagcacctccattggccgtcatcagcttttggagtttctcgttggatgccttttttgaacgtttacaatacacaaaagacacaagagtcgcgtcagtttgatcagtctttgtatccgtttcggtcagatctaaaagatccatgatgatcgaaagatacttacaggctttcggaattggccatcagatttggtcgtgtcgaactatcaagccaaaaaagaggaaaacgtcggacacaatatcagcttcagtccgttccagtccaagacgaccgacttggaaatgtgagaaaagatattgaagtctttaccgagtactctccctggaagtccatgagcttgacgatagtatccgccacagtcttaatggggatctcatcgtgctcagcgactgtaatcaacaaagagattgtgagatgggcgtagatatcgctgcgggcaaggacgaattaaaaattcaaatctggcatcttaccactcaaaatgaccgggtcgatctcgttgtactccctcaacgtccagatgaacaacttggcgagatcccgagagtagatgaactgtcgaagcggcttgccggttccgtagatggtgaaaggcgtgttgttttctagaccaccaggaagggtcaagaaataagttcaaagattcgatcagcttacaggcgcaacgccatgcgaccagccaaagatcaggatgaaccgatagtcacgtactcttggccaagtagcacttgtgaatcaatccaggaataacatgcgagtcctctagatcatagttgtcgtgctctccaaagatgttggtggggatgacggaagtaaagttgtctccgaactgatcgttgtaagcactgttccatgacgacgatcggatgtccatccgttaacccatcactcggtatacgactgcagctccagaaaaatttgtctaaaaattgaacacttactggttctgaacgtcaaccagtctctttccatgagcgtaaccaaagttgctctgatggggaggaccaaggtggactttggtctcgtccaatgggtactcgactttgtcggggaacacacaggtcgacagacaagagatgagcttctggaccttgttctggtgggaagtctcgagtacattgtcgttgatcaacaagttctctcgaaggaatgtcaacttgagtcgcatgtttctgtggcgagtatatcgtcgatcgatcggccgttcagaggaagaagttgagacttagtagatccaatctaaccagatctgataggaatgattgaagttacaaagtagggctttacctgaaaagaccaccgacaagagcagccaactaaaaccccaaccaaaacagatgtcggaatatatgagggccatgctttgagtctttgtcaacatgtgaaaactatctgagaaactcacgtgaatgacatgagtaggcttgtacttctcgaagattgcagtcacagcagcggggtctctgtttagagaccatgaagcaaaaaggtagaatcggagacgtttgtcagcggtctttcgaacagttcacagtcttgcctaagcgagattccaactagagcgattcgatgatgccagaacaagtcatagagagcactcacctaagatcaccatccttgctggaaaggaagatccactcttctccttcgagcttgccatatcgacttcctacaggctcattcgcgagaacatactgaagagcctggccaacgagaccggaaccgccggtgacaagaacgatctgcttggacattagattctagactgagagagaggaaagagagaagaagaaagaaataaaagaaaaggtgaaagcaagatgccagtcggtgggagagaatgaaatgaaagttggaaacatcccgtagatggaatcgggcaactttgctgactcagccacttgccgggcgggtcatcgtgcatcccatcgggattgattcagtatcatacatgtatatatccagtaacattaggcaaagaaactcgatgcattcattctcctccttgcatggccttcttgattctcagacagcattccagcaaatgaagctcttcatccccaccctcgcataatgctttgtcacactcagccatcgcttgggccgctgatgatttcggtcgagcagggatttgaggatgagtgatgattagatcgtgcatctagacggatcacaaatcacgttcaacatgatgagcttggttccgagtagcaatcaggacgacaagcagaccgtaaagaaagaaacgcacttgggataacaccgtgtttgcactccaaccctctcgcttaactctcttgacggccttgtgaacttgttcgaaagttcccttgaaattctttccgagatagcctccgtcaacctcgactccgatagaagccagcacaaaattaacaatcccgtcaggaacgtttccagatatctcttgaactatgtgtttgaatcaaagcaggtgtatgacaataacgatcagtggcaatccaggggaagctcaaattcatctcgagacgaataaagcactcctgcttcaactgacctgactcgcgagagatcggagttggcggcgatgtggctccgtgtaggcgcgaggccgactgaagaagagtgatcgctcgacgtaaatcacctcctgatagcttgataagaagctcaatcactccgtcatccctaatcacctgttccttttcggcaatcatcctcaacctgtcttctgtgctgttgatgtcgagagctctaaatcggaactttgaacaacgagaagctagaggctcgataatcctagcgcatataaaaaaacatgacccaacgacaatcagaatcctgacagcagggtacattgatagtcaatagcagaattgactaaccgagtgacgtagttgcagaccaaacagaatcgggtgatcttggagtaagtctccatgattcgtcgaagagcggattgtgcatcttgagtcattgaatcggcctcgtccagaatgatgattttatacggagggaatgggtaggtctttccgtctctgtagatgatatgtatataacgttgatcagaaagcatgatcaacaggtatagagatctgaaacgaataactgacgaagccacagcattggtattacgaggtgtctcttttgcaaaagacttgatcttctctctaaccacagagatacctcgttcgtctgatgcattcaactcgagcactctcgtgcgaaacgagtcaggtctaagtgacgaagaccaatacaacacgatttagctcagatccatcattcaaacatacatagaaagcttacccaaaaagctgtttggacaatgctaggatagtacttgtttttccagttccaggaggaccataaaagagcatatgagggagctacatagatttgaattttgcttcagcaacctgtactgggcacatcatgttgagagaacgagatgatagaaaagccatacattggtcgacgtcagtgtcttctgaaggacagcaacgacgttttcttgactggcaacatcatctatagttttcggacgactagatatgtaagcaagtttatgaccaaaccatgataagcgtccgaaatcgatcatccgaatgtacacaaaggagaatatcacttactatcgttcaacccaagggatagactcgttcgagacaaagtgcccggtctgtttcgctgtcgaccgatcaactctcgtgacatcctttgaagcttgaggcaagaacatttttgtcgatgccattatacgatctccttgtgcgacaactgagcagggctagaaagaaaagagagagtgcaagcaagacgacgaaggatctttcggacgatgttctcaaatgagaagagcgaagttgacgcgtcagagaaacgcgtaactcacgtcgcgtaaccatgctcataaaacgcgtaaccatgatccctcgagacgcgtctactgggacgcatcttggttgaactgattttccatatcatcaacctcaatacgttatagatccatcccaggcctgctcgacaactcgatcaggaaactatgagcccatctccgtccaacgcggtagcttcgtcatccaaacgaaaggtttctggtaggtctttgcggtttttgttttatgttgtcgaaggtatcaaattcgaatgaacagatactcaaataaggtgctcatcttttcccgggtttttcttctttttgtttttcctgatactttgtttggtcgttggttctgtaattccgctttgttctttgaatgaactacgacgatttggaccatacagatgacagagcaagcagtccatgcgatgtcattgttttcagtcctgagaaaaaacctaaattcacttcctcaatcggttagtcgtttgatcctcagtcgcatgatacgtcaggatcaacaatcaaactgggatcagaatatcatttcttctgaaatttctttctccgatttgcccatcgatgcttacatcttgacgttcttgtcgttccgatctctagtcaaactgcagggcacaagattcatactttctcaacgaccagtaccatcacttctatctcatgcgacttcgtctttgaaaggtgacctcaactcaagcttcatcaattgactatcaggattcaaccaattgaaatactgacgcctctttccttttcttcttcttttctttttgtggtgaatactacagagctgctcgagtggaaagaatggcttgcgtcagcgtcggaagatgataaggctctagggatgccgtcacgattcattggattgatagtgaagctttgtcatgaaaggtctttatttgcctctcaattctttacttctcaactctttccgtattccgatgtcgcgtgtcaatatatgcttacgcgctattctacttatcataacctcttctcttgtctgaattggtgtctacgttcaatcaatcttctcatccacagcgagaagaatgtttcgtctctctctcgatccctacgcgcagagctcattccggcaggcactagcgatcacgatccgaagagtggcagcacaggtaattgatgtccaacaccatctccttcaagaccaaactcatcgcgagatctacaagaaattgaaattaacaagttcaacgggtttggcatgttctcaaaatgtagcctcagatcccttttccttcgccaaactagaactcatcattaccgcccatctaacacgcacaaactacggtctgacacccgaagacgtcgatctcgctcctgattccaaaatgcccgctgtacgtgtatcggctgttatctatattttcctaaagtctcaacatcatgcgttcttttctgacatcgtgcgcgctcaacaggggttatttgtatggcgatgggaggcaaatggccgtaaagaacaccttccagcagactcactggttcaattagaggccagatttcaagagcgcttagaggtttgtctatatatcacataagcttgttgatctatattgcaagtctgacatagatccattgtgcttttgtcttcattaggtcagagacgcttgcaagtcaatctgggacaatcttgatcaactggaaaggacccgaattctatcaggcaacccatctggaggaaacgcaaaggtatgtcatcgaaggtgttctgtagagaccggcgtacgattaatctcattccgctttatcgtagacaaaggagaaggctggaactctgatagcgaaagtggtcgagcaggtagagaccaagtcaccttcacaaagcccccgcaagaagatgaagaaactagaggtgcagctctcgtctttctatcaccctgacaacgttctagttctatactgatattatcattctttatccaacaacatgaaggatgccgagaaagaagcccagaaagaagctcagaaagcagaaaaattggcagagaaggcagcagagaaagcattgaaggtaaggcgtcttgtaataattccgatcgagtaggcaagctggtgtccttacgtttgtctcctcttcctttttgcataggatgccgagagactagctagagtcagcatttcttattcttttttgtcatcattccacactcttcttcgcaatgctggttaggaattaattcatatatatttctgaaatacaggaagcggaaaaaacaaaaaaactggcagccaaagaatcttctctccgagacaagaaagcgaaggaagatagagaggcagaggtaggctgtttattctttgtctcgaccaaacgtctagtgaaattaaattctgtcgaccaagctgatctatcttttcaccatgtcgatggaaatccacaggtgaaaaacaaacaggctgctgccctgagatctttcttcaaaaagcccgagccagtcgaaaagccacttcgacaagcaaccatccagggtgcgcatcacattttgaccaagttttcgagtcgacgtaatgggcggctgaacttgcattctatcttttcgataaagtttccgactttgaaaagacgtttttgccttttgtacagaggaaagacgtagaaatggcacccatcaataggtttaaggtggaaaaggataacatgctgaagaacgggatcgaacttagtgatagtatggacgtagatatggaatgcatgagcgctcgaggtatgtcggcgtgtcgatttaaattgttcttctttatcttctagatcttggtttaatgttcttgaaacctgtgtattcgtgaccacttactttcctctttccctcttgatcgttccaaaatttgtagaccttctgagcagctttctctccggtgtagcaccatcgcgcatacctcatcgtgttgtttatccgtccagcgccatcaaaactggagcggtgaaactatcggtcagagacgttgtggctcaatcacaggatgcggagatagcaggtaccggagaccctcatcagatcacagcccagttaagtaatcaaaggctcttcaagagaaagttcttgcagttcagggaagatattcgaccggcatactttggttagtctgcattttcttctgatctgagttgggttcttgctctttcctccctctcgaagacatcagctgagtggctcgtccatattttcctgtaggtacatggacccaaagctcaacacttatcggacctagaacgccgttcgctcaggatatgactcactttgactactcatatgattccgggggtgactgggaagaagaggatgaggatggagaagacgttcaatctctctccggaggcagtcctagaccaaagaagtctaccggaggcgcgaacggcgccgatgggacgatgtgggatacagattcgcaggatgatgatttcgatggggacgatgacgctgactccgaggacgaagatgggttctttgtttccgatgatgaagctttagggggtccagatgatgagattgcgactccggcggtggctgttgtagctacagaggacgttgagggagcaaaaagaaggaaggagaagagtacaaagttcaagaagagagagattcaaccgctcgtcccggtagttcggggtccttactttgaacaaactctcgggctgtgcccttcggatatattccaaggctatcaaatacaattcctcaatggtgtgttttgttcctcttggtcacttttatcaatataatcggccagctgcaggaaagctgactgacggtaaatttcgttcaaactgatctgatatgaaaatgactttcaaccgacagacaccccccttggcttggatccgttcacttatgtggccgagtctattcgcccggctgctcgtgtgcaaaattcatcatccgctgccaatggtttccaaaattccctcaccaacggctcatctcatctcaatggcacaatgcctcctccgtctaccacttcctctaccactaacgccgccaaccaaacccattcatcagcgagtttgaaaacaaaacagaaaccaaagctgacgacacatccgttatcggtgtcgcccatagatggaaattcttcctcagtacagaacctaactgcccgaccacgcgcgccgaagacgccattcccgacccaatacttggcacaatttgtagagattgtagctcgctcgagcaaacctcaatttttgttgttggcagatcttcaggaggctttcaagtcggctgggatcacgaaagtccaactaacggaggaactgaagaagagagcgaaacgagttggaaagacggatggaagtccttggaaagtggtcgatgaggcctgggttagttctctatagtcatttggtccttaggagatatgttgattattacctctgatcgctttctctttattctttcggtgatgatgatgatgatgatggtgatgatggtggtcagatcgaagcaggtttaccgataccctcgtagggaaaattaacgcatgtctctttgaaacctctctccaactatcttcttctcttcacgtttgtctgttggtcgattgccctgtcaaaaaggtcgatatcctgatcgccatttcgatcctccttttgcatccttcgcttcctcccaatagtccctcctttcctttgcctgatctcttggctttgccctgttttccttttttttccatttcttctgtgaatttttaaagtgaacagtatatatgtatatgtacaatccgagcctatcatccaggccgactggcaacatgaaagattttgatccaggcgtcgcttgcagggttcgataataaccgatatgataaatttttatatgtttttttttacacaagagatgcgaccaagtcaaacgtttgaaacccttataacccaaaaatgaagaagcaggcgagcgaaaagaagaaaagaaaaagggaagcaaaccctaaagcccaaataaaacgaaacaaaacaacagcaaaaaagagatactgaaaagcaaaaacggaacggactagcgaacggtaaacgatggacgattttgatagcgagaccgaatccacaacgaacctgagcaacctgagcatcttagttttggttaaactgatataagacgacaccgaaaatagacataacgaagtaaaggagaagaaagaagagtggcgagacgttccagttttgggtggattagtatccgacaacaccgacgctgaaacccttgtagctgaacatgatcaggcaaacgggggatcaaagcgcaaaaagggacatcaggatttgcggttgatggaaagagatctcaaacgcgaacaaggaaagacgagaagaagaagacatacaaggcgtgctgctcggtcgagggagcccactcggattcgtgaccaccgaagaaggtctgtacagaggggcgtatatcaatctagtaagttttccaaatttctattggcttgctatggaccccaaagtgagaagaagaaaggagggacagtacgtacagagacaaaggttcccttgaacccggcggctgagttttctctgatttcgaggttgtaagcgctgatgacttcctggtcgtcgacgatgagcttgataaacccgttgttctgaccgacatcgttcagtcggtagtgttgctgaacggtctgccatcgacctgtaggcacagcatgagaagaacacaatgatagacttagcacgctttaaatttttacggagaaaatccaaagagaaggacaggctgaacgaaccggttgaccagtatccgtttcctcgaccgaagcttagaccgtaagcgtcgttgttgcaaacggcgccggatccagaagcctcgcacgaggccttgttggcgtccgtcatgggaaggtaggtgtatacctccatagcgctgtgagtttgtcgaggaaagtgtgaaggtcagcccaacatgtttcatcagaatctgacggtgagtacacttgttgggagagaaactgacccattggctcgccacatgagtcggatagtgtagcaggtatctattagggttcggtataatggatgtcagcagctgcggtaagaatgtagactaatgcgtatgaagagaattgagcgagaaacgaacctcgaccaacttggcttccacccgagcaagtgtagaatccggaggatccaccgtacattccaatcctaccagagaacccgggaagacacgttagtagagggaaacgaagagaaaaaaaacgtattcagccaatcaagctgagaagacgctcacatctttcctccgagaacccaatcgaatccgggggcaaagtagactttataggtcaggacgatttcctttgcgttcttgatgtcgtcgctccagtttgtgtagtagctcattccagacgcactggcagccacaccagccttgtaggtgaccgccagagcctgggaaccgtctggtgtcctcttggtgattgaccctccagctttgccgaccgaagcctggagggcgttcgctagggtaactttcgagagcgaggaggatccagaggtggtcgttctgaagccggagaggtagttgaagctggtagctcggccatcaagatccgaaacttctactggagcggcgagcgcaccaagaggagaaagtaaggtagcgagaaggaggagtgacttttgaacgagcatctgagtaggagagggtcggtatctttctggaggatattcgatgaggaacgaaagagggggaagaaatcgagggaaagcaaagagagtgggtgtattttacagagaaagaaggaaagagaggagagatttgtctcgcccatccgatcattttgaacgttctcgttgagttttccgtctcagacattcattgcgaccccgaaaggcgcgcactgtttcatcggagggacattctcttctatcccgtgcacgtttcgacaccgaacctaacgatttcgggtagtaggtgttcggcctcttttatttggtattctgagtttgccttcttccttaggaaacgtgtcttggggtgtgagcttgagtgcacccgcgtgcgctaagggtacgggtgtgcgccatatatgtgtgttttggtaccgaatgtttgtcctattcattctgttgtttactcaggatataactggaaggagccatttgttcgaacgatgttcagcctgcgaggaaggcggaggcgggcaagctcaggcaccggggcaccgggactccaggactccgacagaaataagcactgtcggcgtttagtacggtctggaacttgatattgttgggtcagggactaacccgggccgatgaactttaccccgccatcccacgtgtaattggttggttttaattatgttgctagtcaagtgaccggaagaacgtgaagcttcatttataccgtatagaataaggacgacccgctttatatctgctctttcacttgagaccagtctgatgggaataacgtgatatcataacggagtaagacaggaaaagaatgaatcagaaagaagaggaagaaacaagcagcactgctgtctgtattcaaagaaacaaaaagaacgccgtccttcaaggacagacacaactcgactttacaaaaatcgaggatcaagaaaataaaagaatcggtagagcgcagactctgtcttatcaagtgatgtgatcagaagaggtatagaaagagaaaagagaaaaggtttcgtgaatttcctcagatctatgcgatgactccgacgctgaagtccttgtagctgttggaattgtagatagaacagggtcagaacgatgcttccaccgatacacacatgaaatgcacttactatgcatgctggtccgaagaaggagcatactgagacccgctaccgccaaagaatgtctgttcataattaatttcatcaaataaagtaacggtctcagcacaggtgattgagagacaaggcagtgtaggttttgcaaaatcgatacttacagaaacgaacatcccttggaagaaaggatcgctcgtcgctcggagctccacattctcagcgtcaatcgtctgaactccgttgacaacgagcttcatgaatccattggcagatccaatatcgttcagtttgacatggatctgaacagtctgccagctccctaaaacaatcatcatccagttcaagattttagaaaggaaccagttatcagagtcagcatcatgttgatcaactcagtttaggtggtcgtcttcagcttgccaacaacaccatcatgaaagaggcacgaaccggtactccagtatccgtttcctcgaccgaagcttagaccataatcatcatttgtgcacaccgagccggatccagaagcctcgcacgcggccttattcgcgtccgtcttgggaaggtatgtgtagatctccatagcacttttgatgagcaaaaacagaacagaaggtcctccacaaccatcaatatgaacgttcaaacgatgtagcattttcattctcttgatgagacttacccattggtcctccacatcaatcgaattgagttacagatgtctatagaccgatttaaccagacgagagataaattagttccagggccgaccacgacagacctttcttgagagaaaagaacctaaaacatacctctgttttcctgagaacctccggagcatccatagattccatcttgacctccgtaggaaccgaccatctttccaccttgaacccactggaaaccatctgtaaagtaaacagaataaccgagcacgatctctgttgcgtaacggatagaatcatcccactttgtatagtaactgatcccaccggaactaccgtactttccacccagataagttacagctagtgctgtcgatccatccggggaggatgtgttaattgtaccaatctttcccttggaagccttgatggccgtgttgagagacacgctcgtcaggccagaagtcgaggtcgaagagcacgtccatccagacgtgaacgagtacgagctcgcagatgacacagccgatagagtaacagccttggccgtagaagcagaagcagaagcagaagtagtataagagcttgattgagtattgatggtagaagaggcggcagtagctgtagtagcggcagccatgggggtcgtcgtggccgaagcagcgttcacggtcgaagatggctggacggcagaagacgcggctgacgaacatactttccgctttgagactctcttcctcttccgctcgaggtgcttttcccgcctgaccacatcttctttagttacgtagttctcgataacaaagggttgagctgcccgcacagcttcgttagacttggaagcctccagggctctcctagggtgtttgtgctgacggaacagtccgccatgctggaatgatgaagccatgatcatcactggaagtgataaggccagaagcgagtttgacacgagcatttttagaattgaggtatatgtgagaaagagaggggggataggaaggagtgaatgaagggatgacaatcaaccaggatcgtctgaggggagagagggatgggtggacgggtgagaaagagagagaagggagaaagaaagaaagacaacaatgacggaaacctaatcctcacgcagtcagccgtcatcagttttgttgaacgatcgtcttaatattctctccccccttgcgagtctttctctcccatgccgttctcgctcacgatatagccggtttacactgttgtgccgaggagatagttattccggaaaacatgtatcatggcatcaaagttttgctccgaactccggccttgctctcctagcctccctcttcagtcgttctctcatttccaaccaccatgcgacccctatttctttcccttcgtccccaagaccatcactgattccgttccaaactacttcgaccatctcttcccgtcgagatgtctgaggtagagtgcgcgagaagattatgtcctctgcttgagccagaaactttgtcaagagtgggaacggtatcgtaggcaagagagagagatatactagcggaagcatttggtcatcttctgaaagactcgctcgatcggtagggatatccgggaaagaattgacaatcttgtaaaggcaaacttccacgactcgagaagattctgaggaggctcggttaaagagtatggtgaacgcatgttggacttgttcggtagagagacgcttggcgagcgcattcttatcagacagaagaacagagagcacaacgtatagcacatgtcaacacgatattgacacccgcttgacgacagaagagtgaacgaaacaatggaagaaagcggacttactcttatcaggcagtcacagtatttcagtatcagttcctccgacccggacgatatggcattcagatcatcatggtcagacgaccgtggaaagcgtagtcttccagagaagatagcaagcatcaccgaatgcgaagattcaaacacatccttggatgtgtcatcctccaaatatctggctcgggatggacatgaggaaaccccaagatgaaattgtgattcagcaccctatatcgacatccaaacctgaagtccagacacttacggataaacgttgggcaggatgagttctctcaatatctcatccttgaacacatctaccccaacgaattgttctacaaccaacaaaagataattgatccgagaaacctcgcctatctcgcccttccggacaccctcgcgcagagagcgtatcattgaagtcctttgctccatcgaccacagcggtccacacgccatatcaatcagaccccaccagacatttccaagtccaacatgggtagaaacccctccaagcttgtcgatcagagatgcggatgtttgaaacgtcatcaacatgtttttagacagcgtaaatgatgccaaggaaggaagagaggatgaagcgataaggtccagcaaggattcgtgtattggaagtataagcgaggtgagcccctcttgatatttctggttgatagctaagtatcgaacaaaattccatagagatgcgttaacgagatctttgttttcttcacaaaggcgactacgtaaatatacaaacctgttgtcgagtcaaccagcgactccggagatattgataatgcgtattcttgtaggcgttcgcttagccgaacaatctgtcgggtgttcacagacgatttttctgaaagagacagttcaaaagtgctgatgactatccggatcagagtcaccaggtctaagtattcgagggggtcctcgacatcgagagaagaaggaaagagatctattattgtggtgaggatatccttccgataataagagagtaatggagttgacgtcagtaaaagtgatgaaaaagccagttagagtggaacctggcttacattcgtctctaaggcagcgatagatgtcaaatcgatctgaggtaacacagatgctgccaggatcaccacaggaggcagacgatctgatgacaaagaagatccttttagccataagagcagcgcagtacctatatacacgacacaaaaagacacgcataccagaggccttccgctttccaagggccttcataccggttttgagcttctgaaacccaagctcgattgcgaccaaaacctcgacctcgacctctcttctcaaccgggcatcctgttgctcaaggcatagtccctcccatagaccaatcagagcagctagtttggaggctgaacttgctgtaatatcgctggaccatatattacagagcgttcttgcccattcggtcatgctctgattagaggagtttgaccaaagattgaaccatccgcgtgaaggtggagggagagtgagcctgagagagacagccgtctgaatagcctgacggagaagactgagattagttagagaatgatccggttggatgatatctttagcccaaggaacgagatcctgtgaggcagctgttgccagttggtgaggaagagtagatagtattgccatggatcgaatgtaggtagtgttgagcaagaagtatgcatgtgtgtatgagacagaaggtgatgaccgggttttgagactttacggcaacggcgaatagccggccgcaagatcacgtgatcttaagatgtcgggcagaactctcaacccaaaccgtcattcttcttcagagtcccatcaaccatgtttactcctaaagctcgtctagctcctttggcaccctctgagtctgatagcccttggacaagaaaactaaagtcttctcagctatccatagttcaatctgcgttcgatcaggccgttcaggacgagacagcgagccatcaatcgatatgtatgttgctcttaaacgcctgtcaattggcctcatgaaggactgatcgtataacttgtccggatggtaccatacgtttctgtgatagaccaacacttcaaatctaagctccctgagagtctcatactggatgatgatgtgaatctcatggctttgacggatctttgcgacgtactggcgttgcagcctactacaataacagatagcgcgcaagtccgaagtctattatctccagcgcgtcgtttttcgtatcaggcacactaacagtttgcgtcatggtcgaacatacctctagaattctttctcgaattcaagatttggttcagcaaggagagtctctgaatgaagcgctcctttgcgctcaaaaagctcagtccatctcacagaaggaaggtaagagtttaacagcacttaaacagtcgttggtacagtaagtgttatcaagcacctgtcctagtttttgcgaaaattgagttcatgtcatcaactacccttacacacacatgtgctttgaaactctagcctcgatcaataccttgcttcgacgcattcagccacaccatcaacaagtgcctctcaggaggctgctatgatagacttaaaatgcaagcaatatgaagaggagaaagtcagtttttcagttctctccttctcttacttatccctgcatacctttcactccaaaataaagattctttttgaacgagtttgtttctgcctcctcttcaaacaggataaattgctttttagaacacaatccgactcttctcttagtatatccaatctcttaaccctaacacaaactctggaaagtgtgagggccgacaaacttgctttaagggaaaacttggcaaagttcaaagacttgcccgccgtgcgcttctctttgtctagcctatctttgtcatacgagatctgcacgtgtggctaaccttttcttcatgatataccgttggattttgatggctacaggacctcgatctagctgctttacaggttgaagaaggacgacgcgaattagtgcgtcccgttcggccaaatacatatttcctgtccttcctttaccacatcacactacatactcaatctcttctttaaccgtcaatttgtgatgtgacaggccaagctagaaagtcttcgggacgaaatgaaagctcagactcgaaagctcaggatctaaattcaacctgtagttttggacgacgcatcttaccgaatgatacgtcaaacagactgcttgtcggtcaacaagcaacggtggagactctaaaaagttaacctctcgatccataggttcccgtcggagccgtttggttttagacagaggatttttaaggttgcgagattatgttcacgagagtgctctccacacacatatgcgtcctaagtaaactctctagccttctcagtcaagtcctattcaatcagacaaaactcctgtaatcgatacgagggtagtttattttatatggtgtaaagagaacagaagggtcatagtcgtgatatcaaattatgtcaatagaaatgcctcatctacggctctccttcaggtctatagcttgagcgtaatgtcctgagcttatactcgcttcttcccttccccaatcttcttaccagtacccagagccttctttcgctgggagatcatgtatgtgtagagagcgtagagagctgattgagatcacacgaaagagtcaaggtttcgatacagtagagagtgaaccaggtcagaacagagcagaacagaacagaacagaacagaacagaagaaagttgatggaagctgaaaactcacaaggaggccagactaaaagcaatccacctcgaacgagatccatcatatcccagccttgaccgcccatcttcgtagcccaaaatccaacagaagaagcagcctgacccaaaccaagggttttgaacacctgtcgcacgtgaggtccaacgataggcaagttgacagcaggaggcagcaccgagtaagccaagtagaactcagatccagcgccgaggggataaagaacatagaacaaagtgtatctgcaaaacgcgaaagtgaaaatgaaagatgagcgcatataggcaattgatgcgattaaataaaagtcactaaccgtagccagaggagggggtacgattcaataccgagaagagagaaagcgtagaacagatatcggacgatctcagcgcacgaccaggcaaataccattgtagtgtacacggacgacgtccgagccttcgtcagacagagtgatagtaaagagtgagtcagacaaacagacgtcgagaaaggggttcaaaccatacaatctgacagtggcagacatcaaagaaatgaggaaggacacttacagactcaaattgctcaacaacagcccagacactccaaagcctgctcgccacctgactgatcgtcgtcccaacagggctccttacccagcccaaggccgaatgaacgacctcgaggactgcacaggtctgcacaactgcagtaagtgttccgatggacgcataagacccctgtagtcgactcttgactatctcggcagatcgctgtgtcttggaagcgcttgtctgagccgaggcaagcgacaaataggcacgaagcttggatagggcagtcgtaaccggggaggtcgactgagaaggatgatggatctcagtagaagatacatgttgaacgatgaggacaaggatggagagccaagctgcagcggacgcaaggttataggcaacgagatagtacttgacgataggagattgagctcgagctaaagccatggtcgacgagaaggcagataataagatgaaagggaccatccaaaaggacatcagcttcgggtggtatcgacaatacaagtcaatgaacggccaaaggataacaagaactaacctttgttggatccagctgtctgttttctcctatcagcagtatctttcacactgtccttctcgatgatgcgagccatgaggagcgaatgttagatgggggtgatggttaaagagtcgaatgagatgatgaccgttttgaaacaagtggggattttaactggctaacttcagttacataaaacgactcctactaccttcatcatcactcgaagcacatcagcaggcactcatccttgacatctcttctttcagccatctacatcgaatacattcagcattgtattctgggcaaagtctcgtgcgtatatagttgcatgtaaatcgttagccggagctcaacgaagacacccgtaggcagtaattaattctgttattaacaacgccgctattcagatccttctctcgacttatctccaatggctctcaaacgattgcgctgctttgattgtgcttctttgcggcctgctactcgcaagttctctgcatcttcctatacatcgtatactccttctccgcccacaccagcctttccgtactccgcacccgttccccatcgggccgtcatccgagttgcaggcaaggacgctaccaagtttctgaatggattggcggccgttaagattcccgaaacgatcgagggaagccggtcattctatggaagcttcctgcatgctcaggtaagtcttccatgctgtttcgtttttcttctgattctcttactaatcacacatcatggcttttcttgatgaatagggcaggatacttcatgatacattcatccacctgtgtcctacctcgaatgctttcttgatcgagtacgacgttcgatcacccacatcatttctagagtctatcaagaagtttgttcttcgttcgaaagtgggcctgaaagatgttagttcagagtgggatgtctgggcagcttggggccaccaagatgctctggagcgagccaaaggaggtcagagagcttggaaatggggaaacggagctagcgcggcgttgaactgggagactgagccggaacgattgagtgatcctagcgagaatgagacgggtggatgggacttaagagccccaggaatgggttggagaggtttagttaagaaaggaaaaacccgtgagtcctttgctcatcgacgaacttttcatcagtctgatttcacaaccttcaaatgattaatttttctcatgtggcaccatacagcctctttggctgagacggggtcgagttgtcaagcaacagatgcgtatacccttcatagaatcatgagaggtgttccagaaggagtcgatgatctcgttcccatgtcatcattaccttcggaatcatgcctagattttatgggaggaggttcgttacaagtctttgcgagactcatctcgtttagtctattatcatggttgaaatctgaacatctgttgtcctttttccttctttttctattttcttttcaaaaccgtagtggacttcagaaaaggatgttatgttggacaagagctgactgtccgaacgtaccataccggtgtaattcgaaagagaatcatgcctgtacagctgttccctttagacaaatcgtacgaggttgactgttctcaagccatatttctcggacttctttcgtgtctggtgggccctatgagagaaaaagctgactcccaatcaaaaccttgcgaccccccttattcaggcctccctctgacctaacacctctgccaggaagtttcccccatcctcttcctacagcacttgatattcggctcaacagccttcctacctcggacacaccggatacgaaaccgtcacgaggtcgatcgtctggtcgactactctctaatgttcagggtattggtctggcgctgcttcgtcttgagcaggtccagactgtctggcgaggagagggctcaatgagtgttgtcgattccgaagggaatacatttggcgtcaagcctttcaaggtggactggtggccggtagagaaccccgaggaagggcaagaagtcaagagaagcgtttgaatgtggattatcagagatttctggcttgagagaaggaaatcattatatcaaacgactcttctcagtccgaatcttctatgatcttatattaaacgcccaattgatccatcacagcttgtcgcaccctgcgttcgtattcctgagcgcggatgaaaacacgtgtacatacgtatttggaaagtggtacattgtcagttgataagaaacaacatcttgggacttgacggatctaatttcagggtctagacatacagccttgttatctcgataaagtttgcagcagtcaatgttggctccagattcgacgttgggttctagatcatacgttcagattcagattagcgccttgtgccgcagataataatcaactggatatagaaggaaggcgtctaacctgctagcattgagatgactgaaagaagaaccttctccacgctctatgtagaggttatatcgcaggcgaatcagtgtgtgtttgaattgattacgaaaagatcgagacacacctgaatcggactccatctctctgaactgctctcatagccgtgaggatcctctccaggactatgcaagatggagatgcacacttctccattttcataaactgataacgtgacagaaatacaagacagagtgtcagaggacaagaagtaaatgctgtacaagcagtgcagaaacccaccgtttggatgtaagataggaggatcaaacttcatcttgaacggattcagcggatagtccggtggcttgtaagagtttcatttgcacataaagagaaacaaccaataaatcgatgcatcgatttcatgagttaaatatatcattctctgctatcatatagacaattagcgagatcttggtttaggagagcaatgaagcgggcctacaaagctaagcctagcaacaaagagacctccctcgtaaggcgtatcctctggtccttgtataagcgcctcccattcaaacatgtttgactgagtagggtcaagagcaggagatagagattgatatcaaggacaattagatcagtaagcgggcaatccaaactttgacaagcacaagacatacctcggtgattggacctgatcacatgagcgatgtcgccagaccaggagaaatgccacatggtgatcagcaaatcaagctcaaaatcatcgatagaggataggctgatatgagctactgtattacctgcggtgaagagaccttcgggtgcgcctggaagggacaatcgtacgcaacaagacaaagaagatagcatcgtcaatatcagaataacttcctggaggcgagaattagatgcgtgtaccaacccgaggaagtaagctgtttgtactctgtcatcagcctcctggctgcagtagaagattgtgctttcccgatcatatgcaatatctatatccgatgtatgagtttgatggaatgtggtatgatgtaccgatgatggacggacgactgatgtgttgtccggattgctgagaacatggtcacgtgactttatcgggggtaaccgcctggacttcttattttttctcaagttgttcgtggccgtcaagtttcgattctccgaccaacccaaccccactccccacgcatcctcccctccttcgcagactttagccttttactgcgaggtttaacatctaaaatggccacctccactccttctaccgttcccgtcacttctcagaatgacatcggtctcggatcggtcgttgttctgaaccagtatcaagaggatccttcaaacacgaaagctcaggatgttgacggcaagaccgacgcttacgtctcgtcctccaagactgaagtgaaggacgagcctgctgatgagcaagttgctcggcctaaactcgtgtacaattcttttggagctttctctcggagcttggtaggtttcatctctatctttggcgagcatgagcactcttagatcggggttccttatattcaacctctgtttccatttccacaaggtctctcgactccgttcggtcttcactcttcgattcacgttaagtctgcttgctggacaggtcatctcttggtgcagtatgtgccacattatgtatatcatccgaaccataaatcttttggtcgtggatctcaatcggcctttttactttgtctacccagttacatcaaccaaccttcttactaccaagctcgtcaaacggaactttgctattcctactacccagacatccttcttgtaagtatgccagtcttggtgggaagacttacattgcgcatattctcacacgggtttcctctcggttcatgcttctaaggtatttcgctctctttgtagtctacaccccttacacgatttatcgatacggagtaaagggctggttcactcttttgtataaagacggatggaagtgagtctggaagtttcttcattctgaatttcaaagagaagaatctgacatttcttctcaatgtgttcatcagatatgccctactcggtgcttgtgatatggagggagtacgtcagctgttgtgttctctaaaaatagagaccgccgcgaataatcacttacaatcaacgtctttagaactttttggtagtcaaggcatatcaatacaccaatctcttgtcttgcatgcttctcgatgcttgggtgagccttgcttcagcatcattcaaatcatatgcgcttctgttcttgaatgacctgctgatagagaatcaaaaccaaaacgaaatttgtaggccattcctgtctgcatgttctttacctttgttttcatgaaaactcgattcaggtcagcgattccatcttgttgagttactctgatctcttttctcactcgagtctcattattgtaaacagatgggcacaaattattggaatcttcgtctgtatcgttgggcttggacttttggttgcttccgaccaaattaccgacaaggactacaaggcgctgaacatggccctaggagacggatatatgatagtcggtgccacactttatggctttaccaatggttagtcgtatagcaaatccttctgataggctgatacttcacgcacagaactatcagctgactgcataatctgaatattcagctcttgaggagtttcttgttcgaaagcggccgttgtacgaggttgtcgggcaacttggaatgtggggaatgatttggaacgccgtccaatgctctattctcgaacggcatttgtggttcgagactacgtgggatggagccaatattggcttcctcttcctctacacgttctcactattcatcctgtacacgttggctcctctgcttgtgagtatctggcatttggtcaacctagatagaggttcgatgacaacgaatactgatgtgtttcgtgttcttgatgttccgtttcgctagtaccgatcttcgtcttctgtgtactagtacgtttcatcaagcatgactgttggctattctgctgattcagattactaatctaatgttctcgatataaaccaaacagcaacttatcgctgcgtaagggtttgatctcatctgacaaagtggctatgttcagggtgctaacctttgtctcaacttgcagttacttctgatttctacggactccttattggattatctttgtactcttaccacccctattggttgtactttgtcgctgtaagctccgtatcctgacttctccttcctagctgtgtttgtaattctcaactcgcccggcttcttttctttatttagttcgtcgttgtcatcgttggtctaatcatttacttctggacgagcactccggccgagcagggacaactggatgtcactcgacccgactacgtgaaccaggtcttttcgcccgagggtgccagggtcgctggattcgctcccaaaggagatcttcgaaacgatcaagtctagaaaccctcttgtctaatttatcagatctctaacttgggagcctacccgaccttgtctatacatcatggtctccttctcgctcagctgttgctttaccttccagtttttcctctccttaaatatatatacaaacatcattgtctcatctatcttcctctaatctctctcggatgatatctctgtgatgaaatgctattcagtatcttgcgacacaaacacacggttgccatcgaggtggtgtgcagcaacaccgtccgcttcggccgtgaggagtggtcgcccgagaaatccgaaacagtcacgtgatctcgacgcacggacctcgtttcctctttgttcttgcctcgccttttccctctttgccttttcacctctcgctcatcacccagcactcaccactgtcgtccatctgtcctctttcgccatgatctctgtctctctcgtcggacgaagggctatccctcagttggctcgatctccttgtacgttttttgtgttcccgatccctcgtggacaaggggaaagacagagaatctctagacgagattatgtccaagcgagccaatcacatagagctgatattgaccctctggatttctttttccctatgttccttgctcttgtcttggatgtccgtgtcctttgtgtttatcctatcctgttgtatgccttacagactttagagcccttcctgctctttctttccggtaagtgcttttttcccttgcttcttctctagtttcactttgaagcgtagatattttccttcatcataaaggagggatcgagtgaactttttcacctggaaaagaatcatcatcagcagatcttggccgacacttttcattcacaacatatcgaggaatcccttttgactcgattgtatctacctttcctgtctcacgtatactgtattatatatagagctctttcctccactcctcgggcaaaggccgctgtggctcctatcgagcgactctctatcaaggagaacgaggctttgctcaacaaccagcgactcgtccgaccgagctcgccccacttcacgatctaccagcctcagatcacctggttggcatcgattgctaaccgagtcaccgggtgtgctctttctggtcgtaagtcgtgttcttatcaaattagacagagctcagcctcttatgtcttggttcttaatcaatcgcttatcaccttttttttcaaaatcaatccgggtctttggttgtttgtgatatgagccagtcctctatgtcggagctatcacttacattttccacccctaccttccctgggctgattctgctcaccttatcgatctcgtttccagtacgtagcttggtgttcttgagcaacgattgaaaaccgagctcaaacgtgtctaatccttgttttcgattgctgtagtcctccccagttggttcaagtactcttgcaagtttatcctcgccgttcctttcaccttccactccttgaacggaatcagacatttgctttgggataccggattttgtacgttgctctctgtgttctgttccagaaaccctattcgacaagaatcgctgacatgcttcttgcacgaatacttttgtttgcccatttgtttgcgatatgtcagtcctcggcatcaagcaggtgaacatgggaggttgggtcgtcgttgggtcttcccttatctctggtctcgctctggccatgtggtgatttgagggaacttttgatctctctttctctcttcttttttgatatcttagctttctccccgtccccctatatattctcaaccgcattatttcttccccccccttttttttcttttccttctttccgaccttttctttccggaatgaatatgtatttcaaagaaacaaagaaaaacctcgggcgagagagaaaaatcgtgctgttgtcc

SEQ ID NO: 1522 - DNA, 11411 bp, Xanthophyllomyces dendrorhous
tgataatagttctccccctctccgctccttccaaaagaaatcatcttcctcatttccttagacgaggcttaaaataccgggacaatggaatatcggttttatcaggttttttgaagagcaagggattgggggcaggattaagaatgacagtttcttttcttttcttcagagctctcgtgatcgagcgaaaggagagatctcggattcttctctggtgagatgaccgtttcgctgggagtggtgtcggtgcggagtatgatggttgggtctttcagggcgagaggtagattggatgaggctttaggtcggacggacggacggacggaaacggacaaacaacgggtttgggatcggttagctcagcgaagcggaaaaggttggacaagagatgtgaagaggatacatactcagagttgagcttgtagtcgacaacggttgatggtggtagatttagtatacgatagatagtttctctgtgattttttttgtaaagttagtcggagacaaatatcaaaattgagctccatcttctattaagaattcgaaggggaacaggtataagagagaacgattcatactttactctggcccctccatcggtatgactcttctccgtccaaacgctgatgacgtcctctccagttcggacgctcagaacgacaccgaccacgccatcttcctcttcgaactgatcacctacggaggcaaggacgagatcttcccaaagtctatcggccaagccttttcggagtcggagggtgaattttgcgcctttggggacttcttcccagataggaagtcttatggatgaggcaaacaggaggacatcggtcactggaggaagggacgaaggagggtttaggtgagagtatatagtccagaaagactcaatctgtgaagagcagagtaagggtaacaatcgttagtaatccttgagacataaccggaaaagaagaggagggcttgggactgacagatgcgaagcctccaattttctttatactgtcctcgtattgggctgccgttgtgatcttggctccaggctgacgatgagtgtaccagaacaaccagctgtttggagacaagatgaggttgtttttgggagcaagcaaaaaaagatacaagaattttttagtttaaatttaatattcattttggtgtgtatgtagcgaacaaagacgacacattcaatgcatttgaacagtcccaagggagaaaccaaatcacaagagacagaagggaacagagtatagacaagacagaagaagaggagacaagggaacgaacctgatccgacaaggatgcttagaatccttacttccagcagccgacccattgttcaccccactcaacacagactgggtctctgcagacgacattgagagtgagagcgttcgtttcccgctagacgccggagctttcgacgaggacgaggacgaggaagtattggttccgttggttcttgaggacatggttggcttttagtttatttatcgagtgaaattcagattgagcgaacggaagggacgacctggtttgcttctgggaaagggtaagaacgaagtatgcgtgtgtatatccggttaggttgatgaatgtttaaacaagcaggactgctgaaagaattttcttcttttttgacgtgcaacaggatgcgtctctggttttgatgtgcgagttctggtagtaaaatatgtgatccagtcctcaggtgacacgtttctcgagcagacgatacgaggcgaaggacgatggctgatgcaacttaagaggatagtcgaggcttgtgggagacgaggttgtttcttagaaggaggatgggatttcatctgggcagaagaaaaatcgttggcaatggcgagagtctttctatgttacgtaagcgtgtctctcttcgtcccaaccatacacaacaccttcgttgtcgctcaatgagttgcttgctttagataaggtttcaacgcctatactactcgtacatcaaccccagagtgtccttctctcttccacttagtatttccggcggctgggcgacctggacctttctctgtctcgaccactgttttaggaggaaacatatcaaagtaaaccgttttgacaagtcagcatttcattgtgtcaaggaaaagcaaagtgagatatcatgaaaggaaaaccccagacacttactcatagctcctcttgggtgctctgtcgtcatcgtagcctccccttctgtcatcgtatcctctcttacgatctctatcatcataacctccggagccagcttcgggcgccctcgacgaagcgtatcggtctcggctctctcgactttggtatccgccaggaggtcggtcgtatccaccaccggcggacgaaggcggaccggcgggagcgggatgagacattgatgcaggtgcagttgcaggggcatgagcggtcgggttcgatcgcttgcgctgtcgctcttcgttgatcttgacgagaagctctcggagctctttgtatcccagatgcatctgtcgagtgtgtatacgaccagatgagccgagagcttcaagaaaccctcaaaaagagagaagaacaaggtttcgaacatacctttccaccgaagtgatctgctaaacgacgatcggaatccaaaatactcagataagcaccgcaaacctcacatactcgaagcttctggtgaccggatgctccagaagtctcggcaagttgttgaagttccctctaaagtagagcatggtaattgagagagaaaatcacgcgtcaagtttttgtagttgatgagaaggctcaacgggggaagcaaacgacatacctccttgtccgccttctcagccttgagggcatccaccgctgccaacttttgaattgattcatcgaccttacccgcctcacctaagatcaagaatcaaaggccaaacgtgtttcatgtgtgatcagcttataactctgttgacttgggaggagtggaaacgatagtcaccaagttgttcaatctctgcggttccatcttgtatcgagatctcaatctctccgatttccctcatctatatattcgagacgagacaacatgcactaatggtcaacgagttgttcagacgacacctaaggttcgcgtgctgcactgtgatgcatcaaaccgcatccacagaccggatgatagtcgagcgaatggaacagaacaaggaatgaatactcaccaaagcggtcgtctttgcgttctcttcaggcgtcttctccaatcgcttctgagaagtatgaatccttcgatcacagtcatccacaaacatgaagatgttggactgccattcgttctcaatccgggcaatggccgcgtcgtccggtctgtccagctttgcgagctgatactcaatttgaagcttttcctgatgagctcgagggcagggtccgaggtccattttctgtgcggaagaacgatacaattatgtttcgatacagacaggagtgatatgagtaaagaagcatgtgtatgcgactagtgcaaagacggctgaagagaaagtaggagacgagagaacgaacagtgttggtgaagacgatgtgaggacacgtcccacaaaggtagttcttgcagaccttgtcgtcggtgaaatgcaaaggcacctgaatgatacccattgcctcggcacccatcatttgctatagaaacatcacgttgagttggagaatatccgaacggaataagacaagggaaagtgaaaaaagaaggtagaatagaatcagtgaaacgatgaatctagtgttggaagattgaacagaaaaacgaacctcgagcaactttcgctgagcttctgctaatcttcccatatttacttattatctgtggacgtgttatttctgatccggctgctagttctgctgctgttactactgctgatgatgttgctgctgctgctgccgtcgctgcttccgatgctgatgtcgatggctgctgctactgctgctgctgttgatgagagtgagaagggcaagatgcgaaaagtgagcgtaaccaattggcgtaaccttcggtaaccatgctcgtaaccgctcacatttgatcattcccttgcgcccgcttccattaatccatcccaaacggccagcatcatcagcattcgttcatagttctgtcgtcatgtttgagaagtaagtttgtgtttatggcgagtctggttgctctgtatggcggctaacgaattaggtgtctttgttttatcgcaggttcacaccaaaagaagatatctcgggtcagacgtccatcaaatcgtccgtccaacgatctattaggtcaaagatcctcgagcagcttcctctgctcgctgagggcgaaggatccgaggagggatctctcatggacgctctttggcccaagaaggagggtctcaccttggtcaaatggttagcactatagtttgcctcaaatattcagggcaacgtttcgtatatcatacattcacgatgtccgattgggctgattcgagaagttgacggaccatcctatcatttgtactggctgaccctgcttgttcttttttctttcccttcattccgtcatctgttttttttttcttgattgtctatgtgccatcctcccttctcggattttctaccctcaccggatcaacattagccgagatcacatctcgatatacgccctcaacggtgaacccctgttcttccagcactttgacggaccatactttcctacattgagaatactacacaagtgtaggttttgatgttcttcttcttgcgtatcctctggtacttggtcgagaaattcttcatttatatctacaatcttattctttcttcctcgcttgaaaattagatcctgagctgttgcctcatgtgaagatcgatcgaggagctattcgattcttattggccgtatgttccctcttgtcacgtaacgttaatggcgactattcgagagacattcagacctgattgacgtatacgatctctatccactcagggagccaacatgatggcccccggattaacatcgcccggtggttcgcttccccccaaggatcttgctttgcccaaagaaacacccgtggccatctttgcggagggcaaagagttcgccgtcggaatgggaacgctcgagatgggtactgaggacatcaagaaaatcaagtttgtcctcttcctctctgctctagttcgctttccttgctgttggatcacagaatgttgatatcgttctcggcttctcccttctctttcttctctccctattcttgcgccgatttatagcaagggtatcgcagtcaacagtgtgcattacctaggggatggactttggaagcaccctactttctagaaggaaggagaaaaagcttatgtttaatagcttgaaaggaagaaagagaaaagggaaagagagttatagctttttgactgtatcataaatgaaatattgattctcagagaacaaagcacccctgcatagagaaatctattcgaatctagatatcattttcatcttcgtaacaaggaaggcatactgtttttgtttcatcttgtagtctctccatctgcgttttgagactcaacaacgatgagcgggatactactcgtcgaacttgtaggtttacccatgtccatttccacatccgtcaaacttaaacgacggttttccacctctgttgttgtttttgtatccggttcctctgttccattgatacgtctatcatgggcaagaggagaagagggatggacagaattatgggatatggtcgattggttcaccaccgatggtgaggataccactgaatgagcagatttatccgttattgttgagtgtgacatcggaagatcagtcggcctggctatcggtgttgatgccggtaaagtcacaagcgaaggaaggaccaatggacaaggcaagctggtatcttgccagatcttgatgtggtagtctgtagcgatcgaggctgaagcaatcattggtttggttggatgtccctttgcagcaccaattcgcgtatacgaggtatcaagtatcagttgtcgcttttaagaaaggaaagagacaaacagatcagagagcttcgaaaggcttacagcaacagaaataacagagtcttgtttgaaaaggcaatgaagagaggttgaatagaggaaaaggttaagaaacttcggaacgacaatacttataacgcttcaacgtattcaaaggcctaccttgatgacctttgaggtccaacctctgttctctcgactgaacttcccaagcaactactctcccgtcttccgaccctccaacgacccagatttcctgcctatcttgtacattcccaccctctctaggcctgacgaggaacgtactcgggcaaccgtattgttcattcagcgcgccagaaaatgtcttgacagacttcgaggtatgaaagttccaaaatcgggtggtcgaatcgagtgaggttgaaagcagatatcggccattaggagtgaaagaaatatgtgcactgataaaagcgagttcagacagaacgttcttgttaaaactccacctcttcaaggcactccaagaagcaagcgcacctacatcgggacagactcttcatgaacgatcgtcttgagacaatggcctgtggaagtatcccacattcgacttggaaagaagttgagaacaaaaatgagaatattagagtacgattttaagacaaaattagtgacaggatcgcagggttgaaaaaaaacttacatcaaaccatcccagctacaactaaccaacatcgtaccatctcggttgaagttgacacccgatacaggatccgaatgagcgggtaggttcaagtgcggtctacctatcaaacatgttgttcgtcgatatcgtcaaagtgagaaaagacccaaagcgacatccaaggtcagacattgatcatgttccgtcgcaatggaaaccaaaaggaatgggaacgggaatagggtagatcacctgctctgacgtcccaaatccagacgcattcgtcttttcctccactagccaaaagattgccttgaggattgaaagacacacaaagcacagcgcttgtatgagcaagcagaggctcgtggattggcttgccctatagctctcgaatagacggattggcgtcgcacgaaaggcttcaaagaatcagtctgacggaaacaaccacgcgacaaagccatgacgcgcgtaagaaagaactcgagacgaacggtttgaacgccccatatgcgaaccgtcttatcgtccgaagcacttgctatcagctttgaatcgtaagagaatgcgatatcggatattcctgtgttttcgatgagttcaaggcagttaatatatgatcaaagctgcgacaacgatgaggaatataaccgacatattgacaaagtgtgcttaccttccgagtggccaacaagcacacaaagttctactcctgtctcagcatcccttgaaaatagaccatcgatgaagaaaattgcaagtgatgagatattcaattaggaaaaaacaaagctaagaaagatgagtcaatccaaccgaacatgatccagcatagaacaaaggcagaatgtcgcttggtagggaagcgaaaggctcaccaaattcgaatcaacccgtctttagcacaactcgccagacgcgacccatccggagagaattttagggctgaaagaacagaggtatgtccaagcaaggtctgtttgagcttgtaattgggtggaatggacgacgcagaggagcacaaggatgaggatatttggtctgccatcgtgtctgaagatggtcgttgatggcaagattatgaactatgatttcatccgacctgaccacggctttggcctttgggtgcacatccctgacctcacaacctttccacggatagatattcttcctgtccgatatcagccacatgttatggagtacatgtttcaagtgatgagcgctgagtctgcttgcgctcttctcttcatatatatacccgtatataaaacatagttgaatggtacctcctatttgatcagatcttcaatcaatcatgaaaaccacctgcctatcgtttcattctggtgatccattttcttcaccacacactccgtatcaagtttatcccctctatcttcacccatatcatccattagaacgagtcgtctgctcagcccttgtgtttctagaaggggatgatggatccttgggcccaccgatagatttgcttatgtaagcatcccggcccatcaagttcttacgtgtcgtcggtgtgctctatcaacattaactctagcctgtacaccctacctgctttccttccttctagatctccttattctatctctccctatccctttggtgaggatgcaaaagcgagctaggacagacgatttcgatttttcggaaacttcttccccaaagagagccaattcagaggaccctctttcggacggtgaacaaaccggtgggatatcatccaacatgagcttggtcgaccctaccctactctccagaggtagcggacttgccctcagagacttcgaagaggatgaggaagactctaagagaaccatgtctgctccttcttctactgtggcctctgggtccgggccatctagggacgagctcgctcctgcagagttgagccctgaggaaaagcttcagatgatcactagtacgtctatcttatggctcggttgctcgtcctgtaatctatgaagcatgagattgatcacaacatcttcttgctttcataacaaagacttcaagaaacagcccctcaacaaaggagacacgtggttcttgatagatcgaagggtacgttctcgactttatgccgcaacttttttcttcttctagacaatgggaaggcttgagtagaagataggggatttcttatacaaaccctttgttggttctcttgctcttcacagtggttccgacgcttttccactgccttttctagctctcagattactgaggaagaaattgagagcctcaagcctatcgataattctaggatcctggatgagaacaataagctcaagcccgacttggtggaaggaatggatgtagaaatggttccgtctacggcctgggacgctctagagacttggtttgtcctgcttggtctctctgttctcccgacctagagtagtgtgcaaattagacggaagctgaccttgaatcgaacaaaggtttgggtgtgatgtttccattccgcgacgggttatagaaggacaaggtcttggaaatgagcgattagaattctacgtgagtccgttttattaacgaccccatagattatatcttattcaattcatgttctactatatctgatggcaatgaaactactagcccccgaccgtcactgtcctcttcgtctcatctcctacaatccctcctccttccagtcctcctttcgcccaccttcgcacaccttttgagaaacccttctctgctgcagtcaagttcaaaatcttctcttctctagttgcccggtcgcactttaaactggtcccaaaagactgtcggtactggaagctaagcgccgacgtccaaatagagaatggaaagggagcgttcatcactccagatgaggttcaacagcttgagccggtcctcatcgaggatggtggagcggaaagtgagacgttggaaagcttaaacattaaggacggatctatcttggcgttggagtggaaaaacccagagatccctggcgcctcatggccattaagttctcttgtgggtcaaagcgaaggggcgctagacgttgggattagcgatcagcagcagcagcaaccgagccaagtgaccggatcgcctgccgcgtctcagggactgttctccaccccgggatacgtagctcagttggagaatgttaacagtattcctcctctagtgaaagagcccaaaggacttttaggcagtcttacgggaatcttaacgagatctaaaactgcgttgggcaacggatcgaatgagaggagcaggaagggagtaatggggttatccaatttgtgcgttggtttttcagttttgaaacgttgggctgatagagaagtaccgaactgaattaaatccgttttttcgctgcgctccaatatcattgttgtttatcagaggaaatacctgtttcatgaactcagctattcaatgcatggccaacacaaatgagctcaatcgatatttcctttgtaagctttgatttcttttgcatctatacattctcgtatgtctctcttcttacagcagtcatctgaatattcgttcttcgacgtcgattcagccgaagtctataaggatgagatcaatcgatccaatccacttggaatgaaaggacaagttgcctcttcttttggagatctggtctcccatctctatcacggtacctcctcttcgttctcccctggcgaattcaagagaactcttgctcgattcgcaccttcgttctcaggatatcaacagcatgattctcaagagtttatcacattcctcttggatggactgcacgaggatctgaacaggattatgaagaaaccgtatgtggagagtccggactggatgggaggaggagaagaggaactagcccgacttgcaatggcttgttgggaagggtacaagaagagaaacgacagtgtaattgtcgatttgttccagggccaatacaaaaggtttgtctcgagttgacatacaaagcatcttcagaatgtaagctctatactgagactgccattacgctttcaaaaaaaacattatagcacggtaaagtgtcctcaatgtgacaaggtttgtgtttgtatcttctgatcgctctacattcaaaatcttaacttgcttgcatttctcctcctttgggccataattacgcgaaaaaggtgtcggtgacgtttgatcctttcatgtacttgaccttgcctcttccagtcaagaaaaagtttgagaccagggtatactatattcctcaggatccattggcggctaggtaccaggttcgtgtagcgctccattgcgaattattaccagctggtgctcgactacgttctgaagcaagaattttatgttctctattctaggttgatatttctgttcccaaagattcaagcttcaagcatgtgaaagatctcttggctaaatggttcaatgtagatgccaaacgggtaagttcctcgttcatctttttttcatgcggtcgttgttcttaaatcttactgaccaagatgtctttactttcggattgaagcttatcactacggaactctggaaaggacaaatttataagttttggagtgatcacgaagctattagcgaagttgctttgtccgatgtaattgtcttctacgaagtaggaacaaatttgcgttcaaggcatgaggtgagtctaaagtgtctttgattctccattcgacgcccagatctgatgttcgaattgaaaaaaaaaaaaaaaaaa

SEQ ID NO: 1523 - DNA, 26845 bp, Xanthophyllomyces dendrorhous
tgaaaaaaaaaaaaaaaaaacattgatgcatcaaaggctatatccgtagaggatgacaactacgcagttattcctgtttttactgggtccattggtcgatgtttgtctatccttcttctgctgttccttcttgtcaatatagtatatcggtcaaagagacaggtctctgatcacaagtactcttaatagacaacagccagcccgaggcctatggcgctccattcttcatcacggtcacgagcgagcaatccaaggacgcaaaactcatcactgagttgatcattgagcaataccaacgtattcttccccatacggacgccacaaacttttggaagacggaggcagtgtctctgactagcgagcatgtggatgtggcggaaacccctgcttcgtctgctgagcaagtcgaagagcagatcacggagatcagggttgacgaggacggcgaggtcgagcagaaagacgcatccgtaccgagtcccttgaccgttcctggcactcctatggacgttacatctcctctctcacctgctgaatctgttaaagcttcttatgtggcatccgagactgtgtctccggctacgactactccggctcctcaaaaatctaaacctactcctatcttcaatgtccaagtgttctctaaccgttgggttcctagtgattctagagtcattccggacggcaagcagatgtacaacctccgagattttgacctcactacttcctcagaatcctcggacgataccaattcaatcgggcctactcagcctacatcaaccgaggcccaaccgctagtatacccaggtcagggactcatctgcatctggccatcgatggacaccgttcatcaagtgtttggttcagatgaaagcacgaacgcattcgcctcgacgtacgagactttcactgatcccagcgctgtcccagctgacccgaccacccgaggaaagaaaaaggcagttttgacgatcgacgattgcctagatgagttctcgaaggaggagacccttggagaagatgatctgtggtactgctcgaatgtcagtgcccttgaaaaacattgacgctgtgccaacagtctggaattaatccttcttgttcttgatctgtctcgaaaaaacagtgcaaagctcatcaacctgcaactaagaagctagagctttggaaggtccctgatatcctagtcgttcatctcaagcgattcggaggagcccggaaccttcgagataagattgacaatcttattgtaagtttctctcctctttcctggctttgtcgtctctgttatctgccaacgcaagttctcactctgcgatcttgtgttcgttcaataggaatttcctataaccgactttgatttggaaaaccgggttcaagaaagatcaacagctaaagtgcttgcatcgtctggtgtggatttagagtctcttggcttagagacgactgaagaacctctgctctacgacctctacggtgttgatcagcactatggtggattaggaggaggtcactatactgctgtggcaaagaatgttgaggatggtacctggtacagtttcgatgactccagggtttcttcgatcaccgagtcttctgtcgttactcctgccgcatacgtcctcttctatcgtcgaaggacgacccgacctatcggaggtaactcgcgtgttaaagcggagaaggcgcttcaagaaaaagcgatcgcctcactgaacgcttctgcggccaattctaccctgaactccgctgtgccctcgatctatggtggctctggtcgaacgtcgcctagtggagattggtatcctgggctacgaagcagcggtttggacaatatggactctatgcctggaggttttcctggttcatcttctgctccatccagccctatctcacccaactctatcaacgccgatctaggggatgatgaggatatgtttgaccgatcatctgtttcgtcacgacaggtggactactccaacacgtacaattctgaaggccaacttctttcgtacgactcggaagatgctaaaaattggagattcaactcgatcgaccgatcgaccgatagtccgcctggttgggtggctgatcaagagctggaacgacaggccgatctggacgagttcttagcatccggtaccaacccctctgccgctcttgctgcaccacaatctgcagcgttcaatgctcatccttcgccacccacatctgacgatgaggcgtctgttcctgtgtctgccgccagaccacctgtggatgaggattatgatcaactggcctcggaaaacaacagcgagggtgtctctgcctcatcctcgacgtcagctatgtcaaaagaaaattgggtggtcgttgaagacgaggcgaagccgtagggttacgtacctcagccttgattgatgcagagtagaatccattgggggttattcatcttgtcctggccggctttccgtctcttttgtctcttctgctttatctctctgcttgtttgttctatctgtgtatgatatagtatgacacaaaagaagagtcctaactctttttcaaactgaaaagcaagtatattatccaacaatcttatcccgttgatgtctctccaaatacttcaaattacgaggactgttttctcatcgccctttttctttgctcatcttgaaatctagatacacattcgatgcaaaatatgtttcttttcttgtcttggactaacacgtcgcttgtgtatactaaatgtgtaggggcaatacatatatgtctactataaaccgccttaccctccaatgcatcctataaggtttggatgagcataggtccttcgacatctcgactgaacggtttagtctgtctgccatgaactgggtcacaagcagagataacagtgccgatcgttcctcttaagaaatgttcgcaggctttgatagtttcattgaggactttcataggggaagctgtcagacctgctcgtcggttgacttgatgtgagatcgagtacagaaggaccaaacataaccatacagaaaagagaggtgaggttgtgatacaacgtgtcagatggaaagctgagaaggaggaagaaacagcagcgcataagtactgactcattccgggaagaatcaaaaacacatcacagaaggacggatgggttgatccagggatagtcagaaccgtcgattcattctgaacggtctttgttgctgccaggagacgatcaaagtcgtcagagtctgcgaactcttctgaattgacggataggaatggacaagtaatttggcccttccacgggtcgagacctgaattttgccagaaaacggatgggagtcagtcagatggtctaaaggcctaaagaagaagatcagatgttgaggagaaagactacgaacgctgcatagcagggtcagtagcgatgatagcacgaggattgaaccgaggatcagcggcggcagcgatctgtgttttaccattgagaatccaaaggtcgacgagagagcaaccaaggtgagtacgagattaatgtggaacaagaagaccaagagtcggttgtgcaacagcttcctctcttttacgggtcccctcttgtagagaacgacgatccacttacgacagccgttcctccgaatgaatgacctgccaaaacataattatctatatcgatgttgcccatccattggtctcgattgaatccttcgcggttctccgggcctactcgaatcttctctcctttgttgatcaatcgaatggcctctatcgcgccgtcgatctcggcaagcctcataattaactgatccttccgaaagctcgtctcatcctcaggttgcgtctctaggtctggccaactttagttatatggttagtgatgatgacaagaaattagccatttgtattcgaagcaaaaacaggaagaaagaaacgagtaggcgcactgaacgtccgtccaatttatgaactcgatcgtcctcattgtctgatcctccaacgtgatgaccgttgatggaacggtcccgtcccgatgttccatgttcgccacgacgtatcctctggaggctagttctccacagaaagcagaatacatcaatcgaggagctcccacgccatgactgaagataatgagcggatatggctttgaatctggcggagggagcaatcgggcgtctttatgagcaggaaaagtcgttccagctgtgaggatgctggcgcagaagtctgatgacgcaaaataacaaaaatcaacaatcgaacagattcatgatgatctcaaatgaggtaaatatacggttttaggaagggatgacggagagacttacgcgcaagccatttgtaggctaggttagccttgttgcccatctttaatagcccagcgatcgtgggttccagtctgagtttgcaagacgccaagtttcatcagagtccgatctatacgttggttctgatctcctagccaagagcactcgtggatctagccagaagagtgactcaaaatacaacgagaagaaggcgggagtagcgcgacttaccttggaaaccaaatcacttttgaagattgacccttctcaggcttacagggatagaataacgtgaacatgacggtctcgagttcaaagccgattttgggctcttgtccttctacatgacgccgggcaaaagtccccttggtctccttctctaccatgaattctgcatccctgactcccactttgtgctcaccactgtatgtgggcattgatcgggaaaggagcgctccccatgggctatgcccgtgaacggctgtgaaggccggggtgttgttcgtcaagcttgccatccagtctcgggctgacaatagatagagagtgagaggcagaagaaggagggataaggcaaatagtacagagttgtcctggaaataagcgatcagagaagataccgatataatcatgaaccagttggtatcagtttcgagctgagaagagaaaggttcgaacgttgcttgactcttgtcgttggtctcgctcaaattcttgtccgttggtttatctctgctatcccatcaaacgcgtcatcgatcgatagcatagtcagggttacactatctccgcacgcgtcgatcgacgttcatccatcacccatcaacaacaccattcagacctgtcgtccgctcacttctcctggtgtatcttttgtcgaatcaagtcgatatgatatcttgcatactctcaggtaaatttcttgtgatatttgtgatctcatggcctcgtaggtgttgccttcatctgaacagttcactccttttcctaaattcgtcagcgtgataaagtatcgagatgaacacccgtcaccatgctctggctgcaagcttgatatcttctcatctcgggagacttgctatgtctgagtcctcagtcgctcaagaggtattcagtttttcttactcccctttctgacatcggttgaaccctcgaagctgacatcgataccttcggtcttattttgtccattcaggaagcactgtgttttttgacagaaaatgagctgacacgttcaggatcggacgtctcagtaactgagaccgatgtatgccttcttgtgcatggaagtcttcatcgttgacggcgaccgtgtgttgacacgttcttgtccttgcctttctatgccaggtgtcttctgctgtccgtcatgccctcaatgaatccatggcgaagtccctgcagaccttcatccggtatctgaatcctgataattccagagcttgtcatccgctcaatctagttcagcagatcgccgatgctcagtcgactgtgagagagaatgagtcagaactcgacaggctgtatgaaagcataagttcggatagggagcgtgtgacccaggttggttcctctggttcctacatctatgaatccctcatcctattcctttcctttttgcttgtatagaaagttaagcaatcctctaaccattataatctcccaatataatccacgcgctttagctcatctcagatgtacaggccctgcttgctaatatactgggtacctggcctccgataattttctcggctgaatcgtccattcacaccaatcttctccaaaagctttctgcgcttcttctcaaactttcccttcttccactcagacaacacgacatcttgcttaagtcccatccaaatctccaagccgccatggcgacctaccaagaaactattcttcgccgaacggcacgagcgcagaaagagacggacgagttgaagggagaaataagaaagtaccaaatggtgacggaaaggagcaagggtgaatttgagaggcttatgagaaccaagtccggactagatgcagccagagcgaaggttgagttggaactggaagagttgagaagagcgattatggagcattagacaaatagatgactgtatgcgccctttcgtccagtatatatctccaacgatcatagatttatgttacggtttgaattctctaggaaactcaatgttcttgcccggaaggagcagttcatcaacctgctaagcgatctacgtacacacgacccggtcatcaagagaacctacgtagtctttagtcttcttcctcctcccctatctaatgatgacttgtaactatatatctgtctttagttgattgcatatttcatatatctatataagtttgtgtaaccatgtgtgtaattgccgtagctcatcagatctgtggttacgagaccatgcgttggaacgtcgtgttccatcacctccagaacttcatctctctacacatccaacaccatcatccttaactgccaatttctctttgatcacatctcgcctcactttgtcctagaagaaacagatcagtataccaaaccatgtctcgttcttatgatcgcggtaagttttggtagccttcttcaatcaacgacgacttggaaacgagctgttcgtttgagtcttcccttgcccatcagcttaggtactgatatgtactctgctctgtctacccttgcgtaattgtcttttctgttttttagccttgaccgttttctcgcctgatggacatgtgtgttcctttcgtttccttttttatgcttgcttttttctcaggctcgtattagacctggctgtcgagattataagagctgacgacccagactatgttacacgtcaatatctagctcttccaagtaagctctccgcccatcggactctgtgttttaccatcttcccaactgatgatttatctacttacaccatgaactttttcaatcaggtcgactacgcacaagaagctgtcgctaaaggaacagccgctgtatgtacaatctccagacgtgtgtgccttcattggacaagatcgtcctgtactgatcattatcatcggaacgggcaactttgtgactaggtcggtgtcaagtcctcgtcatgcgttgtgctcggtgtggagaagaagaccgctcttcagcttcaggatccccggacggtccgaaaggtcgccatgatcgacgaccatgtctgcttggctttctctggtcggtgttctactattctctcaattgagcagactgatcgcttctagtcgacacaaagaactgacctatcatattgtgttgtgtacaggtttgacggctgacggacgaatcatcatcgataaggctcgagtggaatgccagagtcatcgactgactgtcgaggatccggtgagcgtggagtacatctctcgatatattgccgcctacaagcaagtaagtattcaagcttagttttctttttttgtgaatgcgcaagacttatcggctcattgagttatcttcttgcctactttctctcgtagcgctacacacaatctggtggagtccgacctttcggtatctcctgcctattgatcggatttgaccctaatgacactaagcctaggctatacctgactgagcctagtggaatttacagcgcatggaaggtttgtcctttcctttcttgagcctgtcaccaacagaatcatctatctatagatgctaacagaatgtttctctttttctctgtaggctaacgcgatcggtcgatcctcgaaaactgttcgggagttcttggagaagaaccatcgggatgacatgaccagggccgagactgtcaagctggctgtgaagagtttactggagatcgttcagacgggagcgaagaacatcgagatcacagtgatggactcttatggacaactcaaagtctgtttctatcttttctcttctttggttctgttcctatagacttggacggacggtgagctgacagaaagacatacgcttttgggaaacacttctatctgttttgttcgtagaacctgacgctggcagagatcgaggctatcgtggtggagattgagaaagagaaggaggccgaggccgagaagaagaagtcgagattggcggcgacggcggctagtgcgcaagcgatgttgagcggtgaggccgaaacgtccggttcgtcgtgaacgttgaaccttacgcgagacgacacgggcttcagagaagacggaaggatatgatcatgctttttaattgtatacttagaattcgttcatatcgagatgtgcgtcttgtagtgaatactctgtaagagaaatagtgtgatttagatcaagacatatgtacagcgtgaacaatagatgttccgacagggaaaatagagagataaagagaccaaactaaaccagaccggtctggaccggagatctagctatcgactccagcttctctccgcctcttttgtctggctgaaagacctctggacggatcgccagtctctacggttattggatcagccagctcatctagtttggactgtctgacgcgtttttgggaagccctagcgtggttccgtgagaagtgaatatctgatgcatgacgaaagtgagaaagaacaaaagggaaggaaaagatcagcatgaacaaaggactaccatgccagaggactaaacaaaggcatacatgttgtcaagagaatagccatggaaaaagctgctataggcatgaccaacgtctttcgacccaacccggcgagcccagttaggttcaagttcaagtcagacatgcgcgaaccaccacataaaggtggcctcggacgaatacacgttccgatttagagaaatacgaagcttatttaagctcaccttgggcgaagggacctggcgaaacagatcagagcgcatgtcaagtggcccaagattcaagtgttagtttgagaccatgagcgactgaaacgaacgaggagtgcaaagcagagagagcgctctctgaaacgataatcattcgaacgcgcagataaaatggacttgcattttgactcttctgaggcgtttttataatcatgctcaaggaaatgtatgggggaatataaaggatcagataaaccgtgtccagggttcaaaggtatgatgttgaagggcagaaaggaagatgtaagaagagaaggagaacgtgggaattgaggctgacatcgttgagactgacatcagcctgatatgccattcgatgctcactgacgcatcctcggtcgatttacctgtgcgccttgctcccatcccgtaagcgaacactcaacatccactcaccatcctacacattcacttgtagtcccatcctttctctctcatactcatgtctgccaaggacgtaagtgctcgtgatctactcatggacctttcgattcgttcgatcgtccgacattgctcaatagaacagattcggtcgtattgatggatccttcctctccctctatttttgtttctcaattctttttttggcatcgcctcgttcacctttgttgccgtgtttctttctgtccctatcagtactgtacgtgttcttccatatgccctcttgatcctgtttctcagattgagattttctgatcgcgtacgcgtgttctttatttaatcggcctcattttggcatttcctcttacagacggaaaccagcaaggaggataccctgttcgtccttctttcttgatacataaccttgttgcaccttctctcccgtccctcgattgggaagatcaatccggttgagggatgttccggataagatgtgccttgtcttgttgtctggacctggactcaaaccttaccactgtgttttgttttgtcacgactgattctttcaaaaatgaatcgtacatcctccttgattcgtcctcctctcctcacaacctttgcaatcgaccgaacagcagcagcagggtggacatcagcagggaggataccctcaacaaggcggatatccccaacagcagggtggatactaccctccccagcagggcggttacggtcaaccccctcagcagcgtgagtctatctgtactgaattcaagcgatccgatgaatgagcaggagcggaagtcgaggaagttaaaaagatgaatgaagctccataagagcttgctgatctttgtgtccttttgatcatggacggatggacgaatgaacggctcattggatgcaaaaattatcagaatagtcagttcccgttccgtcttcatctattctctctcgataaatcactgattcgccttatacttcttcgtcaattcccagctaccgttcgtccttcttcctctgatacgctacgccataaaccagccagatttgaattttgttttttgaaccagcctaattgcgttttgtatttgcctttacagagccccaagctcctcctcaacaggtttgtctgttctttagaaatcttgcgtgtaggctttgatgtactatactagatattcataaccgcacccggcctttctacattttaatgcaatttttggcatcgggctttatcttaggtctatgtccagcagcctcagaagcagagtggtggtggaggtggatgcatggcctgcttggccggatgtctctgctgctgctgttcgtcctttaaatctctctgctcgtgtgaacttgagtggagaaacacagatatgctcaccatgggttttctctttctctttttctgtttgttctctgaatgggtcgaacgttcgcaggcgctgaggagttgtgttgcgacgcgttgttttaatttcgtcttttgctttctattcttttcgatccaccattcgatcatcttaaacaaacggatgctcgcttgcgccccctttttaggttttgcgtcttcttatgtgccgatgtattccagtcgagggttttatttatcaatgcttgaatgcctttttttgtcttctctctctttacgcttccctcctatgtgtctttctcaaatatccaccgagctcttgttgatctttccttttctattccatcccgtacatctcctttcgatcacgcagggcctgcgttcgatcaagacagcgagaaagaggaagactggtatacatttatatcgatcatgcgttgaccgactctgcctcatcgacgtcttcgtgctcgacctttgcgcgttttgccggttcattcgccactgtcacagcctcctcaatagcggaaggggtaggggtagaatcagaggtagaagtaggaagggcagaaggttcggtagaacgagggagtttcttgagtagagctgaactggctttcccgccgttgttttttcttcgtccaagttctttctttgtgatccggtcctgtaagagaagaagaagaagaagaagaaaagaccgagcgaaagagaggaaaaacgtgtggaatcagcgtcagatcgaaagagggcaaagagaaaaacaagagggagaagaacgactaacctgatcctcgacgatcttttcatcctcgtcctctcccacaggctcagcaggccactttggtaactccaccaagggctgatacaaattcaagccggctcctcctttcgatctctcgtctttcccttttcccttcccgttgtttgaactagaagcagacgtctcgagtgggagagggttggagggtgtgggttgggagagaatagtcttgaggaactcatcaggttcagaaagtttcgaccactgtttgatgtttgtggatttgtgatccgtcaaacaaaaggagggaacatcagtcgttggatattgttgattcaaaagagaggaacagcaaaagaacgaacggtctcggtcgaaagatcgacagcgtgcaagccgatggaatcctggtcgacttcatccaaagagacgagtaaagtagaagacgagcgaggggtgaaatcgagcacgggtcggttgaattcgagtacagatacagtctgatctgtagccatgtcatcagtgatcggtatcgagaagagcgcagtcgctctgccagagagaatcataagcaagcacgtcgttagcaagagaagatatagaagatagagcagaatagaagagcaagaacacatacccaagggaaaggaacacaactctggagccaacctcaaccatcttggtaacgacgagaccttcattgtcaggcaacctttcctgtcgactctcgactccgtcccgttttcgaccgtatcgtttgggagggaaaacagtgatgaaaggtcggactgtctcgaggatagggattgtggtttggagctcgcctgcagggaatgaccagacatgaatagaggaatctccgccggcagagagaagaaggggcaaagtggaaagtttgagaagggaagagatgaatctgaatggtcggggatgaggtgcgtcgttaatggaaattgatcgcgtcacatagtaagaacgaacaggatgtactgactttttgtgtccgagaatgaaacgctcggcgacgaaaccttggggatatcttgagattcggatgtgttcatctcgatcagatgtcacaacgtactgctcgtccggagtcaaaaagagggacgtgataggggatgtgtggcctatgatggataggatgcagagcttcatcagttacataaacaaggaatatttcgaagggagaaaacagtcatgatcgaggcttaccgaggatcagcgttgcgtcagggttcaatgctggatccgcatggatgtcgaacttctttcgagcctcgaccgtctcggcatcctgcttcgggtgaagagggtagctatccaaaggaaacacaccaaggtcgacgtaccaaacttcagttgacatgtttgatcgaaatgtagaaaggaataccaagaaacacgaagcggacgacaaacataccggaatgcatcacccagcttgtctccgatgagaatactgttgtctttagtgaaaccaagggtcgcaatcttcttgaacatagacctgaagacgcgttcgaaaagtagaagatgaccttcgtgtaaggataccggttcgaaagagaaaaacacagctgaaacacaggaatcaaacctcacctagtgcttgccagcctgagagtctttttgtcttcagacacttcccataccttcaacgccttgtcatcggcgaacgaggcgacccacttgccatcagtcgacacagccaaattccgaacgaggccgctgtgactgtctgcggtgggttcaagcccagaagtggtggcgagggcatggcctgtatccggatcaaacgacacgatgtccggtccggaggacaagtagagtgcgtccggggtagctgtgagattgagaagaggatagaacggcatggtatggatggatgggtcaggatgggatggatagcatgggtttttttgctaatattttgaagtcaccatgttgggttactaaccggttaagcagttactaacgctactcacctcaacccttcccactgaaatacgccattcatacgaatccgatcaaattattcttttttacaagcaagatggaatgaatgtgttcttctttctttctcgcttctatcatcttcatctcgtcgaccatcagacacacacgtatatacattcagacaccttctcataatggccactaacattaccttccatcctggaggttagttctctcggttgtctgaggatcccatcactgcgctgtcccccatcatcctgctgactcaacttcatctttttccttctttttttttcagccgtctctaccgaggagcgagccgagcttcttggccagcagggagccaccatttggctcaccggtcttagcgccagtggaaaggtcagcttgttttatgctagtaatcgccaacatggttttggttcgtactctcggttgtaatctatgccttctttatattcttcgcttccttatcggcggcaatcaaacactgtagtccactatcgctaccgctctcgagcagcacctccttcacctcaagcttcacgccttccgactcgacggagataacatccgattcggtttgaacaaggttggtctcaattccgttttttttttggttatttatctggtttgtcaaggcgctaactagagtattcggctctctcatcgcgcctcaggatctcggattcggacccaaggaccgagaggagaacattcgacgaattggagaggtatgctcaccttgaccagtgctctttgcgctttgtttctcaagtacatgtcgtgtttaagagtcttttcttctctatattcttttcaaacaggtctctcttctgttttctcagtcttccaccatcaccgtcaccgctttcatctcgccttgttcgtcctgacctatcttcctcttctttcgtctgccttgcgatatgttattctatcttggagtatactgacctagcttctttctctatttcgatatgattttcaaaacagacaagtctgaccgagatcttgcccgaaagctgcacgagactgccaaccccccgataccgttcatcgaggtctttgtagatgccccaatctctgttgttgaggcccgagaccctaagggactctacaagaaggcccgagctggtgagatcaaggagtttaccggaatcagcgccccctacgaggctcctgaggctgccgagatcagaatcgagaccgacaaggttgatgttgagggtgccgttcgacagatcactgagtacttgcaggccaagggtattgtcaaggcttagatagagggaaagctttcatagagtggatttgcagtgtgtgaaaagtaaggcaaaatatatcatgttgtatctcgattttataaatgcagtcaggaatcgtcctgtcgaaacatcttgggcaaaccccggcacttgcgctgaatagtacagacatcgtaagcaatcattgtaaggatccgacgatcaagaaaagaaaaaacagagagaacagaaagcgcctgtgtgtatgacgatgatgtgacgcgtcgcgtcgcgtcacgtcggcgcattgaatatggaaaaactcatttgaccgtcttttttcgttctcccattctctcattctcctcatcctatcggtccatcttcctcttttccttcctgatcgatactgtctccggtcttgcttgtgttttttttttatttcagcatagatatctctcgcgcttaaatatgtccgacatagagatgagtgagcctattcaggtcgatgacgagcctgtaagtctatccttaggatttatccttatatatgtcagatcgatgatagtgatgaggaatgaattctgatatccgtttctccatgtatcttgaacggcatgatcaaaggtcgatgtttccaaagttgcggcctctcttaccaactcggtcaaaggaaaaggcaaggcggctgatggtaccactactttcgatgacaatctaccttggtgggtttctgatttctttttttgtcatagcagtgcgggagagaaagcttgtgggtgcagcgtcccagggttgagagacaaaaagagtatcagagatctcgaactcttactgacggtagagctgactatcgacgatcggttctatcatatgcttttcatcgttcgctctctttggctttagggttgagaagtaccgaccagttacattggacgatgtagtgtctcatcagtcgatcactagcacgagtacggaacgcttctctcttctcttcgtagaccgaactcaaagtgcttagatgcgtcttcattctttattgttgatcgcctgcttcttttgttctatagtcgagaaattcattgaaaaacagagactgccgcatctactcttctacggtcctccaggaactggaaagacaagtactatcctggccgtcgctcggaggatctatggacagactttcagaaaaaatattctcgaggtaggttctcacacagatcatcaatttgaatgcgtcgatttctgttcttctttctcattgttactgagtgcgaataagaagcttacccattatcctttgtttttctttctatcggaaactgttctagttgaatgcgtcggatgaccgaggaatcgacgttgtccgagagcagatcaagaactttgcttccactagaactttatacaggttggtccaatcttcttttttttcttttgctttgaacccctcagatcattaacagattgagattttcgtatttggttctatagtaaaggatttaagttaatcatcctcgatgaagccgatatgatgactaacgccgcccaggccgctcttcgacgaggtacgtagttctactcgcctttcttgggccacagtcggacagccaatattctaacattcgatcttcattgatattatgctatcatctgggatgaacttcatcttaaaaagtgatcgagcagtacaccaagaatgttaggttctgcatcatctgtaactacgtgaacaaaatcaccccggcgatccagtccagatgcactagattcagatttagtccgctgccgatgcccgaagtggagaagcgaataaaggtggtggttgaggaggaaaagtaggttctcggtgttctactggcgcgcaactgcctattctctggctgagtgctcattgtgaactctttgactttctgcgtgtgatttcaattcagagtcaacttagacccttcagggctgacggctttgctgaagctctctaaaggagatatgcgtcgagcgctcaacgttctacaggttcggtctctatcttttgtatccgttcctttagcgcacggtgatccttatttgctcatatcttggttcggtctcacccaactcttatcttccttaaaggcttgccatgcagcttttgatgtcgtagatgaaacagctgtatatgcgtgtacaggaacacctcaccctgaagatgtcaggaggatcatcgagagcatgatgactgctgaattcacaacgagctaccagtgtacgtcacttccttgttgtacagaatataaacagagcaaagactacaaaagaacggatcttgatattgagccttgtcctttgacttcttaacggttcaccttctgacagtcgtccaagctctgaaggccgataaagggctggcccttcaagacttggtaataggcgcgtacgaattcatctcttcattagagctcagcccgcctgcgatggtctacctgttggatcaacttgcatctaccgagtacgtgctactttgttctgtgacatcttcttgttatattggaagggtttgtttcggttgtgtctaacgcaaattatgtctatctgtctgtctgtacatggctgtcttagacatcggctctcgttaggaggttcggagaaaatccaactcacaggcttactaggaagtttcaaaatggccgttgagattgatgccaagtttaggaagaatcaggaggccctttgagaggggttgtttgggctgtggcttgtctgtttgcgcttctacagtgatggatttcatgttgtaattctctctttcttcctttgatgtgtgtagtacttgtggcatccgtctacttacgttcagaagaggcgaatgaagaataagaagggagatggagagaaaggagaaaagagttaccatagatcacatcttccatccttcggtccgtttttccatctttctctcacagccgcacagtcaaacggctctttgcccaacttgccgttcacctcgttgtgtctctcgcacaaccacttctccacgccttctctcgtccgagcggcctctcggacagattcttcaccccctgcgtctcgtacggaacgcacaaagtctgaccgacaatgcgggcagggatacagatgggtgagcgacataagaagggatgttacatgtggctgaagttcggagggaacggttgagggaagagagcttgacatggcgtgaaggaacgtccatgtagacctgagtcgtttaggattggacagattgataaggagagattcatgaagcaaaacaaagtcaagacaacattcgcgatatgaggaaagaagagcaaaggaaggaaggaaagggtaaactggatgcttaccggccaagttcctcgatatcgggcggacagtccttccgaagcgccgctagctcttcctccgttcgaacacccaaacctactatcgaggcgcctacgccgccagcggcggtagcggcaacagtttgcgaccctgatgaagaagaatccgaattcgatgtcgaagactttttagggccagcattcatgaatgacttcaaggatgaacacatctttaacgacgttagaggcatccgaaccaaggaaatcagcctggtttgtcctcgtgaatggatttgtagtctcacaggacataagatccgactagccttgcatggttttccattctcatccagaaccactgaccccttggatagcttcggtcgttcttgaaaaggaatccccgggatcgttgaggaaggtagtacactgttcgaggaagcagattcggcaaagaggagaggacggccggtgaacgcgtatgcggttaggagtgctgacgaagtagctaggccgaggaagataggtcttcgtgtggatctagcaaggttgaacagtctggtagtcattgttcgaattcgtttggaatctatctagttacctctttgtcgttgctgctgctgttgttgttgttgctgccgtcgttgtggttggaaggaaggtgatttgcttacttattgtgaagaaaacccctcgtcatcatcgtcatcttctcaaccggcattgacctattgccactcagtcactcaccactatcatctccatcaccaccatcatcacatctatcgccatgtccaacagcttgatttccgtttctgctaaatccgtcggtcgagtagccatccctagcgttaccctcttcgccgccgggaacatagcccaggtcaagaggcaattcgaagtctctctccaggtatgtctaggagaaatgccaagaacgatttaatcaagatctcatctcacaactttttttttcttttttcggtcatcacagccaggtcaaacctcggtcgaactagtccatctacctgcttggctcgacagagagtcattgtccgtcgaggcattctcagatcacggatcattcgacgtatccatctgtacgtctgttcgcgaaacgaatatgacctcttgtatagccaagactgctgatccctacaccattttctaaaagtggatatctcgttcttcagatctgacgatgatgctcaggagggattttctcagtcgctcaaggatctctatgagctgagagatcaccagagcgcagtgttggataccttaaattctgaaggtgactatagattctacaacatgcgcataaagttcgccacgaagcgctgacctatcctctgcccaaaaaaaaaaacagaacagatccttcgagcctatggagaaaaaacaacctctggaggcatctctccggatcaactgacgcaattcattcgagacttcaagagtaggatgatagagatctctagtgagcgcagaaaggtcaatgccgagatagaaacgacaaataagaagattgcaaaggaggagagagctggagactacggaagaggaggacagccgagagacatgggagtcagcgcaaagctgctggtaggtgaaaagggtgtgaagagtgcagaggagagcaaggtgaatgttagattcatcgttacttacagtaagttcttctgttgcttccctcagcaacacgcctgaaagaatatctgaatcagacggcctcttccgatgttggttaaactctcacagtggtaaccggagctagttggtcgcctatatacgaagtccgggccaaggactcgaacgaacaaggcctcttcaatattgacgtaagcttctccggccgcctgtctctctctcttgtttgttacaactgaccatcgcccaacctatcttcagataaattatcgcgcacttattgtcaattctactggcgaaccatgggttggatcgacgctctacctatctacatcatctccccttcggaacgctcgggtgccaaccttgaaaccataccgactatccttcccagcccctcctccccctccgagtgctccatcttcggcacctgctatggaacctcggatggctttgatgagagcggtaccgaaagtattgatgtctgcgagcgttcaggaaggcgttccggacgagatcatagatggggaaagggctactatgaaaggagcagatgtagaaggaggaagattaaccaccatcttgaaggttgaaggcacggtagatgtggcgtgcgacggagaggaacacactctttcgtacgtaccacaattgtctagtaatgaaggggagtggaatttctggaaggctgactgagtgttccctcttgattgaacaatgaggacgtttaggatcgcgcaactgcaactttttggttcgatgcgccatgtcacggtgccgaccgtcaatgcggctgctttcctcgaggtatcttattcctaccttgcataactcttcatcattgggttaaagccactgacaatcgatcatatctcttctgaacaggtcaaagcgaccaatcaatccaaatacccgctgcttcctggcgctacccgaacgttcctagatgggaattacgtctctaaaggccggttaggcaacgtcaacccaaacgaagagttcaaaatcagcctaggagtcgatccatgtatgtactctattttggtttgttttctcatggaagaaaaacgggagattcataatgacaaaacctctacggctcgcatttgtttgtcctacgataatacgtctcatagcggtcacggtcacttgttcgcccgaggaaaagttcaggaaaacgagtggaggatttatcagtaattcgacagaggtgacttcgttcgctcgtacggtacgttagaagtcgttcggcctcgttatcaaaagaagaaaggattcctttttctctgatcgattcggttctattttgtttggttgggatataggtcaacatcactaacaacaggtctaattatattgacctcgaggtcttgtacaactagtacgattgatttcctttcttcatcccctatgttcttccctgcctggacagagctgaactagcatcccggcctaattgatgttccaacagccctgtatctgaggaatcaaagatagtcgtccgacctatcccgtccaacatattctcttctttccctataaaagacagccaagggaaccgaaccgactggcaagagggagccggtgaatctggctctggccaagtcaaaacgatgtgttcgataccaggtgggaagaaaacaacggtcaaatggcagtgggaggtcgaaggatccggttgggtcgtttcaaagtagggatctatgagaactcctttttctcccttctggttcagatcggaaggctattgatgtctctgattgcgggtgattgatcaaaacaaaaacatgcgcgcacacgtacacacatacacacacacacgaaagaatcacgagaatagcaaggaaaacacatgtacatcatcgaccaccagaaggtctgaacaggtccaaagttctccaaaactgaccaacgagtgctttatcgacatgtcttttatgaggatccacttgaagggtggtgacgttccattctttaacggctgcgttaggggcaatgtttgaccagtgaaagtatatgcctttgactaagtttttttggggggaaacaatcgatagataagcaaaattgaatggttgtagaagagagcaggagaagagaacaaaacaaaccgtgatggaagagttgttttgggtcggtccatttatattgagcgaactgccaagtttgacctgttgttaaaacgcactggactctcgacctttgttgttcaacatgcgtattgtaaagaacaaaaagacacgatcgtcagttcaatagaaatgaaaggagaatgagaacaaaagaaggagataatttagaagaaagaggaaatctcaccaaacttcgtccctgtttcctagtttttgcaaagcctccggaccttcgaccaccagatatttcatcttcttgtctccctctgcacaaaagaaaacgatgaccgaacaggcatcagaagtggaggagaaatgagatggttgcgcactaaaagaacggacaaaacagagaggatagagatacaaacctttgccggaagatggcatcgtcctcagtacgaccaacaaatcttcagctttaacttgaccttctgcgcttgctcgatctcgagcatcttttgacgactcaaagctagttcaagaaagaaagaaaaaacgaggtttgagagttgattcgagcaggaggattagcatttacacacatggatggagtcgtgctggaggatgaatgtttggaactaacactccttcctcgaggaatcgtttgacgttccacatggtgatgagagaagtaggcgaagaggagatgacgatgatcgggtgttgattttcttgtgaagtgcagagacaataggatcagatggaagaaacccagagatgattggtaatagaatagagagagaagacgacctacttgttttcttggcgcctgatgattaaagaggggaaagcggcggaagagatacagaaacaagttggtcagatcaagatctcgtctccaactcgaagagaaagagtttgacaaactcaccaagtgcaccaccaccagcactcgctggtatgccagattttccattagctgctccagccgcgccgttcgacccagcgagtgcttccctcatcttcttgattctatcgctaaacacggtctgacgaaggtaagaaaagtctttcttcgtccctccgcccacaggaagtttgcctgttgtcgacgccatcgttggtgaggaggtcaaggtgagcgtggtggatcgaagaggagtcgaccggttgataagaaggatctcggtttgttgaatctagacgcgttcgtgagaaagattagcattgatcctcttctgtaagacattgacaggaggaagaggggaagggaacaagagcaaacatactttgaccacggcatcgacatctgatctatccggtacgtattttcgtttagcaagcgaggaggccgaaggggcttgtccagttgaggaattgatagactgtcctccaacggtcgtcgtcgcgctctcggtctctgtgctagcttttgcttcttctacaaaacggtcgaaaatttggccagaatcagaatgatcagcggctgaaaggaaagctgaagattcagatttgaattcaaagacaaaatacataccggtctcggcaccctcgccattcaaccagtcaatcgttggctttctcttctctgagggaatgaagctcacgccgtttgctcgggcttctcggaggtactccgagagggtcgaatctcgagtttgccaaacaacatagaggataggaaggttgatagtggaaggatgggctgctggtggaacactggtagagtgattattggcatggtagtcgtgatgacgatacaaaagagtggacgcaacaacggagaatgattgaacagaaacgcgttcggttaggtcgacgtgaataaagagaagagaaggaggagaggtccagacaatgaagagaagagaaacccacctttcgaatgctccaatcttttcaaacgactggtccggtccgagatggatacgggatgctgtcgcgagtgaggcaacggaagaaccggcagagttggagagcgtgatgggtgtctgagcgaggatggctctccggaggtgaaccgcaggggaggcgtccgacatgattttcgttctaactctttttcttttctactttgagcctcttccttccttccagctgtatgtacgtgtgtgtgtttgagagacaggagatggcgacggggatgctatgatgaggctttgtgtgatggttatgatggcgacaagagaagaaacgatgcagaggttcgaacagaggagggcaggaaggattagggttagggttatatgggaccttaggtaagccacatatgtattcaaatacttctcaacatcggctctactagcgtacatcctgaagagcaaccaaggcaatcctcgcgcgctgtatgtggaacgttcatcagaccgagagagacacatcatcagacgatgggcttgggctcagcagcgcttagatgatgggttgtgcttgatcaaagcgacgttggctgtctgttgagtgatcttggacgacatggcgggaacagcgcaagaatggcgatgatcatgaattcataagacccttgatgtatcttcagacactttatagttctttcgtgtttttagccgtgatatgatgctcttcacaaacgctcctgaaactgatgagatgaaaggaggagaagagaactgatgaagtacacaagtgtgtagacggaagaaggatagatggaacactgctagcctttgtaagataacccaacaaaccatgagcttcatccatcctttcttttcccttctcccttcctcatcgcgcttcttttgatacgtaccgaacaggacgacggtacctacagacctgttccaaagagagttcgctcggctatccaacgttcttgatctgtgagtgtcctccgtgtcgttcattttgactccgaatttttatgtgttgttttattttattttccgcgcctctttttttcctttctctttcttgctctcatccatcctccatcctccatccgtccactcaacccattcaagtatccctgcccatcgctcatccttcattcaaacagatatctctttcgacaattgaggtttacattcagaagcaaaagaccgacatgcctagcgcagatattcaagtgagttcagatctttggcctgtcggaaacgggcgaatatataaatccgacgcgtcgcgaccaaggttttcctgattcctcttctatctccttctctttttgtccctctcctacccgacaactgcttctctcataaaaaacaaacaaacaaaaaaacgatggaaaacaatcaaacgggaactcagccggtcgtaccagccaagagaggcagaggaagaccctcgaaaatgtccaagctgctcgaacagcaggcgatcgatagagcaaacggaatcgacacgcctttgccagaactaaagccaatcgtttgtctcttcttcccttctttctcttctacctattcgtctgtcgatacatccacacgcgtaatatgtgtggactttactctcgctcaacttgacgcgtccatcgtcacatcctcgtttccaaatgttccactgaaacgcgtagaaactttgtctagtgacttacctgtctttgcctgttctctttccggacgacccatcggtctaacagttgcctcccggaccgaaacgtggtcggggtcgacctcctggagtgaagaacggagaagggcagaagcaccagaagaacaacctcatgaacaacgtgcctccaaatcctctggctcctaagtcgacgacgacgtacccgaaaggtcccggttcaaccggcacaggcaagcgcgggcggccaccaggcgttaagaatggacaggggaagaacacggcgattaagaaggcaagatcatcagaagaagacggtcaaggcgagattgtggaagaagacggtcaaggcgagattgtggaagaagacgacgaagaagacgcgtacggcatacagtcgtcctctccgaatggtcagaagtcagcaaaagacgcggcagcgatgaagaagggtggtcatccgtacatgccagcttatatatccgctcctatgaccacacatagtaccgttatcccgcccaccggagccaagagagggagaccgcctaagaagtagaaaaaaatcgcatcgaacctctcggggtttccccctccgttcgtttctttccagaatggtatcctcaagccgcctgctctcttcggtttgtgcttctcacagctagccttgggttggttggcttcgcttctcttttccttctctggctttccccgtcaacacacacacatatatatatatacaacttaacttttctccttggagccttcgctctttgcctctctctacctccttttcattaagtcttatcccctctcttcatctacatgcttttcttcttcttagcctctctcttttggcctttcgactttctactcttatcaggctttccaaactactcgtatcgaatgtttgaccgtatcaccacctcacttcacttcacttcaagtcacttcacctcacctcttcctacggcgaagaagcagaagctacatcctttctaaattaaatcatttacatctgatcattcgattatcggctcggttctcgtaacaggtaaacccttggtgacggaaccaactttgacgaggacttcgtcccattctgcttgggcgttcgaaagccaggtgattgctcctcctgccccaatttgaatctctgttttgttgtgatcgtccgatcggttgtcccgcagaaaagagacaagacgagaacgagggcaagcaaggtgagactaagccgtaagaaagaggagaaagaaagcacagggacgaacgatcgttctggacaatcatcgttcggatgacgacactgaagtctgctgctccgtctagtgacaaatatcc

SEQ ID NO: 1524 - DNA, 22385 bp, Xanthophyllomyces dendrorhous
gacaaatatcccaatgcgccttcacaagtcgggggatttttatttatttaaaaaaagcatcagtcatcgagatccaaggccaagtttttaaaactcgtgaacaagatccggtttacctgaataaattcctcgaggagcatggccttctaattcatccaagatctgcacggatcttaactttggagcacccgtcatcgagcccggagggaaacatctacccaaagcttctaccgtgcctacaccttcattcaactggccgacaacggtggtgacgagtgtgtggacatggtcgtatgtttctactcggatcagcttcggtactttgacactactcggaagacatattgacaagagatccgccctgatcaagtctacgatctgaatggcatccaagaatcatctagattagctaatgagcccagagacgaagaaggatcaagtgaaaaaaaaaaaagaaaaaaaaaaggaaagttgcgcaccatcagattctcagcgatctccttccgatcagcctcgagcgcattcttccttctctcatcttcctccttgtcgtccagacatctccccaccgtacctttgataggcttcatctcgacctgtccgctgttagtgatctttaagaatcgttccggactagaacttacgaccgtcgtgtccaaacaggggaaccgaaggaaggatgaataaggagctgggttggattttcggaggaggaggtacaatcgatatgacgcttcctcgtcgatctcttgtccaggcgcatgtccgttttcgttcgtgctaggatgggagccacccgaggaaggaaggaaagacgatcggaactgggtagtcatggtgagctcgtaagattctccttcatgaatggccgatcgggcggcttcgacgagcgagacatattcctctcccgactgatcagacacaaacggtctcaacgacgggcagactccagttcgatcgtctccttcctttcctatcgatttcgatagcccaagctcaaccctcttaacttcagcatcccactcatcgtcatctactccgaaccgaacgccatgatcaatcaaggacctttctaatccatgcagagcacctttgtctgcttccgcaccgttcagctgatcgctaaggccgatcaggatccattccttggtagaatgttcgagcgcgagaacagtactcgaatacgcgaacatcgcgtcttggccacccgatcgttcgtctagcgatcgatcgagcgcaggcggaagatgatagcccgctaaagactctgctttcatctcgtagttgaaccaaccgatccaacctgctttccattccggcccgtcttccgccttcgatccgtcaggaagggatatccgagctgataatgatttctggagtgcgccgagtgcttcaaataatgaggcatctcccgaaacatgagagcttggagggatcgacagttggatgcctgccgagttggattccgtatggagcaatagctttcgttcaggtcggagttcgtagcttaggagatgattcggtcttgataggtacgaataggagaacgagtttgggtcgttcacctttgagctatccaaccacatctctcccaaagcgcttgacgaagaagagcgagaaggcttggtaggcagaccagacggtcggatgtgatacagcgagtcgaagacttgttcgatgggcaaatgttgacctagctgtttgaatcgatgagtgcgcagtttgaagcgcttggagcaaccgttcaaggatggttgagtaggaggaggaatcgaggttatcgagctaggcttttctgaagcaatagatgaaggagatacggcggacacggcctgaagccaagtgggtatcgtataatctagcatattgaaggatgatgttaaggcacaggacgattcggcctttagaggcgtgatgtaggcaaggacttttcgcaagaaattgtgaatgagaaggtgaccttgcgaagaatgaatggactaagttgaaggtcattccaaaaaaagaaaaaaaaaggaaagggctttatattcaattcctgaatgtttgtgactctggggaaagaacttcaggacatgcatacctctgggtggaattggactccgtatattggcttggatttatgggataatcccatgatagccgactcatcatcttccttccatgcatcaacttggagctcttctggcagcgctacaagtaagaacaaagcgcacatcggcatgtgtgagtgatgtatcactgagcgcaaggtagaagagacaatcaaataatactcacacgctcggtcaacccctagactattgtaggtgaccatttcaacgccgtcggtcaccccttcgaaaactccggtgcctaaatgcttgatcctagacttctgtccatgctgaatttccttgacatgaatgatgttccctccaagggaggtagcgatgccttgctgaccgaggcaaatgccaaggataggaatgtcgatcgaggtaatcagcttcgaagcaaacccaaagtcggctggattatctgggcgaccaggtccaggagagaggatgacgcagtctatggaaggaaggataagtgactggaattcttccctgtccaaccagagaacatttaaatcaacagcgagagcagagtcagtatgttctcactagaaggctgaaagagaaagccaaggaatgtcacaaaccaagagaactgatcctggtggatgacgagaacacgctgatggaccagaagatctggataatcagagaacaatgccagaagattattggtatacgaatcataaaagtccaagatgagcactcgagggagaggtggtagagagctcatcatagaggacatatgggtaggaatgaatgtgatcaagggctaaggaggacgccttgaaaaaaaaaagaagatagacggaaacgaacggaggagtcaaaacgccggaggggatcatcgacgatcggcttggttacacgtgaacgccgcgtcggattggaggccgcgtggctgaaagttatcacgcgtcaagaacatggttacgtacgcgtcgacgcattctgaggatccagtgggtgtctgaaacgctacatctatctctacggctattattaacgagatcatgatgtgttgataaagagacgtgtgcttacatacgtatacgttactgggaatcttggttcttgaaaactctagagagactatgcattcaagagagtacaggataatcattaatctgcgcaatcagagcctcgacaacttgctgcgtgaaaagagagagttcctatggcaaaaaagaaagtcttcagaaggtcttacatcatcccttctcttgatctctctttcctatcttcaacgctggctagatttcaccctctttcaacaagagttggtagggatacatatatcctttgaactctctatcattaccgacaccatgctgttgctgctccggtcgaaaccattctcctatcccaagaagtcgtttctacaacctacattgtcaaacgtcttcccaccccgttcttctcaatgcagtccgaccatatcccatgtcgttcgctcggccagaccgttcagtatatctcgctatactcgcctcgaggacaaagaaactcgctcttctcccccatcattggagagcttaaaaatcactcctcctgggccacttggcggacctacagatccggcatcagctccggatacttctaccgtaagtcctcagggtatgcatgctgttcatcatctctaagcccgacgccaatctcatctttctttcttctttctctgtttcttcttgttgtttgatttccctttttcttctaacacaaataaacagatatcatctcgtacactgagtgaaaacatatataccatcccaaacttcttgaccgtctctcggattttgtcttgtcccatgttgggctacttcatcattcacggcgactttgtcatggctactactttgctagggtttgctggagctacagatctggtatgtcaaaagatttattatccatgtgatacaacactgttctcctttcctcggatactgacccgaatgtcgtctggcttacataggcagatgggtatatcgcacgcaagtggcacatgggttcggtgctaggtacaattttggatcctgccgtaagtgcacagggcagagttattcctatcgatagcagtctgggattatactgacagtatttttcaatccaacaaattacaggccgacaagacactcatgacaacccttgtcgtctctttgacttataaagggcttctgccttgtgagtgccgccatgacatgtttctcttggtcatttaaagtacaaaggaatgacatcaaattgatgttctcttgggtatagtacctcttgcggcaattgtcttgggccgagatgttcttctcagtttcgccgcattctacttgagatacatcacgttgcctaaacctgtatgccttttgacttcatctttctataaattctcagtcattacatcttctgatattccgacgggcgtattgtctctttcatcatcttagcgaacatggtcgcggtattggaacttggctcagcctacagtcgaagttcaccctacccaaatctcgaaagtaagtcaacaagtcctgcctatgtcttattagacaagacctttgatcaacccacattttatggtcgggtttcacaaacttatacctacacttgcatgttctacctcaagtacaacacctttctccaacttttgttgatgggctcgactacgatcagtcctcttttagtcgcctacggcaacgtcgacttgtttttgattcctcttcagtaaggctctcactcttgatgactttcttgtttctgcatgaacactgacttgagggtgattgcttgatgcctcacagatacatcgttggtaccaccaccatcatctccgggctgagctacctctggacaaaaggagcggtggtcgtgttgaaaagatagatagatcttactgagagcgcgagcgtgctcttctgttgtaaatacaaatgtacttatcgtttcaaagagatcgagaccggaagcaagtatggttagggttaaaagcacagctttgtgaagagtgttcgccgggtaaagcattaagcggacccgacttgtgaccatcgtatcagacttacagaccactcattcttatacagagcagccaactaacatttccttccgcttcatccgctcctagtttctttgaaccccaacaaccatctaccacacttacagtctacattcaggttacatacgatgtctgttttgcaaactcctatcacaaagatgtgtacgttcctaaggttttcacgagccttctgtttgtatctcctcttcgatcagatctggaatgaccaactgagagccctttgtttttttcctcttcattcgtcgttatcttggtccatgaattgtgctcaaccactggtggatggatgtatagtcaacatccagcacccagtcatgcttggtttgtatctgcgatacatacataagcatcgtccattatgtatgtatgtatgatctgacgtgaaatgattcgatcgcttcttttctcagcgggtatgaatgtcgctgctggaccagaactagcggctgctggtgagaaattcattccttgtatactcttcatataatatttcctcgtgtcttgacaatcgatagagtgattatcgtccttgcacaaatcatcagtttctaacgctggaggattaggagtaatcggaggactcggtgagtgagcaatatacccgaagcgatatattcaatcaaaaacaggattggtgaccaggaccttttttaaaaatcccccaatgttgaatttgtcaacaggctatgttcgttcttctgccagatatcatacaatatcgctgactatcaacaacaaagactatagctaatctgatcatcgatgatgggtttcatcccttcagactcctaaaaacttgaggaatcagatcagagaaatcaagaagcacttgaagtcgcccgatcttcgtgagtatgcttgttgctcgatcccacattggtggccgctcaatactgattgaaactcggtttgatgatgaatagctttcggagtcgatcttctgattcccaagggtgtgtccaggattgccgtctagactatatagtatatgtctaataccagactaacatcattctatatcctttatcctcgtagtcggagacggagcccgggcgaccaactatgattacaccaaatacgtcttattcaattttttctcacctaaaaagcataacacgaatacttacttgccatccactctgttgcgtctatcacaggtcaactcggagatttaatcgatgttatcatcgacgagaaaacttctctctttgtatgcgctgtaggagttccaccaaagtctgtggtggacaagcttcatgaagccaagattcctatcatgaacagtgcgttctgtttactttcagcaatttgtattcggcaaaacaaaaggcaagatactaatatgatacgatattgaattttgctactgaatgaatagtgattgggcaccctaagcatgtcgcttacgccctgaatgctggagttgacatcatttgtgcgcagggtggagaaggtggaggacataccggaaatagtgagtttttttttgctggaacgccaaagttttcttcgaaagcgggagattgaatagttctcttgttggatttctgtgacagttcctaccagtcttttgatccccgcgtgtgtcgatctcgtacgtcttgaattctgatacttgataaacaccgcgggacaagataactaacatcaaaatggtgtaaacaggtcaaaggcaagacatcccctcttacaggagagcccatccgaatcgttgctgccggaggaatttatgatggccgaggtttggccgccgcattgatgtggggagcgagtgcagtctgggtaagaaaattctgttttccgtctgtcttctggctcatatgggttccttgtaagggaacacgcgctaagctagtctggttgttcgtttgcctgtcatcaatattacgttgtgatataggtgggaactcgattcgttgctgctgtagaagcaagcgctcccaaaaagcacaaggatttgattctttcggccggctacgacgatgttgagaagaccctgatctatactggtaagcacattctgattcaatcaatatagagggaagaatgaaactcacatcaccaatatccttcgaaatgcaatttcagggaggccactccgagtccgagcgactccatacgtcaaggactggaacaacaatcgagcggacgagatcaagaagctgacctcacagggcaccattcctcacgacgccgagttggagaagaagccggaaaagtcgatggaaggtcgatcttggttgtgagtttactgttgtctttctctatgactgatatcgtactgagtttcatgaaatgacggctttggtatgaacaggatgggaactgtggcgggtgcaatcacggaagttcttcctgcgcagaagattgtcgaagatatgtgagtcctcatatttatcacttgtagagagaaggagatgttttcgcatacgccatatctagaactcaaccgtttttcctccctctctgtctatctgtctttcgcttgttccagggttaacgatgcaaaggcctgcatcaagtccggtagcgagatggccaagctctaagtttcatcatcccaagtgatgatgactaggaaaaaggaggattgcagttgtagctttgtatttcttatcgacttctttcgttgtactttgttccgagatatattctttgtcgtcgtgggtgtgaccatcattctagtgataccttcgactaagaagcttatgagggcatgttgaaagagatctgatacacaacatatcgcacgccagagatcagataaaacaatgttttatctgagctccaagaaagaatcataacaggagcagattgtttgtggctagagaaggtggaggccggggctccacgttcacaggcacatgtctttcttatctaaccttctggcccttctcaccttcgccttcgccttcaccttcaccttcattctcatccatcaccatcctttctgaagtacacacaattctatgcgtcctaccatccctctacaagactcttcttacggagtcagatccatctctgactcgttctcatttcaggatcctcctaagttacattctatagacaatctgtctgagtcaactgattctctcgatcacgcgatccccggcgacccctttcgagcttcgcctgtgacacgtccccagtcagtcaaccactcggtagagcaatccaaatcagtacatattacagccagacaggcatcctcaccacaagaggctgcttgtccggttagccgggatagcttgtctgagtcatcttttcagtcttgctcttcgtcatcttcgtctgatacactgctgggcccggcttcacctccacccgcaccgtcaccgtcatccccacctgcaccgatcagctactcatcgaatcctctgccgtttatctctacttcatcgatttcatcattctcggcaagtagcttcccatccgccatgtcgtctcctccgatgactcccaactctttcaatttcctttcccattcggcctcatccgaactactctcccattcgatctcttccttaggctcgttcactacacaagacacctataggtcatctagccaagtcgcctcggacgaagaaggatccctaccgacgaatatggatcaagaggcctcgaacggaaacctagtcctgcccactatcgcttcactcgaggcgggtgtctgggacgaagttcttgtcagagaggaaaccgagggcctgccggacgtcagactggttttagttgtaggcgatcaagatctaggaggagatatactgaatagagtagcagaggagattggggtccaggcaggtgagggttcaacagacaagttcacaaaatgttccagtcgtggggttgggaaggatgaaaagtctactggatcaatctggctatcttgctcggcttcagatcctgtaagtgctattggagttccgtttgtttgtttgtttgtttgtttattcacagttcaatcagagagccttattactgagatatattttgacttggatctcgacttgaatagagggctgtggatagtctgcttcgacaaatccatgatcgtcatcttcctcttgccaagcagctttcggcatcaacccaagctagtgatcatcttggaattaaagatatctttgacttagcagctactggtaaaggacgaggagccttggggtggattgactgttgtttggtgctcatcgatccaagtatgtatctgttgaatagattctcagaattctttttttttaaaaataaaaataaaaaatagatactcaagatgatcttatcatgtcccgaccgtttatacaggtcgtttacaacaatgcatttcaacgtcccgtcgactggctcctcgggtacctactttgctcctttcgaccgcacctctttctccatctcaacatgaggaactctatcgacagttgtccgacttgtcgttcgtagatgcctcccggctatcaaccccttctgaccctgctcttgaaccttccgggtccgtggtgtataaacttgccgataagtttactcctttgggttcattcaatgcgccttcttctccgtttgtgtctccgcttcaagatttgttcttaacccgacgaggagttcgctatctcaaccatctttgcgcccgaggattcttgcttactagagcagactacatgaactcgctaactgttcgtcgaacatcacacccaatgcccttcgcgtgttctcgtcagagcacgtaccgacctcgaccggctctgtctagtcaatcgtccatctcgtcttctgctccggcgctcacgttatcatctttccatgcttcggactactcatacatgtccactcaacactgggcggagggctcacctttcctgccaggaacgctctatccaacatccggtgggtcgtccgagagggagactactgagctcgagatgggagaggtttacgatccgttgtgtctgccgagactaattcagggcgcgtggacggcttccacgagaggaagtgtaggtttggtcggttggggggtgttgctattaggagttagcgcgatggtcgggtgggcggcgagagtattccggagcgatgcgtggcttaagtcgttcaggctgcagatgtcgtttggacatcatctaatgctttgatgtggtctcaggttgtctgattcctgctaatctcctactatgttaatgtccaatctctctctatatatacacacacgcgtactctgtacggctcggttggtatgggcatacttcatattcttctcacacagttgtattcagtggtccttttctttattaatcttctgtttctttacttacttcgactcttacgagctcgacacctgctatgttgtacttgaccgtagttgtatgctttttttttgtctccccgtcttcttaacgtcttccttaccactttgttttcttgcctcgtttctccttcttgttccttttgatgacgaccctcacactatatgctatgattcccaccggagacactttattgatcagagaacatgtatgctctgccatatatatacatggccttggctgctaggtagcaacatcggacgtgggcgccctcggaccaccgactaccaagatcccatgggccatggatctagtttgcccccgatgccagggacgggagctaggctggtaacagaaaaggttacaagatgagtaaccgcacaaggggtcttgggtttcagagaagaaatttcgagctcttggggcaaggaaacaggatagatagaatcacctggaccaaggaactaaggagggatagaagtaggagcaacaaaatatccaagcttagagttcatatatacaagtggtctagagagcctatcctatatatgattctcagaccctatgaacatcatagtacaatgcgctagaagtaggagagggaggagtaatgagagtggagggtccataggtcacggcttaccaatcaaatgtaacataggttacatccccaacagaaacactccgacccccaaggctgacacaagccttcaaacctgtgtaaaacctgtgtctatcactctttctgccctcgccccacaacccacacgcacacacgcccacacaagagaacacacagcacacacatacaggtctgtagtccgtttgcttcatccatccatctgttgacacacatcctcacgcgtttggtcgcgccgagttggctactgatgactttgtgatgtgctacatatagatctaaaagacaaatcgtcacaatgagttggtctcaacccgaagactcatcaaccacctcgcaaccaacggcaacgacgacgacgaccatcgaacaaggcgagtttcctgctcctccatgggcatccaggttagagcatttgtctgaggaaccaggcagaggtggagccactacagtcgagtctcccttcaaggaacctagccagctccaaccagaacatcagaccaataggctgtctggttatgtgagtcttggttaccgttcgggcgtgtctcccgggatgggtagttatcctgccgggtcaggaggcgatcaagcaggagccaccggaggagcaggatcagctggtcaggctagccctaatggaatagggtttcccgattcagaagaacgaggagcaggaacagggaccgccacagaaatatttcccgaggaaggagaagaggtcgcggctcctgccactgctgcttccgtcgcgtctgcagaggaggttggaagagagggccagacccagcgagagatcgagacggatgggcagcagccgcctgaaagttcaacatcgagaaatgaatactcgctcagtgcaaacattgacgcggtcccttcagcatcatccaacgcgatccgattaccttcacctacgctcgccgaagagtatcccagtgaacattattcggaatccacgcttccttcggacgcgatggtctcggacgctcatcagcagcaacaacgacaacaacagttcgagctcgaagctcatttggcgtccatcgctcactcccttcgagttgctgaagagcagaacaacgccgccatgggcgtccaacaggaagaagctgcagctgcagctgtcgcggccgaagaatccacatcgacacatcccactcaaggagatgagaatagacctcagaagatggccaaaatcaaaggaaagccggttaccacccaaaagacgcgtgatgccggaatcaaaagaaggaacgtcgaggctcggtttcattgtacggttgaaggctgtggatcaagtttcactcggtacgcgatttttagaatctgactgcagaataacatcaatagaggcactctagctaacatgctgtgctgttctctggttctttgttcttcttctactagatcacacaacctctcaggacatcttcgttcacatgccgatgaacgtcccttcaaatgtccagtctgtcaacgaggctttgcccgacagcatgattgcaaacgacatgcccggctccatgtgccatcccaggcgcagagtttcccatgtcctaattgcgacagaaagttcgctagatccgatggcctgctccagcaccgttcgtattcgatccctgtcgttcgaattcttacttctaatcgatagtctagtttcggtattcgatctgacctcgtgtttatttatttattaaattcaattagagaacatctgtgctttcgcacaaactcagcctgctgctaatttacaagctccgtcaccgccttctcctccaacccagcctgcattcccaccaatggaccccggccaaccgagctacagcaatcccgaggaaggtcacatgggcgagaatggatttgaggcccggcagtcgatcgacagtgggtttgacaatggtgtattgcagggtagttcagctgagatgggagggatgggactagagatggagactagtggcgacaaggaagcgcttgaatcggctgtgaacgagtacatccggtgttatcccctgttccgctctttccgatcacacgagtaggtctttgaatcttctctttgtgaaatgacattttccgacctaactcattcacttgtctttgggtacatcaatcttgctgttcgattctttgatcgacagccagcacgatggctcgccgtcgactttacctgacggatccactgatcccaaccaaagagtctataactctcccttccccgccgagctgactcccccggagcttcttgtctggctgtcccactctgcgtacccgagtatggccaaggatccgtctatccttcgctctcttggcaagctaatgggcttgccttctatcgctgatgatcatcctgcgttgtcgacgaacacgaacggaaaacgtcggttcgagcaagccatggttgaccctgaattgatgaggatcgaagagatcgaacggacatttaaagactttcaagccgcttctgggggaaacgaccatggtgcttttgagtttgattccaatattggaataaatgagcacggcggtccgtcagaatccttcgtcgatccaggccccggaggcgacgagctggtagaatcatcgtctgggtcaacaccttcagtagcggccgcgggcggatccaagtcggaaatcactaggtgtaactatatccagcccatcactggggagaggtgcatgaagacgtttgctagagtgtttgacatgagacggcatgtcgagacgatccatcatagctcggccttggatccaaaccggccagggtatgtttgcgacggatgcgagaagaagttttcgaggagcgatgcgctcgttcgggttagtatatcgttctctatcttctcttttcttttctcttcttcggtatttagattctgttcgagaaaacaaagagaagacttggttgcttacaatgaacttggggttctgtttttctgttcacagcatcggagggattattgtgccaaccggaagctcgaccagacggctgtagagtcatggggtgcctcaccttcttccgtcgatcagcagctgccatccggtgctcaaccgaatgctgaatttgagtctccgtttgacggatcggtcaatcagccagagccaacggaaggtgaagatgaagtcgttgtttctgaacatgtcgcctagacctagaacgttcgctttctttcgctcttctcttgtctttcctgttatgtcttgtctattcttctctatgtcacctcttgtctcgattgttccttctctcttatcttctcttctctgtttatatttgtactgttagacgtgtttgacttgatagcgatgtacttctttacacccttgcactcagtgctaatcctccctcttatgtctactaacgatggtcgaaacgagactcgtaattgttggaacgcgtgccacggttacgccggtcacacacaattttacccttttcgttttctggtaagaggatgtttcttcactttaaccacatccaagaatcatgtctgataccgtccagatcaaggccaaggcccccgttgttgagaagaaggtcgaggagaagggactttccaacgatgtgtacgtttctttttgatctgatctttgcttccctcgctttccttggaatgttcaatctgcataaggaacgacagaaggttagggagtgatgaagagaatgaaaaaaattaacagtacaacctcatgcatctctctatcgtttgcttgtcgtgtgacggtatgtctgttgtcgaaaacggatcttctttcacgatggtcgaaatacgctctttgaagtgtcaccaagtaccagactgcctctaccatccttgccagcgtcatcgccaagctcattccccagattgaggagggcaaggccattattgacctttgcaacgagtgagtgatcgctcttttcttggttctcgggtgagacatatttattgatatgtgtgtctgatgaataacctgtggatctaaaggggtgatcgattgatcgaggagggtgttgccgccgtctacaacaagaagggtgtcaagatctccaagggtgaggccctccctcctttttttcttttcttctcaatctaaagaagaaacgacctcttgctggttccgagctaacggattcgtctattcggctttggacccaacctaggtattgctttccctacctccctttccgtcaacaacgttgtgtcccatttctctccccttgtctctgacaccggagttcctgtgctcgctaagggcgacgtcgtcaaggtccagctcggtgctcagatcgatggggttcgtacgcctttcccccctttatctcgatcaaaatacaattcctggtcgtttgctcatctcggacggcgtgtttttttcttctcttctgtgtaaacggttgaaatcttggtttgaaaatgacagtacgcttcgatacacgccgagacccttgttgtcggtgccaccgatgcttcccccgtggaggaccgaaaggctgatgccatcgaggccgcctaccaggccgcccaagctgctatgcgattgattaaggtcggaggaaagggttacgacgtgaccgagggtgtgcagaaggtcgccaaggagttcaaggtgcttcctgttgagggtcagctctcgtgccagcaccttcagaacactcctgatggccccaagcgaattatcatcaaccctcctgtggatcagaagcgagaggagtacaacaaggtgtttgaggagggagaggtttacggaatcgacgtcctcattaccacctctgccgacggaaaggcccgaacggaggaggccaagactacgatctacaagaagagcgatatcacttaccagctcaagatgaagacttcccgaacgactttcgccgagatccagaagaaggccggtgccttccccttcactcttcgatgcctcgaggaggagaagcgagcccgaatgggtgttcaggaggccgtccagcacggtttgctccgaccttacgaggttgtgtacgtgttcttttctttcgttttctctcccttcttttcgtctttgcttgcttctcttcccactaacatcatgtgcgcgcaacgtgctcgttttgatcttgcctacagccacaccgagaagtcctcggtggtcgcccagttcttcttcacgctcgcccttctcccggccgatccccttttgctctcgcccagtcctgtctggtacggatcctcgaaagtcaagtcggccgagtcgatcaaggatgaggaactcaagacgttgatcgcgtccaagttgagggtcgataagaagaaggccaagaaggctgccaaggctgctggagagggcgaggagaagaaggagtaaactgtttccgtccgccggcctctcttttgcatggagaggtatgtgtatgtcggagctgccggtgggtaactcgaaggaacgaagaggatcgagtgaaaagtaatgaaaaaaagaagagagagagaaaaggaaaggaaggaaaaaatgaacatgatgccttttttgtttttgtttctttcttttcccttgatacaacacgtacgactgtatgatacaaagaaggaacgaccatgacataactttcttcaaccaaatgaagagagcggtcgtatcgcaaaaaactattatgggtccattcaactcgaattggcacaggccgttgggaagagaagggagaagaaacaaataaacagcgttgcgaaaagagagaacgaatttaagagaaaagctgggacacggataatagagagagaacgaatgaaggagaagtcgagcgaaagaagaatggtgaagagaagaaaaagaggaaaaagaaaacaaattgtacattgggttgtccatcaatcggagcagacacatacgcaagactatacacaagaaagtatgtaaagggaagacaatgaaggaagcagaggggccaaggcgagaaatctagcgaatgtggatgatatatatgtatattaagctttagacgacaagcacttataggaagggatacatgaggttttgtgtagtgtgcataacgtatttatcacagagagcgggaaaagacaaaaacgaaaacaaaggaaagtagattgcagcgggcaaagttcacacacaaaaaatagaacaaggaaagtacgaagacattggttatgtgatcgattaacaacctctttcacgctttgcaaataatctgcctatccatccattcttttcctgctttctcgacaggttaatgatcgaacttgtcggtcggctgggaaaagtcgtctgggtgatcaggtctgcttggtgtctggatttgtgatctgaataagctgacgaagccgatgatgaggtcaaggagccagtcgaggacggaatgaacataatggcatcggccgagggcaagaaagaattgacatctgctagggctggataacctaatcctggtcctgatccatactgagagattgactggaaggacgttctagacgcaagtgaagaggaggaacctcgtctggaccggctcgggagcggcggcaacggagatttaattgcggaagaaaaaatgagagaaatgacgttatgcgtgtttgtcagggtgacaacggaggtggtcattggtggggatggtgggatgtctttcggactctcttcttcttcctctggtatactgagccgactgctccagctggaagacctgccgagaccgtctggcgcgggcacgggcgagtcctgtaagatctcttctggaagggtgaccatggtaatggctagattcttttcgagaaacctctgttgaaacttgtcaagcgaacgggcaaagacagcatggaaggtaccatcggatgaaggagatctggcgagggtgggcaggatatggacgagcatgcccatccgggcgggaccggtagaaggcgtaggggtggaggtagccgagcgagagctgcctgcttcagagaacgagacgaaagagccggactttactttactagcagtagctgagtctgatctatcaatggagggggaagggtcggaggacagaaatgttgacctcgatcggggggttggagacggggtcgagaaggagcctctgtgggtcgatagatttgaccgggtggtcgtctgtcgacgaaacgccttgggagagagcaggctgatagacgcagtggtgataaggaaggccaaggagagttgttctttgagtagactattgtcggtgggcggagggagaaagtaaacaacggaatcgagagtggggtcggtttgtggggagaacggttgttgtgactggtcatcttgatctctgtcctgtcgggatttctgtttggccgacggaatcatcatgcccaaccgagcagaagtttttcttgttgacggtaacttccaccgaacagcatattccgcggcttgggtgagaagcgcgctgatggcggtcgggctggtaagtgcttcgtcaaggtgtctcactagtgatctctgtgaacgatgctgtctgggctgtctcttaagcagagtgacggcctctgtcgagagtgacgccagtggtggtaggaggagaagagtatttgcttccagttgatccagtattagatcgagcgattcagccgatgggtctaggcgtatggagagaggtcaagaaaggcaggacgattgaaagagaaaaaacggcgaaaaagaatacaaaagatgagaacaaggcgataaagaacagaaatgtacttcatactcaccacctaggacgaggtgaacagatctatgggtatccgactgagcggcgagactagatagctcatctccatccacgagccagccatcaagggctctgctttgtggatcttcttgtagggctggaagaaaggacgacgggaagaacggttgtgactgtccggctggccgtttgggtgtcaaagggtgaggtctgaacggcatcgaggacggctcaagtcgagtcgtagtcctgggattgccaagagcgatcatcctaggagtgaacgatctgaaaggaggagagtgatgttcttgaaggagagcagcaccgaacagagagctctacgatcctggatgaggtgacgatcaaggtcgaaagcaggacagaaagaaacaaaggcggcaagagaatataaaaaataaatagtcagtaactcttgcctccttgctcattcgtcttgatcggatgctctcttccacatcgaccgaatcagtgttcagaccatgttctccttctccttctgcttctccctgtatggtctgctctcgacctgcctactcactgttctatctgtcggactcactagtgatggttctttgtgaacgtcgactcgcttaacgttgaggaattcgttcctgccaaacgagaactcaggcggaaatgtccgcagtcgattacgtcgcgatcagccgcagtttgtttggaagacacgtgaccgtgacgtgacttcacagcagcgctcacgtgtcatgtgatcacttacatagatcacgtgatctacacacgtgacacctcctgctcatgttaggggcgggagctgggctggtaacggaagggttacgagatggtaactacacgaggctctcagggttcaggggagaagttcaggctcttgagactgagaaacaggattgataatatcactaggacaaggacaaggagacaaggtcggggacagggacgagtacaatggaacaaggacgaggacaaggaaaagaacaaggaaaaggggtagagttaaccaaggatccaagactggaatttctatctacaagtggttgagaagcctgtcttatatctagttctcagaccctatgggcatcatgaaagagcgcgctggaaatacgatgcgctgggagtaggagcaggagaagtagtgagagtgaaggtggaggttctatggatcacggcttaccaaccaagcgtaactcaggttacatccctgacatttcctcccctcatcgttccttctcctcacggtggatctccgaagactgatccttccgaattcactctccaacccaccaaatgaacaagctggccggtggactgaaagcaccgaacggactgccccgactgatcctgttctcgggaaaccactgctctctctgtgacgtagcaaagacagaactagaagcgattagacaaaaggtagagcgtgtcgtggtgttcgatagtgctcatgtttctttcattctcaccttcctcttgtgctctctcaacagatcccgttcgaactttcgactttcaacattcactctgaccaaggtgacctccaacaggtcaaacgatggcgcagactttacaagtacgatattcccgtactccacatggagggcgtcggccggattatgaaacaccgaatcgaccgaacgaaactagaagagatcctcaattcgtggaccgggccggtagatcagacggaacagacgaagagactgaacccggtgatacctccgaagaatcattgagtggtcgccaaatgtttcatcctatttcacttccattttcaattcaaacctcaccctcaccctctcccacccttacgaccatctctctccttctcgacccttcatgttcttcttcttcttcttcgtcgtcttgttcgtcaccatcagcctcatcaacttcttcgtactttgacacgccgtttgaaccttcaaatcgcttatcatctctgccgctctcttctccgacaagcctcctccctcctccatggcgtacggcgctgggtcggtcgttcctcggcctaccatcctcctcgcccgagcattggatccttgaatcgaacacagatcccgaaacagacataatattcatccagattctccgccagacatttgccaatttttctacagagcctgtcggtttaaagtcgaacccttttactgatgagggggaggacgatggcgacgacgatgacgatgatgatggtagcctaggctgggtgatggacggccagggagatcagagtctagccttgacagggaagggccagagcgaggactacgacaatggaagcgacaacaagaatgatcaatcgaccgatgatttgctgagcgatttgtttagctcaaaagatagaactgtcggttccaatatcagatacgacgccagatatgacgccttgctcggagcactcggtccgtccgaccaagagatccaattcaacctcaacacgcccacgtccaccgtcagagagtctcgatcaagtaagagacaccgactaaaaagggtctgcttcaactgccagctcgaaggacaccttctctccgcatgccccctcccgttcgacagaaacagagtcaaccaggccagaaaagcgtatgacgaagagaaggatagtctacgatcgaaagctctccaacaatcggagcttgactccgagcgatccgatgatgacgagagcgagaacaacgaacatatctttcaatctagattctgggctgccgatgttgaaatcgcaaccaggctagatatggctaccaagttcaagccgggcgcattcagccggccattgaaactggcattagggaacatcccagacgaccagccaaccgctctatacccaacacaagatgagcttggcaaagatatctggagaggaatgctcgtctggggttatcctcctggttactactccgtccgaggtaagctccgagtattcatcaagggtcatctggcggcagtgagagctgatgtgtttctcttctttcctgtttataagatcctcaggagagtatcttggacagaatcaatcataaagacgaaccacaagaggatggcgtttctcaggatagggagatcagtccagcgctgttgaatgtgtttgacgagagctcggagattcccaacgagtttggtttacacatgttcaaaccagcctcagataatatggccatggacgacatagacgtgggttctcatgtcgagaaggcgtcgaccgaagatcaaccgcgggttacactctcaccttcatcttcgcatcatcggtattcttcttcctcaccgccaccgccaccatcatctccatcatcatcaactcagtttcctctcccagtctctacctcgacgagatgggttgcttatccaaccacatcattctcttcagtcctgcttcccgttttccatctatccaaaccttttcctttacctcccattgcttccgatccggtccatttcgtttctccgccgtccgtttcatcaacactgccgctaaaggaagagacagaagccgaacgaagaaagagactgtggaatgagctacaaaatggaaagttgacaagaatggagatgggcgtatccgttcctcctgtttccctaaatactcctccac

SEQ ID NO: 1525 - DNA, 38232 bp, Xanthophyllomyces dendrorhous
ctctccgcccttttctccaccaccgttaccttcaccgacctcacatcgtcctcattccccgtcctattcttatccccagatcttccgctcctctcacaacaacgattacagccatggtcatgagaacgagtatgaggatcgatctaggttctcttccggtctaccagtgcgctcagttcggcgagcagtcagctcggactatcgttcttatcgttcttaccccaacccagacgttcgaaatgaacagaacagggagagtagcagacgtaaccgagatgaaggaagagactgggttgacagagaacgcacagatgatgaagatcggaaaaggaggagaatcaggtggtagagcgatctcgtttggaattgtatcgtggactgttctcttctttttcgtctttgtctcttccaaagttggcccttcctttcaagttgatttgatcaagaggggtttcgtctggtttgacttggttcgtttcatcgcatcttatcccaacccaacatcattctttttgtgcgtccggcgtggtcatcattgttctttcttccgaaccctactctacaatacctcggaccctgtttctatgttccacgatttacgttctacgttctacgcctcacgttataggtttcgttcccgtttctttcttccacttctcactttttgatggccgtccagcacgcagcctatatcatcgcatcgcatcatatcgtatcatccaatcaaaattgatcaaaggatcgatttcagttctatagttctatcaaacgatgatcgttgaaggaagagacagacctcgtattggtatttgagcatcccttcgctgttacctgtatatccagatgggacagtactctcctcctgtattttgttgtcattgttatacatcagtcaaacatgaaacgttttgaaaggtcatcgttccgaatcagttcaaactccttctgaaaaacaaaggggctgatagaagtcgagtaatgcggaaagagagacaagaccgagtagaaagaaacagaccttgatctcgaatccgacttcagcgacgagagctttgacttcatccaaacttaattcgaccgagacgtcctttgacgagttattctcccagcttttatttccccccccggacaaacacataaaatagatatcaagaatcaggtcaaatagagagcggttagtacgaggctctagaccaactatgagcggacgagtgagtagacatagaactgactgccacaggagaggtcctaggttgatccaaattcctccaggtttcaacactcgatagatcgtctcgagatattctacaacgtttttcgcctatctccaccattcacatccacattcatatccagcgattcaaatgctcagtaaatcattaggaaataaagccaaaagaagagagaacaaacgcacagtatcgataaagaaagaggtggccacacagtcccattcttgatcctcgtctccacttccatagatctccaaaaagtcaccggcgatcagactgaagtcgcttcctttcggtaaatcggcaggattgacatccgggatcctgatcggtcgaaggagagcctcagtagaggtctgattggagaaagtgtggatgtatggatgaatagtgtgacagagaggtgcggttgtccggttaaggataaagaatgagcagagcagcataaagaaagagaactcgttgccctgggatgcatagccttcattcgagacggtgttataggaccatatgaaaaaacaaacgatcagcgcgtaggtcaaactcgtatacaacagggactgatattgaacaaaccttgaagcgcaatatcgtatgccagtcgagccagtccagcaccaggtgtcagaatcttgacatccgcgctgaacgaatcaatagccgaacatcaacttcatcccaatcagtaaagatgcaacttgacgagactcaaatcttgatcatcaagacttgccgttcttctttggggatgtgaccaaattgactctcaatgacgtccatgataggcttgtacgcagcgtccctctcgggtcgacccttgaaaggcggttatgacggaaaggggagacattaggttcccaccctgaaggccacaagcgcaagaaaagcacaagaggctgcggactcacttcgacactccaatccctaacaaactgctttatggtcgatctcatcttgtccatatcactctccgatgatttcctgctgaggagttccttcttctcggcctccttcttctctttctttgcggattcttcatgcatatgatggtgcgatgatactccaccgtgggagtggtcatgaggttcatcgtgagagtgtgaatggtgctgatgaggaggagcaggcgaggatgtatcaaggtcgtcatagtaggcatccaaatctatttggccgtggcagagtgattcaaaaagagtcccgtcagaattcagtggaaaaaaaaaccttttgcatagattagtctttaatcaatccactcaccttcatcgtcttcatcttcgtcttcatcctcttcctcgtcctcctcatcctcatcaccaaacatggagcttccgactgtatcggcgatctcccgaaggaaatcagcattgactctgatagcatcgtccaccttggacaacttctctcgatactttagcttgttgagaatggcctggtgaggctttgaaagggctgtaagagaaccatcgtccacagacacttacttagcttctacttaatcgggataggctgagtaactcttgaaaccgtgggcttacagaggaggtctttgagtcttcggttgttagcggataactgtcatatgaaagcaaaagcaggagcaattagatgaatgaatccccatagttttcggcaagcaagtcaaaactcaagagaagacttgaaggcaagagaagataaagagaggacggacagagtaagcctcgtactgatagaagcatcggagcacggcgtcgaacgcctttcgctcggccttactagcttcgatctcctgaggagttggctctctggggccaccacagacatggttgggatcgctgtggtcatgggagtgagaatgtgacgaagcttcgtcatgagagtgagagtggctcattgtgcaagtgtggttgaaggtgatagtcaatcatcaagagatttgaggattcccaaataaataaatagatacacaattcgttattttattttatttccgaccattttggtatattcatttgctcttctttctcccttgtatctcacaccttgactcatcgcgctttgcacagtgtccgacacaaacacacacacacacacacacacacacacacactatatatccgttgaggttttatttcaatcagattcttgacccgttatgcatcattgataaacatggtgtacgagaagtgcatctggcgcttcccgttctattcattttctcaatcctcttcttcactcgtgtcgtcccccatatcgatctccgggatctctccgtcgtcatcgtcatcatcatcccctcctacgttatctctggcctggaattggctgacacgagcttgttctctcgcccgtgttctctcctgctcttccgccgccattttctgcgcaacctgactatccttcaacgcaatcgatgcaggaacagtcatcgtctcgtccttctcctgaacctctgcgacctcaacaggaggatcaaacacactggactgggacggctgaacgaacgcagtctcgaacggagcagatgtgatcgtaggagggattgtggtaggaagtgtagcagacatagacgcgctcaatgaaacgtttgtttcagttggtacgatattctcaatcagagtgttgagaggggcagagagatcgagcattggctcgacgggtaccgaagttggaccaagttgagcggtagaaagcgtatcgaatgaaagagactcccggttggtctgctcagtacgtccttcagatttgtataacagaagcgaggaggctgctggaagaggtcggggaagagcagggagaagaggatgcagcagagatccgagggttgactgtttaagcggaaaagtgaagacggccagtcggatcagcgaaaacccgatcaaggaaagaagaagaagaagtgtttggatacgcagagagcatgatactcacatccttaccaccctcgtttagagactgaacaacccacccagcctcaggcccaaccgtcccctcccttgcgctaggtccacttgataatccatcgaccagtaatttcttcactccatcctccaactgagcccatgcctgggcagagtgacctcctgcctgccttctagcagaaacaggcaggttgatggagagcgaaagaagaaccttggtggcaaggacgtaaagcgccggctgaagcgccggatgagggagtattgcggagagaagctcgatcgaaagcatcgcagtaggaacgactgaggcggcgagagccggaagagaggaggtgagggcgagcgagttactctctgcgtgcgaccgtttcttgcctttccctttgcttcctccattagaagagctagggtcttcttgtgaggcagataatgctgccactcgagaaggctcaaggagttctcccaggttggtcaaggcgattttaacgattcgaccagttagactgcccgagaccgcgtggatcggcgcgagaggtccgatcttgctaagaacgagcgaaagggttttgagcagtgcctgatgcaactttggctgatgggccgtcttttcgagtagatataccaaataggacacaatctccatctgatgtggaagaagggcctgcccagagcacaaagtgagctggccgagtagaccgcaggcaaggatatacaactggggaagcataactttgactaggttggattcctctgggttggcatgatcagccatctggaagagtgggttgacgttgatgttggtcagaatttgaaccaacaaagaactataacacacagcgacgaatacgaaaactaaccaatccgtccgaggtgattctgaggatcctgtacgggagtgccagcacggttcctgcagggatggccactcctctggaagtaggttgccgcagcataccagtaaccaacctaacgaacccatcgagcctctcgagcgcaacagatcgtttcttcaaactatccctttctttggcgagctctgtgaaacctttccatttgattcctaactctccaatgtcatctctggcctgtcttccgcccgcttgttcctcaaaaactccctggaaaagcgcatctagacattcgtgcgcgctcgtgagagcagattggagatcatgaacaaatgcctgaggcgaggccgattttccgggcaagaggtgaagagacgtgtaaagcttgacggcagcctggcgtgttgacggatgctgtgcagttgacagaccggcaagggaagtggaaagcagagaggcatgaagcgctcggacggatggcggatgtaaagcgacaaggtgagagaggaaaggaagaatggggggaagagcgaccaaaggaaacttttcggtccatacgaggagattcaatgtgtacttttggaggttgggtaaggtgatctcccgatggaactgggggttagagctgcctgagttgaggaagatggatgaaagaagtcgaacgaaagggccgataagatgagacgccaattgtttctattgttgggggttgaagagacgaaagaatagagtaacatgtattgagacaatcgatatcagctctttcctataaagtaaaaatgcatgcgtgaacgtaccccgacgatacccatcaggccgaccacccagtttctaccaaatctatcaagaatttcggctgaagctctgctttggtccataacgatagctccgatggaccatcctgccaatcggtttgcctcttccttggaaaggatgagggcatcgagagctttgaggaaagacgttaagacagaggaagggattttgggaagaacctccggatgaaatggagcgtgaatttctatgagagagacagtctgagagagaaaccccgggtgagacagagtactccccaggaatgccaacaaagatgcagggtccgacatgattgaacgagagcgtgagtgaaggatagctaggagaaaaataatagaccagagaagttcaggttgactgtaagaaaatgaaatatttgcactgcctcaaaagtgttgtaagtcacgtgtgtggcgtcaaatccattccttcgccatctatccctccatcctgtgttgggccctccatcttgtcaccttgccatcgtcacaccctcatcgttcagtcgagcgtgctgctttatcctcattatggcaagcaggtttgagccggatccagcgatcgaagaagttctcaaggttgacaactttcaggtccgtggtttttattggatctctctgcagacagtttcctcaacttatcttcggtcttgtgccctctcacctctatctctcttactcttcacaggatcaattcgatattcaagagtttatctcgacactttctgacaagctgatcgccaactcagttcaatcctccgctcgtatggtcaaacttctgccttttcggatactcgtcgctttcaacttgattgccacgtccgaatagactgactctggctctcttcttgcttagcatttacccccttacccttccttcagacgttttctcatgcagttgattcccttcttcaagttcgaaaagaagtccaggctagaacagataaattagaggcagaagttagcaaggcagagagagagtacggaaggaaactcaaagagctcgatcgcggattcgaggtaagttgatctttcttcatctagagaagtatgctaagattattgactgatgttcaatcgtctacaatgcacaggccgtttcagcttcatttgctactatatccaacaccacctcttcaatcggttctccagcaatcagaatcggagaaactctcgagacgcttcatatctctcgttcaaaagcgcagtattcatccatactactctcctactacatcgctctctccaatggcgacagttctctgctagacagactgctcaaggatgcccgtcgagacggccgggaaggcagagacggaagaatgagatgcgcagtggtattgagaaggctggcgagtttagtcaaggaggattctgcagatgcaggaggtaaaacaggaaaccgaatcgaagagtattgcgaaaagtttgagaaagaggtccttggactgtttgataaatactacaggtgagcaaacccatattcaatatttgcctatttacaactcaatccttcatgagtgcatgcttatatgtccttctgtctttacagacaaggggatcccaaaatgatgggcgtaagtgatactgatcaccagcgcatgtatttcctgaaggctattaacttttctggttgtatcatgtttcaatcagcactgtgcccgagtccttctggagttcaacggaggtacttcctgcgttcaaatttatgtgaatcagcatgactttttcatctccaaagatcgaattggacgtgtcggatctggaaattacggacatgaagaagctactctgtacgtcatgttctgatacgaccccatgatggctgcatatatttgatggtccaaaaacatactggcggaacacactcaaacgttgatttccttacaaaatacagttggcagacccttcccgaccctttcaagtcatcttcgacaacggaaccaacgctccgtagcttgtatgatgagattagggtgactgtctctcaagaggctcagattattcaggctgtatttccgaatccgccaatggttatgcaagtcttcctaaacagagtgtttgcccaagttgtatgttcttctttcatatccatgatatctctctcacaggtcagcttgtcaatatttctcattcgttgacattattcgtgtttatacatgatagatccaacaaatcctcgaacgcctccttgataaagcgggcaaaatatcaactctcgccacccttcgaatcctttatatatcacatacaatgacgtccactctgatcgacgatctgaaagcgtacgagtttccctctgcatcatcttcggggagcagatcatcagcctcagacccatcagcaggggattcaacagtgggaggaaaagcaaaaggagctgatggtgatggtgccagtactgcggtggccgtcatgctggaaaactgtctggaagaaatgtttgcgcctttcattgaaggggtccggtacttggagagagagagtaaaagtttggctgagctatacgcgggattcttggcaaatttcaccaagtaccatgtttgttctcttctgtcactatcttctctttcattttattcatatcgattgagtctgagacacttttcttctacgaccggcttggttatacaataggaaaccgttcataaagcaaagcccaacaaattgttcgatagagtagtcaatcaactcgcctccgcctccgcctcctcaagctctcaaactacccaagccgctgcgtccgctatattgaagtactccggtgtgagtgaaaaaacaccaggcggctcggtagaggcagagctagaggcaggcggaatcaaagttgaggatggagcactcaaaatggatgttgcagaaacgatgttgaagtggcatgccgaagctgtggggagatgtgtagaactgagttcatcaggagaagtgtgcgttctgcgttcaaatttgcgagtatctttcatgggacgcgatcagctaagaccaatcgatccttttatgcgattgttgctcttcaatagaccgaaaggagcgtttgcattgatgcgcgtactagcagaagccctaggtagatcatatatagagactgctcttgattcgtgagtcttcgctctcttctctctttccttaactctgcctcactcaccacaactacgcttgacaccccattatcagaacattagctaagatggacgcgcatgatccaagactggaaccagatctctctgttcttgccaccgtcaggtctgctgatctactctgccatatgtggcagaaatattcgtctgtggcgctgcttccgctagctttgtcttcagtcaccatcagaagagaaatggtcgcttatagtcagacgaatattggtagggcggaggaaaagatcaatgcaatcatgcagacactcctcgaccgtacgactccctctacctattcgctttctctgattagttggcttctatgagatttactaacctcagtttttttttcactgcgcgtcatcagtcatcaattcttggcttgctcttcagctcaccaagcagaagaaactcgattttaagcctaaaaacgatgatgtctcgttcgagagagtaaacaccgaaccctgcacattggcgctagacgtattggaaaaagtgaaggtagcgactaagtcgtacctcagtggtaagaatgctgatgggtttttgaccgaagttggagttggcttccacgcgttagttatatcatttgttattcttcacgcctctaaagtggtacagcggaatcgtggtctagtatagtagctgatagatctaggtgatgtcattattcgtaaaagattgctgctcgatcacctcaagaaattccccgtcagtgtgactggagcattgatgctcacaaagtaagcttttgccgagcagtttttacttcctttgatatgacgacatatctgatcatctttctgaccccgtctatatgtttctgttatacctgtttacagagacctagcgacttaccaagaggcaatcactgcgtttggaatcccagtgttgaatgaacgattcgccatgctccgtcaactaggaaacttgtttgttgtccagccggaggtcctcaaaacgttcatggcagagtcttacttgggccagattgagccgagattattgagaccttacttggcccagcgagtcgattactcgacgtatgtctcgagttaatattgacattcaagtcgattcaattattaaccttgttcttaccttctgttcgtattcattttcatcagattctcgaagagatttgcggaggacgaacgtttcggaatcgacgtcgacgcggtggcagctggagcagccgacgctgccatcaggatgcggagcaccctcacaggtcaagctcgaagcttgggcaccaaaggcttgaaccggctcagcgtaatgatcaaagagcttgacaactacgcggcttcttcctctgcaagttctagtccgacaggaacagaaggacagcacgtcggtcgatcgtctccgatatcaggaagagcatcgccgaatccggctgctcggggagctatcccttatttttctaagatgccactctgagagccgtacttttgtcttgatcctctctcatttgaaccgctcgccttgcttcttctcttatcatagatgataccccagtttcttcctcgctttcttatctcttccaataatatctagcacttgtatctatcaatcgcatctcaccacctctcgacaatgtttctatttaatgataccctgtctctcgtcgttttcttctgccctgaccatactgtacatagcatgcttggattttgcagaggaagaagaaagcaattacatatgtcatgatcatacaaacaacaaggaactgagggaagaccgagaacattcgtatatccgaagtttcgacctgcaggaaaggggtttctatatctacgaggccatgacttcatccttcacaggatgatctccgtcaaccttgttgacctcacccagagcactcttctcgagttcccaactcctggaacgatcgggaaaagggtttcgatcaacactgtcagcaaaacatcggattgaggacgccatgatagggacaagaaaaaacaacgaacctatcaaaccatttgttcggatgatccaccgactctccatttcctaatccttcacctttctgaacgtccgaccgatgggtgagctcgaataccctcgtgcaagcgacatgatagtgggtactcttcacttgattcatgacctcttgaagatctggtccagagattcgataatctttttcaaggaagagagatagtcgggcgggagcaaagtgtcggaaggggcagccatgaatgtcttgtgcgccaggctgatcttgagtgagaattcgttgacaacttgatgcaaagagttttagaaagggtagtaacgattattatttcagtaagagaatgttgcgcaatcttatgtaggtagaactatacagaagaggtgatagctccgtacctttttggggcatagttcatctttcgaccttcaagtccaaacgaatgtcgaatattgtactggtattccttcctaaacgtatcgtccgtcatttttgacggcaccaaaaatgcctttctccaccataccaaggcttcctcgactgacagacccactccctggaggtgatattcacgtttccagaaacccaatcaatgtaacaacaaggattgtcaatgtaaaaacttaataaatagaatgagtagtatgtcaggacgaaccttcaggaacaacccaagctgaagtcgagcgtagtgtttcaggtgatgcacgttttctgtaacattccaaagatgccgcatgcaaggtgggaaatgtctaggcgccagatgatcgatcatctctgccgtgacagtctcggaattgttgtccggatcgaatgtgtactcggtagacgccgagccggtgaggtacgagagggaaagatggtttaaaattggtaagagccgttggtcttcgtctaatcgaggaagatatttggcagtgagctgttgttggttgttatcattgaagcgaacgaatgtttatcagttggcccttaggtaaaataaactctgaacacctctataatgatctttacaaacctctaaaccagcttccagtcgagcagaaaatgcttgaagaaccagactgagctgttcgctctgcggaacatatgccaatcctcccttaagtaacacttttctcttctcaaccagatcggggactagtgtccagtgaactttgtagaacgactgcgctcggaaggcgctttcgtctaacttggtaactgttagcagatcgaacttgagagattctttttctggttcagaaacctgttggtaccaggtgaacgagagatatcgatccatttgttcgagaggaaaaataggagagcggaagaggggaagagggttagagactgtctgtgataacagggcgatgttgagaacgtcgactgaccagcttccaatcaagctgcaactctttaaggaagtttgttcgttcctccttatcatcgctctcgaatcgaattttaaacagggttgtttctgctcgtaggtatcgttttcgtagttcctcactttaggcaatagaatccagaaacacacaacatgtcaaaagaacccgagggtatccaaccagatgcttcagtttgggttgtcctgcctaaggagaatgagcgagtagagaatggctgacctcccgcagaaagctagccttagtacgaaatgactgatcacatccttctttctctctgcacttaagtcaacattctttgctgtgttagcactcaacggaaggtacttcttggacgcttgctcgtaagacgttacgagctgggatggcggtagtcctctgatctgagcggattcgataagtgaaatgactgtttaagagatccagcgattgaaaaataggaagcgaaatagaactatgacggttgagccaaggaagttttgggaccatgaaagagggaagacacgcaaacaggacgtacttctaagtcgagcgattgcgtactcctcaaattcctccaaagttacatcatccggaggaggtcgattataactattcgtgccaggaggaaacggaacaaacaaaaagcgttagttcatgcatgggcaaagctcaaaatctcatcagagaatcggtctttgtgtcttttcctagctggtcctttataaacttcagaacgaacaaggaaaaactcacaagtttaacctccaaggatatttcgaactctttccatgttttgtaacttccgggccagatggaccccttcttctcgagctagtagctgcgaacatctagtatggaaccggtgatcctgtcgattgctaggggtatctttgtggcttgaatggtcttaagtagagctctgctacggtaagaaagagtgtaccaaatgagaaatggtcgaaagcaagaagtaaggttcgagtaggcaaaaggcaagaaaaggcgaagaggttctcttgacgcgacgcgtctcgatctcaacgcgtgtttgacgcgtctcagtcaacactcattaaacacgctcttcacaaagaacaatggacggcttgcttttcttcaagtacacgttttgcatctatcatgtttcatctttttttatttttggtatgtagtatagaggtgcacagagaaaaatgaagggtaagagaagaagaataaagaacagaacaagcaaatgtaaggcagcgtgaggaagatgagaaaccagggcaagccgagatctatgaccagatacgtatgattgaagcgggggggagagaacgggggtcaaactgcttgccaatgaagtagaagaaagtggacttgacagaaaccccgttaagaacacgatgagagagtggaaccgatggtagagaaacgattatgcgtcgatctctccattggccacggcagcctcagccttggtagccttgacgacggctgggtcaacggccttgagcttcatggcagattccgggtgaggcggtcggaactctcgctcatttcgggcgagctgttcttccaagcactccgaaccagaggcggcggcaatgaaaccaaggaaaggaggtgatgggttgagaggtcgggagcagaactcagggtgagcttgaagaccgacaaagtaagggtgacctgtaatttcccgatgaatttcaaccagagccatatgagatacagaatgagcaactgcacgacttgattgtgcctgattgacgtagagaaagcatcagtctgagacggaaacataccagtcatctcgatgatctgcatcctctgtccggtctcatctctacccaagaacttcaactgctctccgtccttgtctcgtgccttctcgaacgtgggaaccattttagggttgacctcgtaccgatgtctgtgcctctcccaaacggcagactttccaccatacaatcgtcggattttgctatcctcagtcttgggctcgaacatggttggtcgcaaacccaaccgcatggttcctccaaggtgagtcttggagatctcaggcatgaaaatgacagccgggttgagggtatccggggtcaactcagcagagccagcatctatgatgcggagaatttgatgattgaaaggttattgatatagacctcgaataacgttgtaagaggggaaagagaaagcatacctttgatgccacagacgtgcctagcccactcgatgacggcaatctgaagtcctaggcagatacccaagtaaggaaccttgtgttctcgagcccacttggcggccacgatcattccctccgttcctcggataccaaaccctccaggaaccatgataccctcagcagagcaaagagccttccaggcatcgtgatacttgacagggtcctccgtctggacgttgggctccaaatgggaagattcaacccactggagcttgagcttccgaccacatcgcatggaggcgtgctccaaagatttaacaacactcatgtatgagtcctggagcgaggtgtactttccaacgagaacaattttgacagaatcgaaccgacgatcatgtctggtagaaggtcaggatatgaagttttagcaaataatccttgggcaaacattgcttcctcgttagaaatgataatcagaatgatggaaaatcagacgcttacccagaggtcaactcggtccatctacccagaagactatctcctcgcttctttccgtcaggtccgagatcgatctggtcgagcgataaccttttctggaggtaggtcaccaaaccctgatccctcaacagcaaaggaacgtggtaggtcgaagacacgttgtgaacaccaaacacctggttcgacgccactttgcaagtcgacgccaccttccgcttggtatcagactcgagctcaacctcacatcggcatgcaatcttttaatcgtgttgaaggaccgttccgcgcgaagattagtttgatggattacttggctgatgaagtctaggataaaagcacgtacgatgtcggggaacagaccggcattcctgagcgccttgacagttgactgggtaggcttcgtcttctgctcacctccaacgacagggatcaaggtaacaagtgcgacggcaaagttctccacaccgactcgctcttggaactgactcatggcctcaacgaaaggagccgactcgatatctcctacagttcctccaagctagtttgaggtgagagatacaatgtcaacgacataaatcaggtggttaaattataatggaagagacgaacctcgatgatgcaaacatcaggcttctcagcggtctcatcaacgggctgagcagcgacgttctcgatccactcctggatctcgttggtcaagtggggaacaatctgtgaaccgagtgccatgtcagttcgcacatggcagagatagaggtaatcaacgaacgtacctgaacagtctttcccaagtagtctcctcgtcgctgtaggtatgaaaaggaataacagatttaggcttattcggctagaaagataatctatagtatggaccgacctccttctcaatcactcgctggtaaaccttgccggtggtcaagttgtggtttttggagagagtgacatccaaatatcgctcgtagtttctgcgcaatgatgataataatcacaagagagtaacaacgatatccacgacaacagcggtagtcatgacgtagtcaagtcaaaggggaatatcagtccatcgtcctcatctatgccaagtgatagattgaggttgaggttggacgaaccccaagtcaagatcaacctctcctccatcgttgagaacgtagacctcgcctgtaacgtttccggtggcgtatgcgacattagcgattcagggctagaaatcttgtatttgtttttctgaacgtgagttagcttaagaacttaccgtgttcggtaggagccatggttccagcatcgatgttcatgtaaggatcgattttgacagaagtgaccttgagaccggtagtcttgaggagaaggccggtagaggaagctattgtagtactcgagcatgagtcactttgagcccttagacgtgctcaagaggagaactatctcactaaccaataactccctttccgataccgctggattatggcagtttggccgggtaagtataccgttctatctataagggtgagtttggtaatgaataagaaatctaaacgaacgaaatgacaccacctaaccggaataaaaccaagagcacatcaagatgagacatggtcagcttctcaagattcactatcattcagcctagacaacagcctggacacgtaaggtccgatatatcttgcctctacaaaatctcaccacacaaccaattaatacatatacgtaccacagacaaggatgtacttggtcattatgtgatcttgattagttgttaacaaaagggccgggagggaaggtaagggatatattgcacgctgcaccaggcagggaaggaaagaaaaagaagaggaaagagaaaaaacagaaaatgcagaaaaagattaacgaaaaaaattaggcagcagagttcgcggtaacaagaatccggattgttacattttgggttacgatgatggccacgtgaatatcgattacctaacaaatgttcattacgtaactagttcggccttgcctcgtaccaactccaaacatctcgtctagatacacggacaccaaggaggaagcatcgacaaatacaaaccatctcttaacatgtcggggaatacatacgacattccttcagactggcattcctccttggccactccttccacttcatcagcttcgcagtcagctacttcggccttgttgctcgaattcgatccgttagaatctccctcggtcacagactcgccctcagcaccggctacactgccatccagttcagcttcaactcgatcacctccacctgcttcctctcctcccggccagacatcgtctagtttaaatttgtccaggccctcttccatcaataccatctcatctttcaggtccaaatcatctaacaaacctcactcggagaaagaagaacatgacaaagatagagaggctaggttggacaaggagggagatccatcagataatcgtgtgcagaccgctcagtttgattttccaaaagtgagccaattagtaacatcttcgagctgctgtgactgtatgactaaacgtctctcatctttacacttctttgatactcctgattgatagttcctggagcaactaaagtcaaagccagctgagccggtagccaaatatctgaagaggtgtgttgatgccaattcgttctttgagcctgttcataagtaggcactgccttggctaattctcaactgtggttattttccagttttctgatgaattttgcaaagaaatcgttcagcatgaatgagatgattaagctcatccatgattttcttcaagtgagaactatcttctttgagttcatatgtttgcgtgtgcgtgtgcgcgcataagttaatggattatatgcgcttcctctttgatcgtctcttgtagttcatctcggccaggatgcgagaggtacccccatggaaaggaatgagcgagctcgaatttgacactgcgctagattgtatggagaaactggtgatgaatgtcagtgtcttctctttctgctagctcgtcttggtcaacctcggagagtttctcttcttgttcttcccaaacttacctttttagcaacctcggatcacatgaaatagcgtctgcaccctttgttcgtctagctgatgccctcttcgtctgaattgatagtatgtctccgaattctaatctttgactcccacctcttgaactcgataaatatctcggattagtactttcaccccagtaatagattcttccaagcatcacatcacgacggatgaccttgagcgggacaaaatcctgcaccaacgaatcggtctctttggttggctcgaggggaaacatctagatgtgctgaatgaggatgatttggatagggatcaagttgaagggtacttaaaattcgctatggacggtaggtcaacatacctgctcttcaaaagaagggagcgcgccgtcagcgtatctcgagactatatctattttggcatttatgcatactgatttagtgtctgtcttgctttggctatctccctttgcacagaaatgattaagatgaatcactataaggtaagacgatgaacatcaaggccagatgaatctagacatacgcttatatctcactcgcttcgtccatgatctacgtctggttgaatactccatgaacacgattgttcttgtttaggccccaagagataagctgatctgcattttgaacagttgtaaggtgatattcggttagtgtggtcgtttgtctctgatcacaacgaaccaatctgaatatcgtgttattaccgggataatttggagcgaactataaaggaatgattcggcagttatcagcgaataagaattcaggaaaaaaagcggaaggttcaggagccgacactttcatcccgatactgattttggttgttctaaaggccaacccagagcatttgatttctaatgtcgagtaggtcttgtctattcttttgactacctgatgatatcggtcgagacatgatccgattctctgtcgccttgagtatgctttttgtggttctgatgccgtgttcttgaaacagatacatcaaccgattcaggagcgcttccaagctacaatcagaagcgggatactacttgtcttctctagtatgtcctatacctcatactctcatcgacatgcttgactgctcttctgatatgatctgacacacttcccttgcgtatattcttgtttcgaagatgggttcaataacgttcatagaatcgatggaccataccgttctatcaaacatcactcagcaggagttcgaaatgtgagttcggaagataatctggcgaacgactaccgtagatttgcctgacccgttcttgttggatcaatcgaaaggaacgttgaatcggccatcgcccaccttcctccaaattctcccctatctcctaccgtatcaggatttaaatcgagcatctccccattccctccccctgcctcgtcctcgtcgtcagcagtagcagcggcggcggcgtctgctcctttcggcaatacctcggaaggtgaagaaccagcaaacattatttcctttattcctaccaactttgctcttggatccaagcgattctttgccaagacgggtgaggcagtgacaagacctttgggcgcgattggaaaactatttacggatgtcatcgagggcggtctggaagacagtcggccttcctccgcatccggctctcgtccagagagacaacttggtggagggccatcggaaactcaacgtccataccagccgagaatcagatctccccgccctaggtcccatgtagacctcaactcagacccagcatcttccacaaataccaatgctgagatagaaacgtcaacaatacaaaaaccgaagcccacgcaaacattatgggatcgggtatcatccgaaattttgggatctcaatcatctcaaccacctggctggcaagagagctaccggtctcatccttctgcgaacgctcgtcctccccctcaacaacaccagcagtaccatcagcagcaactgccacatgacccgtctagaccatttgcgctcgccccaccggagaacaactattaccacaatcatccaggagaatacgtcttctctgatggaaacgttgaggaagacaacattgactacgagagactacagagcgagttggacaagagggaccaacaggcaaagtacgtcatatttcctttggtcttctcctcttcgaacttcttcgttctaaccgtcgtcttataatacaacctcttgattgggggattgcgcctatcagacaagccaatttggagacactgtctcaaatctgtgagctctcaagcctacttctcccaaagtatcaatgtctgccgatccgaagaccatttgctcacaccccaatgcttcacgtttcttccgccccggtgtgtatgtgggtatgtgacagttccttctctggacgccgaattagcggctttaatattggacaataaacagggcgacctaagtggaacgatcgacacgcttctggagatgggaagctcatgagccagacccaaataacatctctctattcttcatgtcttgatgcaggttatcttcttttgttcatatcctgatgaaatcttccatgacccgttcaaaaaaatctcttcaaatgccatgcagaacgtgaaccttagcgaacacactaaaccacatcagagatatgttcccaagacaagtaacatgacaccttgtatatttgatcaagttcagatccggaccctcgggaacgccaatcaggtcgatttcttctcgtcgagcgatctaaggtatatgtcggctttacccaaggcccagatgcagaatgagaacttgaactggataacaaaatcgatcgtgtccaagtaagcttgtattcagcctctactgcgaacatgagacgtgcactacttacgttcggatatacaatctaatttggccagataagttgaaagattgaatggataatgacatgccatgcgaattagtctttgacatgacggtctttcgtacaggaatgagggaagcttacagcgcagtttttattctttcagacatcgagagaaacaacgaaggctttattagtttgaagacaatacaatgataccaggtacagatgagaaacttacgaagataccctcgatatcttcttgtgcccaacttccattgggcaactgacggctcatgataagcttcaatgctctatcgataggcgctctgtctggatacttggctgataccaggcagagtacagcccaggaggtttgaacgacttgagaggttgaatggggacagtatacaccggtgacgcacgactaggattttgaaaatacacacacaaacaaatcgatagagggttattcgtatgagcctctgtgtttaagtaggtctttgtattctgtaaggaagactgtagagagcaaaagagctgatgtaccatgtatgtctctccccaacctccatcctccatctgcttgctcaacaaaaacgaacaagcccttcggacgctctcggagttctcaaaagtttctccagcgagtgctagagactcgagcgcgaagttggttgcatacgtgaaacagattccccatgaaccaaaccaggcaccatcttgttgctgagaggaatgaatatacccgactgctcgcttcacacaggacctattcgttgcggtggtcttcgtcagaacttgatacgcgatgctccaaggttggaaccatgaaaataacattcaagaacctactgaatctcgacttttcggtaattgggatatcgccgggagaacatctgaagggccgagagaacagacgtcgtacactccggatagttatattcggtcatgatgttacctgatcaaagaatgacagagtttgtgtcatttgacgtgatatccttcatccgtgaagcacaagctgaactatcatcaagaaaatagactcaccaaacacttcggcatggttgaaaacctcaagaatatggggagcacggatcagctcgtaactagcgaatccgccgtttgaattctgcatgaccagcaagcaatctaccgcattttcgagtctcttcgcagagacagcttccggcatggatctagatccgtttccaaatcaaacacagagagagatattccagcttatttcttctctttctatcttgtatcacggaagacgtgaaaggagatgaacgaagaactaagaactaacggtagatcttgaagtcccagaacggccttcatgccctctgccgtacagtccgagacgatatatgattgctctggggtggaaaatggccatgctccgagggttccctgtctaaaggattccttgtggtgcttcgcttaatttgtataagagagagataccatcaattattgtagaaatgatcagaccgtgctagatggattgaaaaacgaacgattcgtccgaatctgcgctttgtccagccaatcgagacatctgagcatggatgtatggttggaaggctccgtagccaattcggtttctaccaaggcttgagatatgaaggatgcgtcctgagatcgaacaacacatagtgtatggcattaagatgtgggcgcatatctcacatcaccgggtgaggtcgattagaacaacacatcttacttacccatagttgacttccactacagaaaggagaaccatagagtaaagatgtcaagcataagaaagcgtcacaaacctcaaaataagccctgaccaaatatgataagcgaacacagaaaacataactgacttggtaccacacatcatcaagccttctcggcccatccataagaaatcgtccacgacttttctatggtctttgacagcctgagaactgtttaaatgaccaacataccgcagtattggtcaaccaaagaggaacatgcattcttcttctctgatatcactgaagtaagagtccaacaaaggagaaagacacccactctggaccatcccctacaaatctagcgaccaggttgtaacatttgctgacaggtccaacagtttgacaattcgtattttcgtcctccatgaccaccatccgatagttcctttctaaggctaactttctaatccaggggaagaaccgaggaatgacgtattcgaggaaagcaagtgggtaggtcaacatctggaagactggatgatgcgggtagtataggtcgataggagagatagcgttggagagcttatggaatgggatgttctcatatgtgccaacaaagatttcctgtttggggttcgatcacgattagagaaacttatcatgtgaaacatgtcaagattattcgggacaaagaaaaggacgaacggaacgaagctcttcaatgagcggagtaacaggacactggaacctcttgccgtacaagtataccattgggaaatctgtattgaaaatgggcaggattagtgtatgagaatttgaacgtcagagcaaagcaggcataagcaatatagagactgacagaccgctcggacatgaatccaccatctccatggatggacaataagccattttggcaatagactggtatagatggaaatcgagatctcaataccgatcagaatgagaaaggaagagagaagagactaacatgagctcaggacaaatgggactgagtccttcccatttatagcaattcaatattgccactaagtgcaaaaatatgttgatgttcagtttatttggctcggtgtaagagattatcgccgacttaattcaagaaatgtatgagcagccaatatactcacgccatgctttaccccaactagggacgacttcagctccacccatctccatgagctttttcctggctttttcgcaaacagggtgtgaagacgggaggcctaagattcgaagagaaacgtaattgagcgccgttccaaacactgtcggaggagaatgggtatgtctgttgagaagtagataggcatcacaagaagcgcgcgttcgatagattagccaatttacatgcgtcccatagacagtgaagcgtgtaaagtatacatacattccccaaccgccttctttcttgtcggctctgttgcaaaggtatctgatcatctcgagtctctgttcctcctcgaggggctcggactgagtgacatagagagagattatcaatcctgatcgacagtgcccaccaagattacgtgttgtcagccggataggcagctttcatcgaactgaaatatataataaactgaccaggaatcaaaaacataggtcctccatactctccactccaatgaccatcggcagactgaatttttttgtagaactcgaatccgttctgagcggcttccagaggggttgaagctttctttaacttgggtagatcctgctcgttttaaggatcacatgtgcaaagaatcatggattgtcttgagcatctatgtttctgatttcatatttattttgaaaaatctcactgtctccaggccgagccagaacttatcctccgtggtctgaggccatgcgtcttgctcctccttcgttcgaaggtacttccattcatgtcttccatgagacccatgggacacgcgaaggcgccagttgcgtagatctgttgcctggtttggcggcggctgataagaatagtcctgaagaggtggtggtggtggtgctttctgtcgtattaaaaagagcgtattttatcaatacagagacgagtaaggagaccagtgtatcaagaagaaacgcacggccttggcctctgggttggcagacttccagatggctattcccgaccagtagataccgacagagaggattcctatgaggacaatacctgtgggcgtgtatccctctggaatcagagaggtcatggcgataatgataactctgtgtgtggatgagaggaagagattgctgggagagaaacctatccagcatcgttttatcattcgagttttgagacgatcacagaagatcgttcgaggtgactaaccgcggttcatctcggcgcccactaatcgccggccgcttgtgatgctaaacgattacctgttgactcctctagatgtagatagcttcactgtggtgatctggattatcaactctcagaagttatatgtcaggagaatgagatgatgctcgttcttgctttgttcagtagtgtttaactcgtcttcaatgtaatttttaattgagtgccagggttgagaagttcgctctcggtggcttcagtcggttgacgttctgtttattgatactcttcttctttttcaagttgaagggcggccaacaacgattttgaagcatcgcagcataccactggctagagcaagtacatgcaacatcatcccatagcatacacagagaaatgtcagtggtgtggaaaagcaaatcgtcaattcatcaagtgtagaacacgacaagccgacaaagaaacaggaaagtaggggttctagagatcgaatgaagcccaggagacgaaagctaagaataagatcaaaacgaaagagacaaattcgaagaaaaggacaagaggaagaagaagaagaagagaataagtagggtatattctggatttccatggagaaacattagttcctttgttgattagaagcggaactcgagagtactggtctagacggggagtcgaacaagcctcgagaggtttcaacccgagatttagctgcaacaaaaggccgaagcaacgaatatgtcagttacacagatccctagaacgatatcgttgagtagaaaaagatatagacacgagaatcggacaaacagtttaagacttccatgtcacggtcgatcgtaattctccttcgagcacgcgcagaagcgctgtttgacttttggtgtccatgataaggtaacggaggtggcttggctctagaaggtatataggtagatccagggctgggtctatcatatgagagtccgtcaaacccaaaattaggtgacccaggtaaagttcccaaaggttcttttgtatgacgggagcttgtgagagaaggcgaggatgggtaattgaggctagatgtcgatggagttgggctcgctacaatagattctaggcgggaatagttgtttgatcgaggaagggtgtgagctcgagtgttgtctttgttgatgacagatggtgagcgactagaaggcgtatcacaggatgagctgggtagagccacatggagttccgcaatctggaataaaagtatcgaagattctgtcagaacaagcaacaatagatggagtgaacaaattacatcagacgtgcacatacttcggtcaacttattgagtctactgtgaagctcggcaattacatcgcgctgtacgctgataattttattcactaagttacaatcccgatcaaaacatgaacatattagtcttcggcctagagcatgaccttcaagtcagatgatttacttacaatcgttcaccatctcgtctacctcgacaccccgagtgaaagaagatcttgcagagtcacggctgaatcgtttgctctccttgagcgatccgctgtaatgcaggttgagcccagaaggaatagcaggcgaatgagtgatggtattcctaccattcgaggtcgatgccgtcaagatttgagcgttgagggcattgatccgttgaaccttttcagcaacttgcgcctcaagatcggccacgatagacgctgtttgggtgtggtcattcttctctaattgaaggtctcgagacgcgagttcggcagactgtttgaagttgtccgtttcagaacgggcctccttaaggtcgcttgtcagtttgtcaaactgagataggagctcaatctgatgctttgtttggaaactgagtgactcctcaagctcgctgatcttttttgaaagactctccatctctgatcctcttgcttccttctgcgtcttcgtctgccggtccgactcctcatgcatctctctcagtagacgatgctcgttcgccaaaacgctcgcgtgagcagactcggcttcttccatcttgacctcttgctctctcatctgtcttgaatgagacttgcgctcctcgtctaactgctgttcgagcataatccgtaagctatgcatttcttgcgcgtgtttaatctcctcctcagctgatttggaatcaagcagagccttgagcgcgagcacttctgaagcatgttgagacgtctgctgggaaacctgggattcaagagtggcattagaggagcgaaggtcatcggaggacgttttatattcggctagttgacgtttcagctcgacctgagaggtgagaagatcctgggtttgaagaagagacgcttctctttgttggcgaacctgattgagagaaagtcgagtagaatcaagttcgagattataagcgcggtcttgatcgactagacgaagaccaagctggtcatgttccagcttgagagcgtcgtacgacttgctcagttgttggaccttctcggcattagtcgaggaagaaatttcatgagactcttccgtagcggctagtcgggagcgcaactcagtcacttcgagctcgagctttgcaattttgtcggtacatagaagtcgggattgagcggaagtctgttctaaggaagcataattggtcgaagcagtagctatctcggattcaagatcagacactttgagaagaaggtgagtgattgtagattctttctcggcaagctcatctggagtgatggtaggtggtgactttgtagatgtcatatgaaccaacaagagtcaatatgtatgcctgtgacagcaccagtagagctcaaattaaacttactagagtggtggtcttatcaatattctcctcctcttttaccggagtacttgttgagttgtccgccgtagaatcagaaaataatcctctcgcccgtcgctctttccctaaacctccaaacgaatcttcctcaacaactccaatagcactgatgtatctcttcggcgttgttggcaaatcaactgagggcattcctaaaccgaggcctgaacggggaagttcagagatccgacgtcgggtgtgaattggcaagaaatttgaggatccgaaagagggagaggatgggacggcctcgctagtcagcatgagacccgatctgagattacacagacggtgatcgacagagatgtagtgaattataaaggtcagaatttaggaagaaggaaagaagacaaatggcatatttatgatcgaacaaagacgtacaagttggtgatttgagactgaatcttggttctcaatagctgaagtttttggacctcttgctccgactatcatccagagtcgtgtggttagttcttggctttcttcgagagttcgaaccctacgcataaatcgcacaaacgatatggatagatcacatacctttattctttcttctctaagtctagctagcttttctttctccgattctaagctagcctcaccttcggtcgcttcagaatcactgtcatctgagagatcactggatcgaatacgtttcgcagaagcttgcatagaagctgcaagttttgttttaagatctgcgatttcctggaggtatacctgaattagggcattgtcgccgacaatctggagacatatgaatgaatttagaagacaaatactgttcagcgaaagggcacaaggaggttgattcatatgtggatatgaacttaccgttcctcgttcagctttagtgacgaccttagaaacccgacgagcgaatttcaaagttgctaaagacgaatcaatcgacagaacagagatcagccttaaggattggtgacggcatatgtcgatgcacatacgcaagaagcaacgtacctaatgattcatacgcgtgtatctcatctgttcagaaagtcgtagaagcgaaattcgtatcacagtcagtcaacttgatggtcgtgagaatgtcaaagaaaaagtaccgatctcttgaacgcatactcaccaagagatatcgtgcagacgacagctatcttagcatgaccggacagagaattttgaagtaaccttgtcaactttgattctcgataagcgataaacccaggcttcggttcggtaagcttttcgatcacgttggctagtgttaacagactatggattgaaaaggcaactccatttcctctgtcagctggttacactgtacgcaagaaaggtagtcaggaaatgatatgaaccttttgttgatatagcctccctcttgacggcgagtgtcatccgtggtggctctttctgaacctgccaaatcaatcagattctaaattcgtcaccagtatagccattagattcatgcttctggatgtaagaacagaaatttttaaaagcactaacaagtcgactcattcgaacgagacccatagatggggaagttttcggtcttgattgagagttagaggccatggagttcaaggaagatgaggacatggactgtgacatcgtcgatgcgtttccggattctgacaagagtcgtgactcgatgacctgcatgtttaaagtaccaaagaataaaaccatgggatatcaaaaaggactcgtttctagatgactctgtgaagaaggaatgaaagaaaacatacgactgaaaagactgtgtgggatcgagaactgtgttcgttgaaatctgtttttccgttgcgccgattgccctctccctttttcaaacaggcctgaacttcttcaggagacctgactggtactacatgagggcagtgtgcgcgatcgataagaacgatccggataaagtcaacattgtacggcaattaacttcaatcgcgcacaaaaccgggatgacgtaccttcttccaagttatcgacaatcactctcccatcccgctcatgaatcaccggaatgacctttgagttaggattgagcaggtcgcgcaacgtctcgttgtaaagctttgagggttgaatgaaccacgagatatcaatatgtaatttaatccagtgttgggcatcagaaacgaacggtgaaccgacctcaagatatgaaacgcgtagcaaaaacacgcgctctttgcactcgtcgatggcatcgaagatctggtcgatagctcgtggaatgactcctggatctccttccactcctccctgggaattgagaatgatagatagcaacatgtcaagattcgttcagaggaaaagcaatgcgtagtacagaaaggcttaccatggtgtaagtttttccggatcctgtcattccgtacgcgaacaccgttccgtcaaaaccatccactgtactggcaacgatgggtgagatgaccttgttgaacaaagcggatgtcggtgtgggcggaaggtgcagatgatctagcgcacggtgtgattaacatgattttagagatgcgacggatgaacaccagagattgggttatacaacatacctatgtgaaattctccctcgttctcccttcctttgattactccaccgcgtttcatgtttgtcggatggtgctctgctaaagaaatcgtgttggtctctgttgaacagtcatatattgaggatgttggatatggcggctttgccctgatcggtcaatatacaatatcgccatgtgtgttcaaggatgttttgtcattcaaatagctcctcacagtcgatctctacaggttgaaagcaaggattatcttgacttaccgaacgcaaaccatgactcgttccctccctcccggcttcgcctgcttcctgtttgacgcgaccccagatggcttggcagcagataagaccttcgtgctcgtcccatccaacccaccacgagccgtcttgatctgttgcatagaagccatactatgtatactggaggaaggtgtaatcgaaggagtgtcgtcggtacaggttgaacttatcgaagaacggagtgacgactcctccatgtaggggatagccaagttggaaaggctggaggttgatgatggcgcttgaatattgtccgctatcgaatagcctgacggacgaggtgttgtagaagccattgaatggcagattagtagggtgtgtaggatatgtgtgtcagtgtattaatacaggtatatgtttggccgagtagcgtcgtgagtgtgtaagtcggaggcagggttgaaggaatggacgaaagagctaagagctagttgaacaatctataaccctaacgagttaaatgatcaacgacgcgtctgttgacgcgaatgtttgtgacgcgttgaacgagccacgtggataatcttaccgagcaatgcacgtcaggaagatactactgtctctgcggtcaggttgatgatgatgatgatgatgataggatcgaaactctgaatgctatccattaccaccatccttgtattctgatcatccattaattggctaggctacatgagttcttctgataacccatagtgagttatatgcatctgtctcctagtgcacagctctcaataacttggcgcactaactaggatgaacaaactttctagttctctgaattcggcattctctccactggaagcctcagttctactggaatatgccaaactatctcaacagctgaaaaaggtccgtagttagcccaagaaacctccagtgtcctcatatgctgagttaaagaatgtctattggcaaataaagattgcatcttttaaacgacagtcaaaccctccacatgaagaagttctcttagcatttcgaggcttagagaaaaagatgggtctggttctcactttggtgcgtaaatgtttctgctcgctgaaaaaaaaccatctgttatgacttgatactcatccttcatcccttggttatatttgacgcgctcagtttaaatcctcagtatgggcggtcacgatggaccaagaggaggaattcgcccaagaggcatccctagtcaataactctgcccagctccagccggatcaataccctgtcgcctatcctcaaaggtatgacgagaatgccgaagactcgctggatgatgcagatatcaccattcaagaccaacaccaaagaggccagcaaggatggagataactatagaagccatgcagattagaagccgaagtgcggacgcatgctctcagattgaccgacatcgaatgtaattgtataatcatgacgactcccataactataatatgtaccattcaactcgctcatgactagacagctaggagagttctagaggtttgatcattctgtgttgatggttactaaccggtatcatccagacgcgttccccgcatctcgacgatctggaagattccacaggctcatctctccatcgtgtctttatgaatcgttaattttgtgtgaagtatccgttgtgtttcatcctatagcatatagccttgagggccgaatgaacttccactcggtatctgctcctctttctatgccgtttcaaaccaagagaacatactcggagtcctccctgtctccaccgtcatcagctgaagaagacgacggaatccgatcaccctcacctcctcggaaacggccgtttgtctccggttcagatccttcaaccgcccagtccgcatccgatggattctcctccttgttcatgaacggagctagaaagaggccggcttgtgactctgatcttgaaggggacgattgtgatctcgggatttcatctgacgagcaagagattactggtcagaacccatggagctcggacagtccttctggcttttcatctggaaatttaaatagccatccgtggaagacgtctccatttctaggaagcagaccggaagatggttcctctagacagcgggagcagccactaagaaaacgaaccaaacggggcttgtcggaagggttcaaccagctgggaatctcggaagatctccgaacaccgttgattgaggaggagcagccggggttcatccatccatctcaacagagcgctcaacagtttgcgttccccagagccggaaatcttggaaacaacattggcgaagtgaacaacaatgaaggagacttgcaaccgagtagtgtggttgaacccggtgaagttggtccggctgtgtggttgggtcacgcgcagaatgacgacgcatcagatgggctcagatttaccgtgttaaacgaggatgggaatgaagaaccgaaactgtctaggcagtctaatcaggaagattggaaggttggagtatggaaaggcaaaaacagagaccaaggttcgtcctttgcacgttcgtatgttttagatacatacactccttttgatggatcgttctggtctgaacagcttaactgatcttgtaggtttgacgtgtagggcccggacggttgtatgttcatccttcgtatatgaaccaacacccatcacattcttcgtatctgccgagttctcatccatgggacccaaaccaacctcataaagacatgatgtaagaccgttctcttccatatcagatattctcaagactgaccgttttgtgatctttccctgttacgttggctttcaatatccaaacagattatataacccactaaacaattcacaaaaactgcttgaaccatcgtcaccgacatcttctagatcatctttcttatcgagtaacactccaatcgacgctatgatggatactgagctgtattccaaccctaatggaccgtcatatcaacaagactggttcgggaacggcccccggtttgaggaaatcgcagacgacgaacccagtccagaggcaggaggaggaatggatattgactgagccggatcactagacaacgaaaagccttcgttctctctccaattaactcactcaacttccaattcttcaacttctacattcttgacctcactggctcggggcttctttgtcttcattcggggcaaggggcctgaagaattttgtctcaatattggtacacacaagattgagtggaaagagcgcaggacttgatacaaacccatgaagggatcgtcaccaacatcatttattgcctatcaatcatctctatcatccatcatacattatctgccactcgccgctcatcatatgatgcgcaccttcctttcctgttttcgtatcctcgcacgcgcgctctcttctccgttgtatccatctagcacacaataccccttctagtctctatcatctacacttgcatccttcctctcttcttcttaaaactagcaccctcttacatgtattcgatccctcgcacaaccttttgacattctctgagaatagaatgatgctacactctgatcgccgagatttatcagctgaggacgatggatatgcaggatgagtgaaagatgggaagaacacctgagaaaggatataggcaccccgatagataccttcttgtagtagtaagatctagaggctcgtccgtctcaggtgtacatttgagaagccttcgactcattgtcggttaacatcaacaggttgagagagcgctcctctgcaaacacatagtcagtgttgagcacaacgactaccagaccaggagatagatggaataggatgtacagagagttgttacgcgcgcataacaatagaatcactgagacgtctagatcacaagagaaactgccgggtcttccttccggtatcatatcactcgttcctattcgcctatcatgatcaaccgtttcaaggatggacgagctggtaaggaagtttgttgatctgagcagggtgcaagtcacgagacacacatggaatcctctaactgcagccatggtctatctagcccaagatgaaaatgcacgactcggctgtaaggtctagattcgacacggatacggagtctccgttgtcagcaaacaggccgtctaaactagaaagtatgcgtcagaagccggaaggccctcttcgcagtcagtgccagataaacgtcagcgaagaaccgaaggaaaagaggtgcactgtcttctttcccagtaagaaaacaggatatctcaagcttgccaacgcgaccagaccacgggctaatctctagctgacaaccaacatccaattgacatgaaacaaatgttatctccgcagatagagaagcatagatgatgagtgttggcagccagtatggtcgcccaagatttgttgtttcttagtgataacagaagtcagatctcctccatccgagggttcctgacttttgtggaaagcgaattgctgggcgagcggcctgctgcgcatttgacggcagtgggcccaaggaagacagtcaggcgtgtgtagcaacaatctagcagcagtttgtacaccaactcactcgtacgtatgaacacccgttttgtcagtttgtcgacggatggaggagagactatggcagatggatatatgcacatagtagccttacagaacgaacgaacgagaacctaacgtttgattgccgtttttcttgctttttttttctcttcgctttttatccgactgtgggaaataaattatggtcaatttttgggtacaactggaatcctcgttcaaattggaacttttcgtctggtgtctatcgttttttgccttcaaccgctctacccgtcctttcagctcaagaccagacttgtggtgagttttcggtggttttctagagtttcaggtttggattcgaatgtttgatgtgaaagaggtctaacttcatcatgcttttaacgtgttgtagtagcaatggctgttcgtatccgaaaaaaatgctggtctcatcaagttctggaaacgttggatttctgaccttgaacaaactctccactcgctgtctttcctccgatatgtttttgtggttgtctctttagcccgttcaagctccttccaccttcaagcgattcgtccaggttggccgagtcgtcctccttaacgatggaccttccaacggaaagttggccgttatcgtcgagatcattgaccacaagcgggttagtcaacaacgatgtctttagcgaaatgaaccgagatgggtttgaaggatggagaagtgaacagccggcatagaacatcaatctgaccgtctttcattttttattatcacctcaactctacttcgctcgccgaccctgtcttgtttgaatccccaaatccactcatcctccctgcctttctcacctccattgcttaacctgtctacactcgatgatcaccctatctccgtccttttttctgatcacttccggatccccttcgatatgttatatccccaaccgctctccaatcgtctacttgcctcgccaacaacctcatttcgaattttgaattcgactccctctctgccacgacatcctattctaaaacacgattataggctcttatcgagggatcttccaccggtgtcgtccgacaggccatctcctacaagaacttgatccttaccccttacgttcttaagagcttgccccgagctgctggacccaccgctgtcaagaaggctttcgaggcttccggtgttgccgacaagtgggctgcctccgcctgggctaagaagttggctgccaaggccaagaaggccgagtctaccgactttgagcgagtacgtgatgttcgcttttttgtgtgtggtagcatctgggtcatcagttggacgagtggtagaaggaacgaaggagagaaagatgaaatagtccaactggccaggatgttcacaacggtagtgttgaagatactgatcatacttcgctcttttcttgtatcgtctagttcgagcttatgatcctcaagaagacccgacgagatcagctcaacaaggccatctacaaggagaagaagtccgcataaacaaaccgggttttttcttttctgaggagggttttgcatttgttttttttaccatgattcgatgggtttttttttgttgtttttgggcttgttaacgcctttagccgtgcatgtcgatatctgtcaattaggtcggcaactggaagtcattttgtgcaggacttagttgatcactaacattgctgtgtcgcagaaacaacagatggtctctggcttacaacacatagagaatggagggtcagttggtatgacggatgacgaaacggcactagatggtatctcaattggatcttgcgttccgacctacagagatcgactgctcgatttttaagaagcagcggctcgttcattcgtctggatcactcgacaacgcaatccctcgtttttccgagtcctccatccaagttttgtttcacgtcacgtcagaggtcaaccccctccgattcgactctatctgataatcttttcatccgccaacgccgttcgacttcagccctagctgactggacaaataagaatacacgagtccaaagctgagtatgggctgatggtcaaacgaacggatggagagcggaggctgttggaactcctctcatccatccgttcggtattttttctgagaacgagaccgcgcgtgcatccagtctaggacgcaaggatgtacgactaaatatgacagccgaatacagttacatacaacgtcacacaaggtatagacgtcaaaaacgaagagaatgatcagaacgggcatcaattcatgacgactgttctcgtatttgaaacacgcctatgacttctatagtggtggcacgataggctatcagacctgtatgctttctttttatcttgaccctctgagagtctgatccaagtctcaaaatcggaagacagaaaggacatgcagccatctccggatggtataggagaggcaaagaaaaatccatgatagatgataagataccaacgatgaaggcacgaagtgaacaggccaatgaaagaatacccagttaaaagatcaattcataatacggggatgaagatagaggatgagaggccaaagaatagactacaatgtgataaagatggaggagaagggaagagagatccggacgtgaaaattgcaaagtctagcttatgattagaacccgcgatacccggtctgctgctgctgctgataaggattgaatccagtggactgaggccccatgaagcctgttgcctgaggttgcatgaactgctgttgttgtagaggaggctgcatgcccattcctcccatagggtaacctacaaagatcgagaaaataagggaaaagaaaaacaggtcaaaacatattcggtttggtatgctggtttagagtgagacaactcaccagtagcttgaggctgcataaacccagtctgctgtggctgctgcatcatcatccctgggaaacccgtcacctgaggtcggagagcgtcatatttatctgtttgatggaccacaaacgagtgatcgtttagacttgcagtagggatacatctttatgagaatgaaagctcaccggaagattgaggagcggcactagcatccagcacacccttgttgttcttcatcgcagcaaacacgttagacggattgaagctttgctgttgtgattg

SEQ ID NO: 1526 - DNA, 24578 bp, Xanthophyllomyces dendrorhous
ttaaactggtcggcagaggacagcgcgtttgcgtttgcattgacctgaccttgttgatagttggagttcataccggtcatttctgtacacaaagaagtatttggtatcggacggtcagagtttcaccaaagacactaccctttatagaacgatgtcagccatctccgaagtgaaagacgtacgaggcatgaatccaccacttggttgataaccagtcatctgagtctgttggaagccggttggctgctgctgctggaaaccagtaggctgttgttgttggaaaccagtgggttgttgctgttgatatccagtcatctgaggctgctgttgctggaatggcgacgtgctctgttgaggtcgcgtcggaatgaattgtccaaagccagtggccgtggggatcaacggattgagcaacccctggttctgaggaacaggtgccaaaggacctcgcggtcctgtctgttgaggctgctgttgctgctggaaagctccggtttgttgactctggagcaattgacccatcggagcaggcgaaccggagaaccctaaaccattgtggaagctctgggggacacttgtaggctgaggggcagggctaccaccggagccaatagacaagttgctcattcctgtagtgagaggttgttggataggcgctgagggaggtcgggcctgtccaatctgagctaggaagtcgaacgcgctagaagcaccttgggtagcaggctggataggaggagcgactgatacaggggcctggattggaggagcaacgggcgtgggcgtagtaggcttggcagagctcggccgaggagtccacgcatcatcatcaaagccatttacagcaggaacacttttaggcgctggttcaacaacaggcggagatggtgctggagagacaaccacgggtggcgcgggtgaggggttctcccgaagaagatcgccagccgtagcaatgcttgtcgcatcgactgatgaggtcgtcgatttcctttccggccgtcctctcctggtctgatttttcagactaccgtccgaactagtaaagagactggcagagttgttcgttgtagccgctgaaggactgcttacccggccagactgctcctcctgttgtagtcgcctggcgagtgcctcatcgctttcaatttgcttctttgtttccttatctttaggagggtttctggccgagattgcttttctgacacggatgacgtcaccttctcggagtccaagagatcgcaaggtggaagcgtccaaatcaggcaagatcgtggtatcaattttgtcacgctcaaaggcggcagcgtatcgggtgcagtcgtccatgtcacaaccagcattaaggaagaactcgaaccagtcgattgttggcttcttgacgggtgtcgggcgagactgagactgagactgagccgacgaggaaggacgactggaagaggaagtatctcggctgacgctgctagtaggtcgagacttgtggggatgggattgagcaagagggagatcatcttcgttcatcgcagggtgagcgggtcttcggtccattcctcggtcgatatattcccggtcctcgggcgacatcttctccagcgggacctcgataacgactccattgagcttatgtaaccggatcttgccctctttgagtccaagaaactcggcttcaactttgaactgtcctgatttgtcatgccaagttcgaactcggttggccgagggtcctgacacaatcaacgaatgaccaatgttgagtcagcatagggcgcttccagagaggggcgtagaagtacttacgagatcttccggacgaactagccttctgaggtcgatcaggcatgcttctgtctttgggaatagggatgtctcggttaacggcctccgaatgagaaggtctagacctgatttgaggaggctggggagcgccttgctgtctagcccgttgtcgtctaatgaaatgaaatgaaatgaaaattttaagtaatagagttaacagtaagctcgatgagtatggacgaggtcatatacggttgtcaccgtgcagaaaaagaatgatacgtactcggccgcctcatcctcccttctcatcttttcttcgaccttctgtctcctcctatcctcttgttctcttctgaccctcctggcttcagcttcttgagcggcctcagcctcctctctctctctccttctttgagccttggcgttcgcttccgcttcggcctcggctgcctcccttgccgcgctctctctctcctccgcctcgtaatcttctgctgaattacccaccgagttgtctacccctgctgagccgacctcgacatactgcgcgggtacaacaccttcctcgcctcgctcgttccggaccttccaccaatcctcggcactctggtccagaatgactaggttctcaccctccgtcaaattaagctcgtcctctccttgagcttcgaaatcatacaaggcaaccgcggcggccgcgtccgaattttcagctgggtgggattctgtgatcgggctggaggcccaacgaacgttcttggtcgacgtcgacgtagtgagctgaggtaatgtaggcggagcaccgatgatgggctcatcaacggctgagaaggcgcctcctgagagatctttagaggtacgaagcttagagacgatctcatctgtctcatctcgagagctggaatgaaagttgagtggggcggcgaggccggtgatatgcagtgataaatctttgtggtcgtgggtgacagaggtaacggcagagatgggatgttgttggataggggtctaagagagttcggttcagttgcccgatcgtcattactgtcaaatacgaaatgactctgacttactttatctgattcgcttgcaaagaagatggcaccattaccgacgcccaaggttccctttttcttctttttcttatcgtcaagttcctgtttgagattcgtttcttggcatcagcttgtattccgatcggtgaatatgatacatcttcagacaatatcacgtactgagaccacccaagtctgaatcgcgtcagctttagccttgttccggctggcggctgccagttctgctggatcggtatacgcagccgcaggttccgttggggactcggtctttggaatgcagcaagaagtatagatgaaaccgagtgagcctttcctatactcgtgctttcttgctataagtgcctcaaaaggatgacgtaagcttacttctgcagagactcctccgaacgcgtcgctttctcctgtgccctcttcctcctgaacatatgaagccgggacatatccgagtttgttcgcgtctgattgaagctttaccaagagccactcgtcatccttttcgaatacctggagcgggtcgtcctcgttcatcgtaagttcctcatcgttggtggctgcgtatgcgtagatcgctcgagcaagatagaggggagacatctaaatggaagaaacaggaatcgcagtaaccgacagaaggtcttagcatgatctacatagagaaaacgacacacaggccagaacgatggaacataaagacgagcgaacctcttcaacgtaattggacgggactagtccgaccgctccttcctcttcactagcctgatcgagttttacctttgctttccaccatctaccagaaaagtttcatttaaaacgcgtacaagaaggttatccagaagcagacaagaacggttgaatgaagaagaaggaaggatgtagagaaacgttccaaccgagttgtcaacctagtgcttctcagtcaacatagcgggaacgaaagactgactgatcgtcctccttgtcgatgatataaagctcctgatcctcggccaacgcgagctctgtttccggatcctgaggcgtatagtcgtatagggctttgtacaggccaaacatctgggacagacttgactcgagatgggatgtatagaggaagagatgggaaagtgaagggaaaaggcgaccagaagaaaaagccacgcgggattgagaacgataagcgtctgttagggttagctcactctagtagcatcatagccgtcggaccgtgagagtgtggatctggtacacctagcatacagcatacagcaatcagcaatcagcaatcaacagtcagcaatcaacatgggtctactctctatattcaagtccaaaaagtcctcggtgagtgctggtagccgggaaggatcaccagggaaacagagattgaccttttttcgatcgatttcataggagggatcaaacgatcaggccgctacatctacatcggcgtaagaccgtttacctctccggctcagagtgacctgtttttgcggttgatcaagcgtttcatacatgcatggcgttctcaggataactcagaaagggcaggccggacagttgtggtgcgctcggtatcactctgaactctccatttggcggcttgtactgaaactgtcaactacctagctacttttctatccagataaatggcgagcctgcaggaaacatcgtctttgtaagcacccatactccttctgatttgagacagaaatcgtttgatgactcgggtgaatctccattctgctctgaatcgacagaaactgtatgatgatgtggtccccaagactgctcggaacttcagagagctctgtaccggtcaaaatgggtttggctacaaactctccgggtcagtccattcatgctcgtccagcttcaatcactcagacacgaccgacatgacatattgatcaaaatcgacatcactcgtccattcgaccttctagttttcaccgaatcatccctggtttcatgcttcaaggtggtgactttactaggtatatccatcgccgtcattcttgatatccgtgtttcccagcgctgactcgcaggaacaatccatgtacgcgttttgcctaggcacgatgggacaggtggaaagtccatctatcctggacgaggaggaaaattcgaggatgagaacgtaggtgttgagcgcttatcgttcgacatgaactcagattgaacgcgccgtctctattcttgtctttctgatcatcagttcgtcgtcagacacaccaagcctggacttctctctagtatgttatttgcttccatcctgtctatcaaccagtttcgtgatgaaaaaaaaagaagcttacctagacgactatgggtccttgtataaactagtggccaatgccggaccggcgacgaacggttctcaattctttatcaccgtagccagtacaccccatctcgagtaagtgggccgtgcatcatcgtaatcagaaacatcaaccccctacaagagaaagctgacctttgttcttggtcaaacgactttatccgggggaaatcgtatcggaaaacgtccttagcgggaaacacgtggtatgtgtttctcgtctcttgatctgcgcggcgtacacatatgacgatgagagaaagctgaccaggctgacaatctttctgataatgcggtctaggtctttggtgaagtcatagaagggtgggtagaacatcatgcgagacgatcaagtatttgacaaaactggacaaggctgattttgttgttctgctctgccatcctgccttctatccattctccttctgggtggccataaagtatggaacttgttcgacagatcgaaacactaggatcctcatctggtaaaccgaaagccaaagtcgggattgcctcctccggagtcgtcatctctggagatgattccgattcggactagagaacctgctgtcggacggaaatcgtataggagtttgaagagggaagcatgtactacgtattgacaaatctccttccagattttccgttgtcagatgtgtcttttgtatatcaatgcacccaacaggccttattcgtcagatctagaagtcacgtccatctctactaagctatgctacatttcttcaactactcgggaagcatcttcaacccgaagagttatcagaagacccctccaaaaaaaaatcacacgttcataccccgcttctacactcaagccttggaagccctcttggcgatagcctcgtcaacagcggccctgatctggttgatgacatcctttgagtcctttgctccaaagatggccgaaccggcaacgatgacgttcgaaccggcgtcggcgcaaacgtggatggtggcaggtccaacaccaccgtcgacctgaatatccttgttagggtaaagctctcggagggtagtcacctgtacgcgcgcagagaaagagagagatgatatgtcaacaaccccacccacaaagagaacatgatcagagatcattgagaagagtcataatggacgagacatgtctgatataaacataccttgggaagacactcagccataaacttctgacctccctttcctttgaaccatcaatgtgtttgacaccagataatatatcaggaatcctatttgttatcaacaatgtaccaagtcagaacgtaccagggtgcacagtcataaccaagatcatatcagccgcatcagcaatctccttggtgatcacctcagccggggtatcgggagagattgcgattccagccttcattccagcgtcatgaatctgcttgatgatcttgatgtgatcctcttttgtgttcaatcaacgaccgcacgcgtgcccagattcaaaagggaaaacaggttaggcgatgagtctaaagtttgaaactcgagattttaaacaaggaaactgttgaagtaaaacgcactggtggcctcgtagtggaaggtgtacaactttcctccggcggcagcgacgtccgaaacccactgcgggataacacacgtaccatagaacataggcgttcaataaagggacaataaaatgggaatgaagagtcgacatctacaaaaaggacatcgcttactcgttcgggatcagcgaccatcatatggcagtccataaagatatctgggatggcctgcttcacgcaagtcagaataggggcgcctaccagaccaacaaaatttcacggacagcttggaattagtacctcttgtccaaaacaggtcttattgaggagccagaattgagttgcacaaagaaatatcgaacgaacccatagtgatattgggaacaaagtgtccgtccataatatctattgaaatgaagagaacacgaaacccaagatcagcaagcccagacgtcataagagaaaggaggaaaaaaaaagaggacccgtagaagagttatgaacatacccatgtgaagccagtcagctccatccttgatcattcggctgcactcgaaagtgagctttccaaagtcagaagcaaggaccgaaggagagatgatgctgtttggatagatgtttcaagggaactatgacgtgagacaagaagagaacaggagcgagaaacgtccaaaagaaacgctaatcaagagaaagagaagagataaataccttttgagagtcatatttatgcgcccgagttgatttgcagaaaatgtgagagagaagaaaggattacagatgatacccaacaaaatgaaaagatggtcgataggaaagaaggaaagattcgttcacggaaaaagtcgagtgatagataaatatatcgtcaggcttgcatcagcctcaaactcaagtgaaaaagatcatatattcaaccgtctagagtatcgtacaccacacaagtggaaacagaagagaaagaacatagtgtcgttcgttagaccaaagtctttgacatgtaaaccccgtcgagctcgtatcccaaacgtcgatagtaatccctggttccgataccggcgatgactgcaatcttccaactatcgtgttcctctcgggctatacgttctgcctcttccatcaagagtgttccgataccctggtgttggaatttctttgggtttcgaccatgcactccgatagccgttccatagacatgcaactctcggaccattgaggcgcccatgccttcgggtccgttgaccaactctttcctaaatgttccctcctccgaacactttctcaaccgaagaagaccgacaaggacgtcttgttcagcgtcttcataagacaagaaggtctcccaacctccattggcagcgtaatctcttcggatcaactcgaggtggtaaggccggactttgtggtgaatctcgtgaatctgaggtgtcaaggaggcagttgttcagtagtgatagctgaagaggcagaaaaaggaagggttcggtcaaagtgatgaaatttgtactgactccgacctctcggtatctaacgtccctgcattctgctccaaaatccttcattcgacccaacgccagctctctcaagtttccgttttcgactcccgaactgacaagcggcatggggatatccctctgaactcggtaaactctcgtccaagggggaacgagcgccatgattcgagcaacgatatcgactagcgcattcggggtatagttcttgtatttgcccgtcttccagagttcatacaacccggttcctcggatgacgagtgtcggatagagcttgagtccgtccgtcctgtacgctggattctcgaagaattcctataagcgagttgacgcaaagggagcaaaaactcattaataccatgttcagagtactgcgtggtaaacgagtgactgaccttgaactgggccatatctcgctcaacacctgttggcacgatttaaaacagaacaacaatatgtgtcaaccaaatagtcagagcaagataagggggttgtcccatcttattgggagagggacaaagggggctttcccgataactaaccgacgttaggaagatcgggcatcatatgggcaacaatcttgtaaccggcatccttggacatatggaaggactctgtcacagctttcacggtgtgcccactgaaagtttcacgcgcagcatcgagaacaaatcacgtctctgatcagataaaccaggaccaaaagaagaaaaggctaggagaagataagcgcgtaccgattggtgtctcgagccacatcctcgtaaacagactgaactccgatctcgagtcgagtgcatccgtaccgcagcatttgacttttgataccatgttcagagcaacataaacaagagtaagatcaaagagatcagaaaacacacgatggagataggcatgtgtaagcgcgcgcaacattcatattaaagcaccataaacacacgaacctcaaatgcggcctgagacagtaatccggacgagtctcgatcgtaataccaacacatttcgtcttgctctgctccgagaaccgaacggcttcatcaacatctgttccagtgaatccggagagcgcattgtgtagctgagcgacgaaaaagtgtcgatacgactcgggcatggacatgaatgttcctcccatgatactggaattgatttataaattcccacaggtttaggtaccaaattaagagacgcgcacagaaagaaagagcaaataactgcagacgtacatgatctcgaccttttcaacattgtgtcccaaacttttcagttggtccactctacctttgcactgctcgtaaggatcgtatctggcctgtggggcgataaatcatatggtcagttcttgccttgacaattctgtgggagcaagaaagaaggaaagaaagataaactcactcgaatagctcgcatggaggtaggctcgtatccagtgtacgactgggtagagtactcaaagtccgagtctggtcctccaggacagtagacacagatgtttccagtcatagcgacgtgaggacatcggtgaggtttgcacatgacggccacgacggcaatctaagtcgatcgaggaaaaaaataccaaagataccgaattcagccagggagacagagggtataaggatcatagtggagttgagagatcactgacacctagtgaggttggtaacagacgacgagcaccaaagtttgtagaccagcaatacgttaaattatcaatttcctatgttccaaaatacattctgtagagaaaagggaatcaagaagattcgacgaaccactagctgtcctgacgggtttaatggtgatctttcctccaaggatcgtcttccactcctcaggaacagccgccaggatatccattaatcgagggagctgcttgagcccgtttgccttcgagatctttgcccgaatggtattaagggagatatctgccggcggcttcttggaggtctgtgcagctaggacctgctctttatggttgttaataagggcattgacgatagctgtacacacgagaaggtgaagctctggttgggaagggcctagagagaagaggtaagaggaggtagagcaagcgtggttagattgagccagagtttgggacagacatgaaagaaacggaaccaggatcaagaagacagactcacctgcttggacgaccatggctgcgagcaaagatctggtctccgaaggaagagagtgaggacgaggttggatgtgttgagtagtttggtgctgctgaaggaaggactgaattccttccctaccaaatgctaatggctaattgggtagccttgcagggaggtcgtaacatttgggcctggttacggcgccgcaacacgtgcttacccaaaaggctgaacaaatctacgcgaaccacgacttgcctctgtgatcgttgaagctatgcccgcgggtcgcaaatcatttgttgcacctccacaccgtgaaaccttacaaaatcttccgtcctgggcaaccaggacatcaataatatcgaatacaatacagagaagattagcattgcccctgcataaggatgacacgattcgatcagagtggagaccttcgggtcaaattatttttttctttcgtatgtctatatctgttgagttgtgtactttttatgtatacatcgaggatatgaacttatgggacgtcatcatctgagctctgtattgataaacattttgatatatatgggtactttccttgtgacacattgtagcagagaacaccatgtatatgaacatggatgattcagttgattagaggaacctggcaaaggcaagggtaaacaatatcacaaccagcgccgtacatcgtccaaaccaatggtgagaccggagtcctcacaaaccggagggagactctggaatatgtgtgtgttgggttgagggttgagccaaatcacgtgactgcacttcttgctagttggctcgacgctcatccaattatctcaacagtcagcctcatcaattctggatgcacaccagatgaacgtcgagctcctttctcccttcctccaggactttccagatgcaatcacaaccactctggatgattcagccatctgttccagattcaatcatgctggagtctttgctggctccttcattgcctctggcagagcggacggagctgtctgcgtttgggacgtcgagaccaaacgtccagtttggatcgaacaaggccacgcagagtctgtagaaaccgtttggttcgtccaggtttagtatcgtgatttgagattgagagatcctgcaaccactaatctttgccccgcgatgatcctattggctgtagttggtcgaggaactcaaggtttctcctcacttcatctagagacgcgacatgcatcatctgggatctagaaacaggcgaccgaaaacaagtcatccggttcaaagctcccgttctgggcgcgttctttcatcctcacaactcgttcgtatccttccttgacgcgtattcgtcctttttccagagtagctgacatgaagctgtcggtttgatccctcgttttaccctgatcatgttcggtccttcagacagatcttcctagcaacgctgtccactcatgagacatacttagtcgacctccgcccctcctcaagaggtagatacgagctttttgacacagatacatccgacccaacgtacagctcaagtacaaacggccagtcagatgaaaaaggaaagggaaaagatattagaaaaacctctgggtttgtggtcgctaagttctcacccgatggaagaaagatctttcttggtaccagatcaggagagttgatcgtgatggatggagagactagactggtcagtcatccctcttcagcttatttttacactctcaatttgattcagaaagagctcatactctacaatatgtctcatcataacaggtagaaactcgaacgaagttatgcaacgcgataatcaaaagcatggagtttgacctctccggtcggtgagctctctctgtccgctttccttctttctgtcatccaacttctatcgctctgcttactcagtgcgcataaatcgaactgaacgtaaacagtaatttagtgatcaactcgtccgatcgagcagtgagagtcctctcagtcgctcccgtttacccagaagatccgcgctcggtgtttcgagtcgagcttctccatcggtttcaagatacaatcaatcgaacgccatggtgtggagttgggttctctggagacggagaatatgtctttggaggttcgttcagcctttagacgcccttttgtgtcgacgccatcctctcaagctctgacatcatgcgtccctccttcgtgcacttcttcggataaaaaaggcgcgggtcatagaatatctcatgatatatacatatgggatcgatctagcgggacgctcgtcaaagtactcgaaggtcccaaacaacctctcgatgacgttcatgtttgtccatcttctctctttttctctctcattagttcactcggcgacttaatcggctgactcggaaaaaaatcataaccgaataataatcaatagtggcatcccaccaaaccagtgatcgcctctgtatcaagcttgggatcgatccatctctgggtaaccgcacaagctgacacatggagcgcatttgcacctgggtttgaagagttggaggagaatgcgatctatgcggagaaagaggatgaattcgatgtggttcgtcgcctgttttcctcattcgactacctatcattagggctaaatttagttctctactcatctctttctctcgctattggtggtgatgaacaccaatacaggaagacgaatcatccctccttcgtcgtaagcttcaagaagaagacaacccgatagacattctgcatcggtctcctctcttcgcatcaatcacattacctgatccaccgcctcttctgaccttaccctctaatgacccagtcagagcaaaatccgaatctcctacaacaggttggtggtgggatattgaaccggatgaggacacaaagctcgattggttcatgcctcttaggctggatgagaacggaagggtgcttagggttgatatggacttcttctaaaaacaaaaaaaccaccaaccaaccccagttctgatataatgatgcgctgtttgtacaaccagtcatagactcaccattgtcttcagacttactcgcctttattgtaaaaactcgacataatattgttcttggtaatacaacgtgagagcaaagaaaaaagaagacatgacaaggggaacatatgggcaggatggttcaacatatagttgttgaagtggtgtcgatttaccagaaagcacctgttatcggacgtacaagagagaaggaaaatagtaagaacggcttgatgtgacgggtgcaggaagcaatatcatacgtacaccatccgatgaagcattgacaaagattctccatgctggtagcttgttgaatcagttttcgtacttgttcgtcgactggtagaacctgaggtggtctgagatctcggccctctcgacctacgaagaacatcgtacacagaatggtaagaaactccgtgcatcacaaatgatggcatgagtcagacccgaaagggtatacataccgaaatctcgtccggtgagtttatcttggatacgctggatgaccttgacggcatgagcattttgaatctcttttccatcagcgcctatggaccaaacacaatcaatgaatcatagtcagccagagaccgagtcaaacaaccagcatctatgagcttacctcgaagcatctcgttctcctctccacgtcgtctgttacctggtccgcctccgaaagcgcctcgatctggatccatgtctactccatcatgcaatcaacgtcgaacccggtcagtatgaaacagacatagtacaatagacgcaacaagggcaaaccttcaggagcggcggcaggttcatccggagtcaatgctaatctccagatgaacaaagggtcgtagacgaatgcctccaacacagccataagagactccttgttgtctcgcatgacgcgcatgacaatctcgcaacttcgactgtaagctccatacacaccgcagatctgcacggatacaaaagaaaacgctctagtcagatctcaaggtttgctataacatccatgcgggagcagacaggagatgaccaacctccatggcatttgtcaacattcttgtcagacggaagggaatcttctccggaaatttgtctcggtgcatcgtgatttcgaaacaatcaccctggacaaatcaacaagaaacaacgtcagaaggcccttgtttgcgaataaaaataaaaataaaaataagattgagtgctcggacttacaaaatcgatgtgtacaatctttccagacaccctgtccaaaagcagatttgaggggtgtcgatctcccagtcccaaaatataaccgaccatacttgttgaagcgagagatcggatataggttgttcgtctctcaacccatgactcggagtttcgactcttgagccacagcactctatatagatcttgaccagtcgtattctcgagagcatactcgaagacctcaaccttttgcatcagagtcaggtagtcatagtcgggtgccatctaagtgaaagtggatacatgcgatatggttttattcagtggacgtcatggggatgccaacgttgaacgaagacacaaacctgaagaatgagtcggtgctcaatgtttaaaaggatcttccgtgattctcggtagtccttgatgagaacgtgcatagtatctgtatcttgaacccatccgatgagaccggaattcggcgataggggcgtgatcgagtagctttggatgtgcagatgtcgcttgaaactttctggatcatgagagagaagagtgttgaccagaccgaagagttgcatgaccctctcatcttgtcgaagatcctcgtgacctaaagagaaaagacggtttcgatttaattgcaaatatatgaattagataaacactagtgattactgtacctttcaacacaaactggtacgcctttccatctccgccattcactgttaatcgtctagggcgttgcttagaagtgatgacggtgaacgtaggcacaaagctgacgatcctgactactggttttccacttcgataagtacctacagggagtcaaataaaatgtcagtcatcgtgctgactcaaaaggtacaagattacttaccaggaacagccaactccagatctcgaacttttaacagtttcggcgaaacgtactgcagctctagtgtcggcagttgggataattgcttcgagagcttcttgaaaacctgttgaagaggaagattcataagtttctggaaattactgcttcgtcacagctctgtacgaaccatatagtagatatcccatgcagaactcaagtcgttcgcatctccgtgctgcctataacgtctacagaagtctcttgcaacggatagatcatggctgaagctttggatgaaagactgttcgcgcagagtttcagcgccctgtatataagagaagcaaatcaaaattcagtattgatggtcatcctcaacgtgtatacaaatcatttaccttatcgatcatttcatgaagcggttctaaagtgttgaacatgccctgaggattctgctcagcaaagtagaacctcgacgcttcttcaagaccctcaacccataactcatgccagaggattgctactcggataagctcgtgactgacaagtgacgcctacattacgattaaacgaacattcgtcagcagtcattcatagcatacggggcaggacacaaatatggtagtttacctgatcaacgagcagtggactgtgatctctcatctggttcatgatggcgtaggcgccttctgtacgagccagcaccgtcgatttggaggctacaaggagcgggtaaatcaaggcttgaggatgagctcgaccgacggagttgagtagctgctcaattgcgtttcgaactagtgaattggggttgttgattcgagcaatgatctgttggtatcgatacaccgacaataagcgaagaattctcttaaactctacagcttagcagaaagaatatttacctgaggaataacctccaaccagacatcaatgctgacgcttgaggcacccttcgtgatagccatgttcaccgactcgtggaaaccatagttgaaccaaagagtaagcagtcgaagagtgtcctgaagggagtttcccttcaaaagagcaaccgaccgatagaatcctgtttcggagaagacgtcagctaaactttctgtgagaccgaggatcgaatatcattttcgagacctaccttggacagccggaaccacatagttagcgaatacatcggactgtatcagatcaggctgagtttcaaatcgttggataatctcgaaacaccgaagtgaaaattcgtgccaggccttataccagtcagagtctagctgggttgcacgcttatacaatttgagaatatcgacattgtcggtctacggagcgaagcgacgacaagagtcagcaatctcgaaccatgatacatagtactcgatttcacttacgggaatccaatcatctttcagggcaacctcccattctccctgtttcaaataacatctagcaagaagctgagtgaactctgatcgagcttccggaggaattaccatatctggagtatcgagacccagatctgaggtaagcttagtagtaaacgactgaagccataacaatgtatcctgcttagaaccctgggcccaagtgtatttgaagtatgcgtatactacatgaggaggtgcttgaagagcctgcacgatgaacgaatattatgttcaacatactacacaagatcagatgacggacatgtcgaaataacttaccccatctccatctccattctcttgaggacctaatagcgaactaagtgtcttctcggccaagcccaaacggtcggactttcgacaaagattggcgaatttgatccacatgtctttatcttgactcggcgtgagcacgagacttcgaactgatagcactcgttgccagatctcaacatcttgctcgcagcctttcagtctattgggggcgaacagaaataatccatgtaagctccttcctctgaatgattgaatgcacagtcttaccttcgcatccaggttctgcgcatagaagcctgtcgttgaggttgatctgcagattgcttgtacgtgatgatctcttctagttctgagagcatctgaatccgaatgagtacactgtagaaccaattcgcgatgaaattagcgtttttaatttacaatatttataaatgattgacaatctagaatacacgaacttatacgctcgagcataactctcgttaaacaacgaacagagctccggatctgcaccctctcgagacttgttgatatactttagcgctttcgagtactgattgccgtgaatagcgatgatagctcgataaaagaagtactctgcggaatctttcttcatgaccgcaacgtagtcctccatgagatcccattgctttaatgaccaagcagcagcagcagccaaaggggagtactttcgatggtcggcggtcgttgaggatccccagacactctgaacataatctgcaagtttgtcccactctcccaaagcgtgcagacactgcatcttaccccagatgacctcgttgtcttcctctccggcagccgactttctatcgaaagcctcgtaagcctcctgccatcgattgagctccaagtaccatttctcgtactcgaactgggtgtgatcaaattggtcgtcttcgtgacgagcgaaagtaagaataccccaggcggtgtcctgctgctgaagtttactattgacgttgaccagagacttgactacagcagcagacggatctgtaaagtactcaagctccttgtagtgaagagctttggcgaacgctcgatgcgtaagggccttaacggaagttacaggatgaaagagcgagaagtcaataaatattgacagaagaagagagacaaagagatagaagtacattttcaccaagcatctttgggtccagaggtaaaaccttatcatcgtgctctgcaaactcgcagaggttcaatagcagattggtgacctcggcaggaaccatctcagcagacatagcattctgaatagagttgatgagatcctcctatgggtagaagaacgaagaagaaggaaagttgccgcatgttagcttcaatgtttcactaacggcgttgaacgcgacagatgtaagacagacgcacttgatatggctcatacaaagtaacccagcaggagatgaaagcaacgttgaagagttctcggttgagggaatcatgttcttgcgccaaatcttgacaagctcgaagggcaacagagggtgattcccgaagaagttcaagaccaagctgcttggcccattctctccattcatccggcgtcgacacaagtgaggtattccaagtctgctttagagactgttggttgacagcgacgggagcaggtgtagctgtctgtgtggcatcactcgttttcctatatgtaatgaagacaatatcagacctcgtccagttctgcgcggcataacagtctttgactcacacgtccgatttaccaaagtcttgcggcaatggctctcgcttaaggatctttgtaacaagctgatcataagtcgtatgctgaattcgactggattggatgacctagaggatgatggcatgggtaagattacagtgtaaggatcgatgaactgaacaaagaaaattatattcggagatgaataagctgaccttgtgcatcattgggatgaagatagcatacgaagaccctaactgaataaccaaagagcccaaagcattcatcgcaaggagagcaaggtgctgagaagctggatttgatggcgaggaagcggcgatgacggaggacaacggatggatgatctgcgaggcatgctccgagaagttgacctgtctagagagactaccgatcgtgacgatagctgtttccttaactttcaggctaacatctgctcgatccaagagttttagaatagcaggtaagatgagatgagtgtactcctcaatacttaatccgaaggcggccaaggcatgaagggtctcaaccagaacatcttgtctcatcggatccgacagatcaccgtcgaatgtccgaaggatttctcgtagcagacgaggaatggatgatttgaagtcgccctcgagcgatcgagcgatgacttccactagctgaatcacagttgtctgaagttctggattgctccagaagtcgaggatgactgtcaagataggatccaggaagttttggatatgatgcttgacaagggagattagggttcctaacttggtgagccatggcttttgataggctggactactttgtcgaatagcggctaacatggcaggaacgacctatgataaaccacaatgtttacaaatcagctgcagacaaccaagcatgataaaaaaacgaataagagaaaggcgcattccatgctcacctgaggcaggaaagggatacacttcaacccctgggtaaggaagatatggacaatagcatccatcgctttggtgtaatgaagagcgctcagtgaggggtctgagatgataccaacgagcgagttgaaagctacagcctggaaatagtcctcatttgtctggcctccaacagtggtcatcaacaaactgatatctgtatgagttgaccttgttcgatcgttcgtgcttccatccactttatcataaagaactttccgtcgatacggatcgagtgctcctagaattccaatgactcgaattgtttcccttcgaaccgatggcgaagtctccaccttgaccagtctgttcaggatgatgagtagttccggatgatcgacataaggatcgatcactgttcccgtgaacgaagccacttgaccaagagttttcaaagctgcgtctcgcttaatagtcggcgatgaatcctgaagcgttttgatgaccaggttcatgatgtccaccactcttgggccaatattttctccagcaactcgagctagttcacctagacaggttacgacagaggctgccacgatcggggtcgttgtctcatcgtgagcgactcggagaaggacatcaagcaactcttccgtgtaattgacgatcaacgaaggagaagcctcgacaagtaggcaaagtaatcgggttgtctcctccttctgtcgactgaagattgaaaacagtaaaaatcgagtacgaaaaggtcaatattcgagatagcaggtgaagaggttgagtgtacgaacctctttgtagaaaactctaggttagagatcatctggatcaacacctttctcagggatggcatcacataggcgggattatgtaatgcgagtcgcccaatgattcgtatggcaagaacccggttgatgaaagaggtatcattcagggcaatgaagattgtccgcacgttgtcggcctgggcgagatgtctatcaaatttctcggacaactcctcaagtacaatctgtctaattcgatagtctgtgcgcggatgcaataaaaaggcagtcttcagtcagtacgttcgttctgtgcagcaaagattcaccggaaacttgcctgggtcagcaattccaacagtcaacagcttctccaagacctcgctcatgatctctattgagtgtgcgctcgtttggaaacaaattggatcccgagagaatagtcggcagcacgtcattgcagctaccgaacgtacttcaaggctgtcgtcctccagataaggtaggacacagtctcgcacaaattcgttcaagacatgacctgttatacaccgcgacgaaatcaggactgtcagtcatccaattggctacagtatcacaggtaatacacgacaccaacctccgaattcgaaagagcttagtgttcgaagagcaagagcgatggtctcttgagactgtccacctggtccggtcgtctaaatgtttttgaaccagggcaacgataccgtcattgggaaatcagtcagcttatgaaaatcatgaattgcatgtaggcatatcatgttaaagtgatatatacctgaagggcagccatatcccaggtgaccgaagcaatgttggctctctttggaggagcgcccaacgccctgtacggtttcccactcaatatcatcgaaagcatttccaacagccgatcttatcgtagagggtacacaaaaggagatgaatgaatgaataaatcggatccataaggccgcgatgcagtctcgcaatcagacatgaaagaccacagatgagtctgattctacgtaccctggatagtcctctgtaaaggcttgatgctatctgccgtgacaaccaatgcctgacagagcggttcacctagcccggatgcgaacattaggtctaagagatcatgcatatgtttcgtcagaattggcccaaacgctttggctaacatgccaatgcattggaatatggggtcttccggtggtgcattcttctttctgtagaatccagtggtgagtcattgagagatacggacgttcagaaacatgccatgttcaaagagggaatagcagccaggtacataccctcgcatagccaggccttccttaattgctgtcaagatagcatccaagaagcctttcatttccgttccaaccttgtcggccacgtgtccgatcgagaggaatgctgatcgttgatacatacgatacgtgacagagaatatattaggctattgatctaaacccagcggctaaattctgaagaagaaaaggcgcgcgcacctaaagccttctcaggctttttcagctgagaaagtagatatctcatactggtcgccaggaaactcgagccggaaggtcctccattctctgcgacaaaactctggggatcataactggccatgtgaggaataagcgcgatgaccgtttttcggatgatcgcgtccttgtgctccttgttttgtaagatcagctcgcaaatattataatagtgcgcgttcatgaactaggtatgcgtgcagacgacaacaacaaaagctcagctcgtgcccgtgtagaaaatttacctaacgttgaacatctcaccatttctccgagatcgaagagctcctgatagacaagtaatgatccatggatggcctcgggagttccaattcctagtccatttctcgcctcctgacgcatgtgttcgtaactctctaggcgaggtctgctatcccttgaggctaaaggggtgatgttgtagatctggaaacatttggaaacaagcaaggcagctcgttctcgaagaattggctgttgaagggcgtccaagacagagaggcaccgtgagctcattacgccgcgatgatgtacacaacatgtgagagaatacacctacacgtgtatctcggagggacgtccatatggactgaagaattttaggaacgtaaggctgaacaatactgggtgcctcaacagccaattctctcgctaacatcagatgtcttgagatatccgttcctatagagagtaacccagacaaaaatcaaaagcaatcagaagcggaggcgatgggaaggaaactgaagaaacaaagcactcttacctcctagacccggattctctccgcgcatgatgtctacaattctctgaatctcggtcgacagtaagctcaggatctcagtagatctctgtcctttaagcgcaataaaacctgaagagcgcagagtacaacatcaaaattgagtggatttgataagatttagcaagaacgggttattgataacgaaagaaggattagaattcttaccaactaatcggcatgttgctgccgtcacgtccatatctttccttgagaagtattcctcgacttgtttcctgaagaagactaagatacgaaagcaggaccccaagtataccaataagcttgggtccaggtttgacaaccttgtcaaccatgtaggaaggaaattactcacatccatgtattcgaagcaacacttgaggagtgactggcaactgagcactccccgtcaattcaactgtatcccgagtaagattcaggttgagtacgtaacttggaagtcagatttcggtaaaagcagagaaaacgcgtactcattccagccaaaacagcaagcttctcctcccttgcttgatcgtgagggagagcaaaaagtttttggacaacttcaacccagagcagcttgcatcgctcctcacccgagtactcctccacacacttatcacaatcagttgtatcagccggatcatcatcaatcagtcattgacatttcctatatatacaattggtggatgatttactcacaaactctcgtagtttaacggctgccacccggcgttcttcatcggttctagtgagccgtttgtcaagtggcggtttccatcgagttagttatctaccacaccttccatctacaatagggcgtgtttttttccttcatggaagtctggcagagcaaggacacgtgaaattcatgggttgctcaccgtgttttcctgagctccaaaaacagatccccgaatacctccagttgactggaggcggaggtggccatcgcttgaagtggactcgggctactgggaagacgggaatggaaagcaaaggacgtcggattagtcctgacgacattgataatagcaaaacggtcagattagtcggaaagacaaatcttacatcaatcactaggcagttaagactcgtgtgttgatgtatatgtctgatgagaaaaacagagaaggcgagaagatgaaaagaaaaattaacagagaggaagtagatgaaagtgatggataggaagtagaagatgaagtttgaaggtagggatcgctacatcatcacaccttccctactactacctttacatcctgataatgctagtcttctctttcgccacaaacaatgagctctctacctcctcctccatatacagtcacacctcctaaatcggaccctacgctggcgaccatgccattcgaggttcttcaaaggatcttccatttcgtcgtgtcggctcggccgacgctaagtgatcgcgctttggcaagatggtcactcgtcaaagagaccagactcgtcagcaccatcttttacaaaggtgaatctccgttttccggatcttaaactatttgaagctggatctgttgttctctagttttggttcgttcgcgaccctatcctgactgacaatctatcgttcatgatatctatcagtcattcaagctcaactccggactctcctgcttcaaagttacttggcctctgtgcgaccaccgttttcgtcgacctttgttcaactgaccggcattccatcgcaacagatatcaat

SEQ ID NO: 1527 - DNA, 15613 bp, Xanthophyllomyces dendrorhous
ggcaaattgccctctgaaggaaactcaagtgctcgacttgttcatcgccgcagcgacgagggagaaagcggagcacattgagagtgatctgtacgaggagatgaattggaggaatgatctctttcttttcaaccaagttcgtgtctctttccttttatcattgtattcagtgtagactcttcccaaaggctgatattcttcttttctttcctatacggtttgaacctcagccgtctgctcgattgaccgatctcctactggcttcacctttagttccatctctacccttttcaaaatccgatctgtccgtatcatttactccgcgacgtgttactcttcaccgaacatcttcagcacatggagggaaacggacggagctgctgaaacttgatcgagagaagggagagcaggaagatgttgtaattttgaaattgatcgaagcgctgaagcatctccgagcatcgggtggtctgctggttgacacgctaggataaagagtgccaaatacctaacctgtatctctatgtcgtatatatcatgtatcatctagtctgtagtacgacagaaggagagatgtacgatgagtgtatgcgtattcataaggagtgaccagaaaagatagtcaacgcctagggttaaaggccaacaattaccgaatggaataaatcaacctcagacgttgtcttgttccatctcatcccattgttcgatgaggatccctctcatctagaagacaactagagaatctcgtacatgaaagttggccatgagcttttctcgattcttccatgcagctacattaggaatacatgtaccagaacaacctctctccgttcctcgtttaacggccgactccaccgctgaagaccggtcggcctgggttcatcaggcgttggggatccatcagaaacgacttgctttctacggttcgttctgcttcctttttatcacgatgaacagtccatctttgaaggctgagcaagtcgttgccgctttgtctccgggtgcattcatcatccttgttttttctcagacgagcaactttcggtctacttgagcatcacactaaatgatatacctgtcgccgaggatgagcaccgtccttctcaggagctgctactgtttctttctcatctccaggtcagatacttcattcatatctgttcgtcataagatcaacataagatatgcgaggtgctaaaacagacagtctattcggattcgttagatcactctagaaagttcttatgtgtctcatcttccagcatccccttcgccgtccccacagcatacagcaacttttgcatcaaactcgtcctactttcctgccgctcctaccagctcatcatctagtcccggtccgattttagcgtcatcgactcctatcagtctgggcgttcctcctaatgcgtcgaatcgacgatcatttcctggcacaccaaccgaagccggatttgggaacgtactgagcactccgtttcctacacctggcgtaggcagcctggaagaaaagaggtacgctcggagcgaaggagtccaggcttggagtacaatttggggtcatgagagcgcaaatcacgagagaaagtgggtcgggttgagtaagaacgaaaaggggagttgggtggccgtttgggagttgcaagcgcctgttggtgagtggtcctagtttgcctgattgtttctatcctctcatcttccgatgaatcaggggtgtgaaagacagcaaaacctgatgtggaacatggtttgtttcatcatagctttcatgaagacccgaattcaagatccgctgttttgcttgaccgcatctatcacactgagggataagcctgctggagatatcatccagggttacccgtctgcctcgtccgaaaacacaatggagggagtttcccacctcggtcaagatattcacgataatctggaggatatcgatctactgggaggactaggtagatcgttctttcccgtctgtttccattccacagaacgaacgcgtctaagacctgcgcttacgacgtgttctgtgctggctttgtaggcgaaggctatagcttcccatcaaccaggttgtcttccaaacagatccgaccgagtcacgcggtagctaactcagtgtcatttcctgaaggtctccaccaggggccaaaggtaatccctccagtctcgctcatcgatctaccaacccttcgaaaatcttttcgggcaatttttgctctggcatctggtctgtctctccgaatgagaaccgtctatctgccaaacttactgactaatgcaggacagttagaaggacaagatttgcctgatagaacgagtgaggacgaagagggagacgaggaagaaagaaagattgtgatgagcgtagaagttgagtcaacaggtggggtgacagatgaaggagacaactcgtgcgggttcgagatcgagacggtcgaggttcttgttggtggcggctcgagcggagttcatcttctggaaccgttttcttcagaaacacctgaatgcagagatagtgtagaaaaagaagcggcaaagtcggtgttcccattagagctaagaccactggatcaattcagcttgctgtacgtcgtctcgacaactcatttggaagggttatcgactgggtcctccacagcaatatcatctggacaatcgggacctacactgtttcctcctgggccgacagatccgacacatcatcgccgacaaacttcgattgtgcctgctatactttctgttgtttcacctgagcgaccggtctctatcgctgtcaccggccgaccgttcatctttcggtcttctgcgccttctatggatctgccgtccacagagagcgagaaacattatctgtcgtcctcgtttgtctcgagatggaactgctcgctcgacctgactcatcttgacacaggtctcgtcaacaagcggatctctgttcctgctcttgctggacttgctcaacctcggggtataggtcttggccgaccttctgtcggtctcggtgggggtggccatcaggtggcgggaaatagacgatatagtatagctaacttggcttcactcgctcaatccggtcgaaatcattctagttctagtcacaaccctaatcagcttcaacaacatcacccagctctaccgagtataaactcgcttccgacgattttaccaacacctcctcaggcttttccacccattcagcagattgacacgtccttagcttcggggtctgcttcgatcaacggaatgaaagaacctttggccacaccagcgtttccttcctacccggctcatgaccgacagcaaagacagccatctggaatcttgccaccttcgcagttagcgtttgttaattctagaactagtgcgccagcagtgagtacagcagaaggaggaggaagaggagggcacgggacgcaatacgaggaggaagggctgttggtatctgtcaacgtacacacgccttatggtgcttcttctgatcggaatcacggggagaacggcgaggaagcaagagacgaggagagaagggatcgacggacggtccggccgctcgaaccgttcacgcttgaggtttttgtgttcaacaaatctgaccgaatcagacggttcgttgtcggcgtgccggagaaacggcgaggacgattggctgggcctgcggaggtgcaaggtcattcgggagaaactggaggagatggagatgtagaggacggccggatgggaatctctcgtatgtatttctctctttctctctctttctggttaatgctctctgtatatatttctgtttctgactggatctattgctttctgcctggatagaactgcgatcacgtctagccgaacatttatcgtcaacaacgccgttgattccactggagaacaacatccgagtcggaccacttctacctcggtcatcacagagtgtacggatgaaatttttggcgttgacggaaggcgttcactcggtggacacattggcaatcattggtatcggagattcgtttgctgtgaatctaaagcgagtttttctttcatcttgcaaaccaaggttccccctttccatgttggaacatgcttgactaacgcaaaatatcttatcttttgacgaacgcatcagatcggtttgtaacatcatagtcagacgataaagcagaccgtgttgatctatttttttcttgcaagacgtatagatgtacgctttcttttgcttgtgctcacaaaagtgaccgaaagccgggcccagacttctgacagaataccggattaagcgactaaaatggcttatcgagaacagaccacagataagagcaacatcgaagtttctcttggcataaacgacactccggtggaaccttctgtataccacacagtcccggttacgaccgagagcaagcaatagaggcaacaagcgggatgaaaagttcatcgatcggtctctatagaagactttcttgttttcttggtcttggaactcttatcgatcaactcttttttcttacgacatctacgattcctgccccaaactcttggaatttcattgatacacacgtctctcttcccgaggacatcgcatgtgagcaaatttccgcaaacaaagaacatagaaccctgagagataggtgatgtgcatgatatctatcgcttgagtcttgtcatccttcggaggagttagatcgggtcgtgtgagtggaagacacaaagcaggagatccaaagatccaacagcacggggtaaggttcaataaccataacagcagacagagagagagtgtgtgtgtacgtgtgtatgcgtaagatacccggtcaccacgaggtcgcttttcgacgatccgcattggcgtttgaattcggtccgccgttgtgggctgtaatgaaaacctgagatagaatagatgaatgattatgaaattcagatatgaattcaaatctaatccccaccgccaactccaccgccgaaaatctctcgggtcatctgctcggctttttcatttttttggtcgtacaaacacaaaaagctaagagaccgtcaagagaatcttctttctatttctttttctctccgtgtccttctctccttctctccctcgtcttggatttcgtcctcgttgtcacttctgtcacccacccaatcacccatcttgttatccatcatgacggatatcacgcccgccacaccggttctgaccgagaagcaggtactccctccgacctcggattcacccgctgactatacctccggacgctcggatacctaccctgaacgagagagtgacgacaactctgtcgacaaggaagtcatcaagaccggccagacccttacagatgttcaggccgcacatgagatttctgaggattctgcccaggttaatctttctattcttcttgtttgatcctgctcgtatctcagcccagagtatcggggataacccaaacggttctccgtttttttatgtgccttctctgctactgctcttgttcataacctcgcctctaccaggtcgcagagaacaaatggagacgacacatggcatggaaaagacttcgatatgttgtccttcccgcctttgctctcctcgtcttgggttgtgagtcgatttatttctattttttctttcttttcccttctattcttctgttagcttcctttggaaaatattcctttccatgttcaccagatgtgcataccttcttgcgcttctctttctttatactaatctcttccatcctcttctctacctcgtacttctcttctcttcttagggtggatcgcttctatcgttgtcaaggataccagacaccggtggatccagtcgaccatcttggcgtggtggattatcggtcttgttatcgttcgtcctctcagtctttttttccctcttactaccgacctcgtctctttccgacaaaactcatattttatctttggaggttgctcatacagttcagattcgtgccctcgtccgttgtcggccggcctatcggcaaagtctggacaagtacgtttatccatttgccgctcaccatgccgcagcgcgtatttatctctatccgaaagacttgttggctaatgtctagctacctcggtatttttcattcttgtttttgatacctgactattattagctttaatctccaacccgttcttcaagcttaaccgaatcgcccgactcgccatcggctggcttattctccttggccttctctttggatcctgctatgggttccctcttccggaaggaacttcctacgggcagcgaacgatctctgtctttggtctcctcgttctcaactgcttgtactttgtttgctctcgaaaccgaaagctcatcaaatggtcagtttccatactctgttttgtcgcttgtgtagttcaacgagctcacgctgatgtgatgtgatgttatgctctgggacccaaaaactcttgtaggcacaccgttgtcgttggtctcatcatccaacaggcgatcgccatctttgtgctcaagtccgaggctggtcttgatctcttccagtggatcggtatgtactcgttcgaaggcccaaaaccatgtctttctgtctttacagcactaatcttgtctttcctgatttttctctactcccgcgcctcaagccaccgctgccgctgatttcttgcaccagggtggagtggctgccacatttttcttcgagtcttccttcagcagctacttctttgtcggtgtcctcggagccgttgtattcttcatcgccttcgttcagatgatgttctatcttggagctatggtaagtcaaagtctgattcccatatctattctctcgctcggccgttgtgttgatccagcctaatacatttccaatgattcacagacctgggtcgtccgaaagttcgcttggatcttcttccgagctatggatgtctctggagcagaggccgttattgctgctgcttcccctttcatcggtcagggtgaaagtgcctgtctagtcaagccctttgttgatcttatgactccttccgagcttcacttggccatgacctctggtttctctagtatgtttccatatttggtttcttcctgtgcgatgccacggtttactaacgtgtctttgattcaatcgtatcccagccatctctggatccgtgttgactggttacatccttctcggtattcctccttcggctttgattactgcatccgtcatgtcgatccccgcctccatcgccatctccaagattgtttaccctgaagacgacactccggtgacgctcggtcgaatcgtcgtcgaccgaggagacgaggatcatgaaagcgaggccaatgcccttcatgctttctccaacggagcttggttcggtctcaaggtagctggtttgatcttgtgtaacgtcttggtcgtccttgcccttctttacgttgtcgacggtcttttgacctggatcggaaaggctttcaccatcaacgccctcacccttgagctcatcttccaatacatcttctacccgctttcgtggctcatgggagtccccaaggccgactgtcttcttgtgtctcagttgttgggtctcaagctgttcggtaacgagtttgtcgcctacagcaagctcatgaccgagatcaacgccggttaccccatcaccgctcgaggaaggacaattgccaacttctgtctcgccggatttgcaaacctcggttccttgggtatccagattggtgtcatctctggtttggcaccatcgagagcaaagatcattgctaccatcgctccttccgctttgatctttggtttcttgtcgacctgccagacggctaccatcgccggtatgcttacttgaagatagtgaaaagtcgatcgatcgggcgagcgggtcgtttcatagctggtcttcacaatcgtgcccactagagaccatacgcttgtcttttcctcttcgtttctttaccttatcctacctttattctcttctctactttttctttcttttcatcgttttatcactcttctttcctgttttgcttagctaaaaaaaaaccccattcatcggtctattgacggttgacgttccttccgtcgaattcctttccttcgtcttttcgttattctttttcatattttgctttcgttgcttttggtgactttctcatgattggtctttcattgtacttgggtttccgctccctttctcgttccttctcattcactctcatttccgccttcctccttgtatcctatacctacaatcctctacattttcaaatatactgtgccctaactgctcttcttagtcagggggtttctcacctctttctcaattctctggattaaacggatgattgtttctgaatagacttcccatcgatccttttctctggacagggcgaacaagagaaatccaacacgacaagcaagagagaaacaaaacaaaacaaaacaaaaacgaagacgttaaacaaaaccatgaggactggacacggcaaggtccctagttcaaatagggaaccctcttccacaacatcctaacaaacccatccagaccattccgacgccttcaccctcggcccctcctccttcaccagaaccaacgatctgaccggtctctttcaagacgatgtctggcgattcgggtgattcctccttttggataagtgcgagtgaggggtgaagaggttgagtaggccgagcggacaggagcgaccgattcgttagatgggctgaagtgacgtgatgagagctgattgaaaacgaagtgtttcgatcgatacgagaatgcgaagatttagcgcgcactcatggagaaggattcaaccaagataagatatcagatcttacagaggaagaaataggtttgcctggccgattggtttcttggtcgatggattcaactgaccagtgttgaactcatcacacatgtctacagccgttctgtacgtacccgatgttcttttgacagatatcgccgatacatgatcagatttatctcccaagctcagaaccagatccagaaggaatagtatatcaaaagaagatgaactcacccctggaggacacaagaactccacacgtaccgctcagcgaccatcagctcttccgtcccttccatgcgctttctgaaccctgcatcgattccaccaggatatgactcgtcattaggcgtcttcagtaattctttcagtatctctgacgtccccataggtggaatagagggtagtgaggcttgggccgaagtatcagaagggacttcaagtcgagcggagagatggagtttacggatgaacgcagtccagtctggtcggagaggagaagtcgatgtattttccaaaggagcaggcgccgtggtcaaggcagaaggcaaggttcctagaggttcaccagtcttttcgtggcaaccaagggaatccgttagataagacttagctgataaagagaaaggaagagggaagatcaacttatggtccgtaccgcttctagtatcatccatgtcgtagttccatcgacctttccatgccctcttgttctgacagtgaccttccaaaatccaacgacctctttttcgatcttgatgaccttgcccaatcctccgttacgaatcgatcgactgccttccataaccccactgagcgcagtgtgtagcctcgacaagacaaatcggatggccagacgtaaaccctcaggatcaccataaatctgtcggtcaatggcatcaaacgccccttctgagtaactctgattgatcaagagttcggcatcgccagcacgattcgaggaagagtatagttggtgagtacgccacgcatgtcctagccagctagactgaacgagcttgtatcgtgctcgaagttcagcgcgacgagcccgatagtaaggccataggttggaggatgaagaatcgacctggcggtgagagagaagtgcagtggtcaatgatccagggaagtcccgcctgacatggtggaaggctgacaagtagactacacaacaaaagaaaaatcgtttgataagcccgttgacatgtaatcgtttcggctcaaggaggaaaatcaacttactggcataccggcctagctttcctgtctgggcaacatttgtcctctcggctgtgcctagttcagagaaagctaaggcgagaacgtgtattctcctccggagacgataagacggaggaagtgagattggcttgacggttgataaataggtgtctaagtgtgcgaccggaaaggtcagagacgtaggtgctgttggcggaggcgaacaaagaagagaatcaaggactaccaacgctgtaattggggctgaaactgaaattggagctggagctggagctgaagttgaggtgattggcgatgcaggcttggactgtgaagcatgattgggaactaaaggcgctttgaactttttgaattttctagatactatttgtggcataggtgcagggaccggaaccgaaggcaaaggtggcggagagtttggagtagcgcaaacagctttaatcataacctctgctttaggtttgagaggactgattagtcttgcggtaggcaccgaggcaaagggtatatgcgtttcattcgaatctggccgagagtcgatggtgagtgtatgctctggactgaagctgacaggagtcaaagagggaggagccgttgtgttcaaagacaggaccttcacgatttgacttttgggctccttgggtttctttattttcttcttgattggcttcggcgttgggtcgaaagttggagccgcagaagcgtcactgtctgttgtcataaaccctttcgcttgaagggaaagatcggcttctatcctgggaggcacggcaagcgaagcttctttcctggccttcttttgacgaggaactgtatgcggcgacggcgaacgatgggtagacttacgggagacaggtatatgctgaatggacgctgcttcttgtggttgcgcaagaggtgacggaatagcagattcaacaagaggagcggacgctggttttgagccacctgtagtcaagaagtactcaaccagcttggctacgaggagaggcttgttgagcttggagtatcccgacagggatagctggatacatcagacgacacgataaaatcacatcagcgtggttcagccctacatggacagaagcagatctacttacctctttgcactttgccttgagagccggaatattcaacttagaaagggtcgcctcgtccatgtggagtgaatgttagattgtcctgagagatcaggaatcgaagatgaaaagaaagaaggacaggaggaagaaagaagcagaaaggagaaaaagtgtcagcgatagaaagctgtcagtctacgacaccacgagaaccgatttctggtcagtatacagctctctagtcagtcatcaatctggtgctccttgtactctcttgggtgtgtatacatgtacatctgatcatgtagcatcatgaattctgtgaaagaaaagaacgagttgatgatggatgatggatgactatgaacgaggtggccgcatggacacagcttcaccaacgacaaatcacccagtcgtcaatccacgcgatcgttcatccatctcatcttctttgtttctctatcccaccaactccatccttccgattctctattctctctattctatcctactatgaccactcctgcagaattccttacctatgtcgatgagcacgctgaacagttcatcgacagattagccaaggccgtcgcaatccctgtgcgttccttcttctctttcttcctctttcgatctctctcggagatgtgcgaaactccgactttcttccatacttttctcttcctctcctctttgctgcttctttctcttggtcatggccggaaacatcacttctctcaaagtgaaacgataatgctaactggagaatcttgtcgttcctttctcatgcgcctagtctgtctctggcgaagcttcgtacaggtgagaatcctcgccttgtgtcttgattttttcctgggctcatcctttccactgtatctcttgtttgcattatagaaagcatgtctttgagatggccgactttatggcctctcagctcgagtctctaggatgtgacattgtcaagaaggttcctcttggcgagcaagttctagagggccagactttgcagcttcctcctgccgtcctggcttctttgggagacgaccccaagaagaagactattctcttgtatggtcggtacctgttttcttaccgtgcatacactccagttaggctgctccgttgactcattaattctttctatccctcttgatcgacaggacactacggtttgtcctgatgacactaaatacttcctctgacaattggcattaactgctcgactttggtttcttagatgtccaaccagccttagtatccggtaagtcccaaacgagattatattatcctgaagatagtcccaatacttgtctcatctcattggatgttactccctatccttagatggatgggacaccgatcctttcgtcctcactcctcacgaagatggtcgactgattggccgaggatctagcgatgacaaggggcctgtacgttctcttctctctccccctctcactgctcatatatcactcacttcttcttgcaatgcatgaaatatgatatcgtgaaagatactcggctggttaaatgtaattgaggcgcacaaaaacctcggtctcgagctccctgtaaacttgaagatgtgtttcgagggtatggaggagtccggatccgagggattggatgagctaatcgagaaggagaaggacggattcttcaaaggtgtcgacgcatgctgtatctcgtaggctctgttctctttcttcaagtagtccatctgattttggcgctcattgatcatggtttaatcttctaatctgcgtctccgatcctcctcatattagagacaactactggctcaatacgaccacccctgcgctcacgtacggtcttcgaggaatcgcatacttcggccttaaagtcagcggacctgcccgggatcttcattccggagttttcggaggtgtcgtgcatgagcccagttcgtactttatgttttctacccagcgttcatacagactgtccatcatcatactgatatcttgagttctcatactgaccaactctttgaacaaaaaagtgaccgatctcatccacctcctctccaccctcgtccagccatccggtaagatcaccatccccggtctctctgatctggtcgctcctctgacagaccaggagcgaaagcgatacgaagctattcacttcgaaacggctgatatcgaagcttcgaccggaagcaagacggccatcagtgaggataaggttgagagcttgatggccaagatgagggagccaagtttgagtctgcatggaatcgagggagcattctactcgcccggatccaagacagtaattcctgccgtgagtgtatcggtttgattttcgaaggcgatatagctgtttgctcttgttctctttatattcatattgcgtatccttcctgataactatgccctaattcgaatcccgttgactagacggttgttggtaagttgcatacgtcaattcttatacattcaattgaagtcggctggattcccggcgttctaattcgtcctctcgtcctcaggaaaattctctattcgacttgttcccgacatgatgcgtgagtaccctcatcttatcttgtttcaactagtatctttgcgggcagtctgaaccatgaccgatatgcttgtttaaatcagccgaggaggtgacccgacttgtgactacccatattcagtctgaattcaagaaactcaactccaagaacaccgttcgtccccctactcttggcttttatcaatctcgcttgcatcggaaagaacgatcatgtgggatgacgaaaagagtaaccttgccatctttaccattattggtcctgtagatcgagattgacatgggtcatggtggaaagccttggggttcgttttactcttatctccttagttgcccttatctatttcgatttgcgcatctgatcaatttttttaaaccttaatataaacttgcgaccacagtcgcggatcctgaacactggaactaccgagccgctttcaaaggtacgtttatcaggagatgaaatttgtgaatagcatgtacggatgatatccaacgtagattaaccactttgtcttctttcgtgtccttccatatgtcgtgatctttatcattgttgcaaataatcaagctactgagacggtctacaaacagaaacccgatcttactcgagaaggttcggccatgttcccttccatctttctgtcaatctctaatcgaatagaggctgatcttgctcgtatctcgcgttcttatctctgtcgtttataggtggttccattcctgtcacactttcttttgccgatgcgctcaaaatcaacgtgcgtgcccatcttatctctctctctcttttccttacttgtgggaacgtggtaaagctcatctgtgattaatcgatatcaacctgtcgggttccacaaccgataggtccttctgctgcctatgggccgaggagacgatggcgctcactctatcaacgagaagctcgaccgatcaaactacatcaacggagtacgtctatgttctctttttctcgttcataacgtctctcggactcatgtaattctgttcctgttttggtgaatcacgacagaccaaggtgttgggtgcctacctccacgaaatcgctgcagtcaccaagtgatctttgtctactctgccgtatctctttcgtttcttccttactaccctttcatcgcaaatgcctttgcttattcgatgaaagttttagagatgttcaagcacaaatgagaaggggaaagaggaatagatgaaacgaaaggacagagaacgacatgattatatgatcacccgtttcctcttcttttgaccttcctcgatctttgctcttactttttcctcgtccattccctctgtctcccagaaggaagctgtcttgtcactctcgacctgtcgttggaggaatttgagcgcagcaagattatagccaacggtttctttctgtcgtcgaagagccgaacgaaggtacgttcggagagagatgatcgtaggtcgcatcacgttattggaaacaatctgagcatgatgggttcgaagtaggaatagaaggatcctagaaaggagcgaagtgttccattcctttttttttttgccacaaagaacgcacacgcacacgataaaagaaaccgattgtcaggatcaaagaacatgtagtccaaaagcgggaagaaaaaacggatagacataccttctgtgcccagtagctcaagcactgaagcatcgaagtcacatacctaaacggcagtacaaccaatgcatcggtcaacgaggcattcgggatcttctctaccactttcaacacgttctcttctggatcgatatcccccattgctttcaataacgggttcttctccggcggctgcaattggtctccagcggctgaaccggcaagggtctttttagcatcaaggtaatcttgataggtcaacctttcttcgtccgcgagatcgagagcttccatgatcttctctccggccataagagtatc

SEQ ID NO: 1528 - DNA, 28342 bp, Xanthophyllomyces dendrorhous
gacgtctgcttggtcacctcggtagcttcggcagtttctgcaccctgggcttcgtggtcggctgttcggttaagactttcagccaggttggcatcgaacagtctgtccgtctctttctcgcgctcttcgtccaaaaagagctgaagcatcaaaaagatgatagcagccataaaagagtttagttcagcgtttttgatatctgacaagaaaaagaaggaagagacgtatagaggtgaagaggagagaaagaagaagacgtaccggctcatcggtcttttcccaaactcgaatggatcgatcgtgagaaccggtaacaacaaacttcccttgtttacttgtcgccagagcccagacctcaccgtggtgaccttcgagtttctggatcatttcaaactattagagatttggacattcattcggtcagtcgagtggtcagtttttgttcttggaaacagagcagagaaagcagatgtcaagagaacagaagattgggagaacatactttgtcaccatcccagtacttgacagctcggtcttttccaaccgaccaaaagtagtgaccctcattctcgaattgtactgccatcacactctcttcgtgtgcgtagatcgacttgtggcaatctccgaagtcaagtccccaaatcttgatgtttttgtcagcagaagatgtgatgagcaactttgaatcggctgagacgtccatagagagtacaggtagcttgtgaccgtagagcgagaggaaaaacttgagagtgtcctggtagaacactttgacggtggcgtctaacagagcgatcgcgaggaactttccatctggggtatatctcactgaaagaacgtcgtccgtcatcttgagagtcctggtgtgaacgatggtgagaaccttgttcttgaattttcgctcgttacccattcggtcgacgaccgtctgggacacgtcctccatctcgaccaactcgaaatcccaaaacttgacgtccttgtctgcacttccagagacgagacccttcccgtcgggtctgacttgaatcgaccagattgcagcggtatgggcctgggtctcagaaatcagggtggacgaggagacatcataaaggaggagtgtgccggctttggtgccgacgatgatatgtcggtctccaggaagccaggtgagacagatcgcatacccggtttccatcgtcctcacacaagccagcgtcttcaagttccaaatcttgacctgtccgttcgatccactagccaccaggtcatctccaccagagatgtctagacatctgatatccgcacggtgaccgggcagatcgattcctgctataagatttgactcgggagtgacgtctttcgagggttttccggtggagggagggagaggaacagaatgagttgagactgcgtttgacgcgttgtggatcaagaccgtcagctggggtttgactgaggatgaagaggcagcggcagtttcctcggtatcgggggaaaacgagaaggatttgatctttgaggacgagtggatttgacaccacagcacaaatttgtctccccaggtcgttaccttctcctctcccttgtcctcgtcatcggcagcagcggcagcgccgtccttcttcttttcacgttctcgcttctttcgccgagctttcttcttgtcgacctcagcatctgttcgaattcggagagcagagaccgtcttgtcggaggtaaggacgaaaagcaggggtgaggttgggtggtaggccaagttggttatcggcgaagacgacgtcggcaacggcacagacgacaacgggtggatgagcacggggagctcgccgtcatcagcctccttgataccatgaacgaggctctgttcgttgataacccatcctttgacctctccttcctgactgcctgtagcaacttcccactgtccaaacaacttgccttcctcctcgccgtcctcgccaatcacagcgtcttcacctggaggaataaacctgaccgaagcggcgctgacgcctgctcggtgagcgaccacagtttggatgcaatggctggtctggagatcccaaagtttgagcaacgtgtcgagagaggtcgatatcaagtatccagggtggtttgataccgtcgggtgaggcaagaaggtcagtgagcttatgggggatcggtgagagtgaagtcggacgattcctctttcgtcttcgacgtcccagatgacgatttcgccttcggttccaccagaggccagtcggccgcctcgatggtcccagctcatcgcggtaacagactttttgtgaccgttgaagcaaacgatctcggtggcttctcgctcctggctgctcgtcgagggagggaatgaccacagacggacggatccgtcctggtaaccgactgcgtatagtggggaggacgatgaggaggaggaggatactgtcgagttggagctggcgattctggtgactggcgatgtatgagaaggtgaatgccacatagatacctgtgtataaaatgaaactctggtgagtgtttccctcgtacaaagaggactgaatgtgttcaagcatggtggcttctgtagttgctactcaccagcttggctgtctttacatgccatactaggatatcttccaaagcgggaacataggcgagtttcccatcgaacagagagtttccctgaggggaggcaataagaccgaaagcctgtgttggctcgtgtctgagatatgagcggaccatgattgcccaggctgaggtgactggttggaatgatttctgatgatttactggagagaagcaggccgtaaatttgggtacaacttttttgtttaagatagatgaaagatagatgaattgaagttagattagaatattttctattcaaactcttggttcagactacgacgatttgtagtccatccggctgcccgtccgtgagtgggatcgaccataccagatcggaagcaccattcactcaacgagtctctcttgatggaccgtgatgctgaccaatgaggctctctgacagaagcactctagagctctgtggatgagaaccatagaggcgcaagaacaacgaaagactctgtggtttgtagcaaagtctttatcttttgattgcaaactacaaagatgacgtaatagaaacgtttgactgcaatagaaaaagactagaaaacttttgtaatcgaaatcggccaaatactacagaaaaaggcctaatgaaaatcgctgcaaacaatagaaaacttgtctaatagaaccgccaagaagactaggaatatttaccaataagcgaattctcaactcagccgccgttccttcctcgccttcttcgttctcgttccccgtccgttttgctctcgtcattgatcctcatccttttgctttctctcttctcttcttgttcttgttcggtcttgcttagagagtgtctgcaactcgttggctctctttcaagtctgttgatcacactcgttttgtcgtcatcagttctcacacaactctctgcctgctctcgttcaaccaccatcctcgtttttgggcagactcagctctccctatctttgaatgttctcatttgcagaggatgatccgagacagaagttgagtgtagcgataggatacatgtccattgcctgctggtatgttttctgcgtgttctctttcctgtttagacatacctttcctcttcactctgttggttgaaagaacatgtttctttgtttgttctttcttctctatctgtctttcgtgtctcgtgatctcaacctcgaatacacacacatgtatccaggctttgggctcaattcccacagatttaccagaactacaaggtcaagagctgtgagggacttgcgctgccattcttattgaactgggcattcggtaggtgtcctcatatatgtcctcctctatcaactatgtctttcgggcgctcagaccttctccttgtttggatgttcttatcaggtgatttaacgaacttgataggatgtgtgctcaccgaccagctagagttccaggtacataattcttgtcttcatctcagctcaggaagaacttcgcgatagagaggaatgggtttactgtgaatacagagtcatctctccggaacctgagaacatcctgaacctcctttccaatcatctcgcccataacgccttatcttaatttcttaccccggaatgcttttcttcttcttcttttctttctgtgtttgcctatctacagaaatatctcgccttctacttcgtcttcgtggacgccaccctcttggcccagtttttccattacaagcgagttcgcacgcctcctcgtcaaggcccttcatcttcctatcttcctacaacagcgtcgaccgctgtcgccccttataaccatcaacgatcctcctcgtatctcgactcatctcgtggacccgactttggctctcccaaagagcttggaacacatgtctcggtcgccaggagtcattctaaccatcgacgaaggggttacgcgacctacgacgagatgagcgcggccgctgccaacgtggcccgagctgcagaagctgttgctgcttccagacgagcgaacggaggtgtgaaccgaagtaaatcgcggacgggcaagaaagaaggccgtcggtctcgttcgaacaaacaactaggtgctttagacagtgatgaccaagatctgtcgacgcatggtttgcaaacaagtgtaaccagtctaggaggccagagtatccggtcggatacctctaggacgtcctccattctcagacactcgggtgtctcaaagaggacccatctttcgggttctatcacctcggcagcttctcagactagtgatcgatcttcgagtcaaagcttgtccgcgcccaattcccctttaccatcgcccgctcggtcacctacaattctcaagccgtcactcccatcctcggttaccaaccagtcgaactcaccgtcatcgaccgaacgaggcagatcgcttactcggccgggcgcgctcgtgtttgaccttcatccgccgacgcccgaaagcgcgagtccatatctggatgaagcgatgaggctcgaaggtcagtttcaataccgtgagctggggctgagacctaatcatccaggtagaagcatcagcagagaccccaaggcgagtcaccatcaatccagcaccggagggaacgcccgaagacatgctgcagctgccggagtcgtgctgatgggcttagggacgttcttcagtgttcgtgggatgggattggagttggtttcagcaccgggttcggtaggatatggcagtttggtgggttcctcaataggacatgttctaccagaggagcgagaaagcggaagggtgctctggaatacaggtcgctcggtcgcgcatgagactcgatccgattcatcagcgagcaattcagatagtgttcttgtagagtttttgaacgttcccgaaggagattcggtctacgatgtacctgccgttgaagaccctgtgaagactggcagcgagcaagacgatgaagatgatgaaagaggagataaagaggaaaacaagtctagcagccaaccgggaggtcatcgaccgactgccccaccgttctcatggcgaagagcgatcgggaggatgagcgcttggtcgtgtacggtgctttatctaacatcaagaatgcctcagatatggaaaaatgtgagtgccactttttctccttctgttgtggttcgtcaggaaccgtgtggatgaattgaaccggtcgacatcattttcacattggataaactcagttcacaagaaagtctattgaagggctctctatcttgttgtttgtcgccgccttttgtggaaacgtacgtccatattcctcttgtcttcttcttctctcttgcgtacgctaaagtacgcgcacatgctcaacatcttttgtttgcaaattatggtttcctcagtctttctatgtgctatcgatcgtatcgaacccgatgatgcatcgaccccgcccagaagggacagaattcttacttgagagtttgccttacctcgtcggaagcgggggcacactcatctttgacgtgacgattatgatccaggcaatcatctacggctcggccccgcctcttcctgacacacctccaccgtgggctcggaaaccatcgacaacgtcgcatcgtcgagctatcattccctacgggcacgctcacggatactcctcccattccagggggcattccaacgtgccgaacgacgagatggagaatgcccctttactccacgagagtcctatcgaggactcgttccctgctttcgcaggatcagcagatataggaggtggacgaaggtcgccttcgacgatgagatcgccaatgataccgaggcagagatcgttaagttcgagcaccggcatcaagtccaggggcgagtcgttgtacccttctggtaggcgacctttaagccgagcgggatctacccgggctggccaaactggcattgatggcggtggtgttgccagtgtgggacgaatagacgcaacttcagtagtagcggtgggagctggagccggagccggagccgagggacatcctccttctggattgtacgaacctccgcagaaacgtaatagacatcggtccacttcaggaggaaccgcgtcgaagagtatatctttcctagaggaagatagggccgaagtttcatctccgtcggccccatcgtcaccgacaatagcactacagaatcaaagtttgagcatggagacgtctgagaaggggggcggcccaactggttgaatgggaaaatggaagtgggggcggaacgtgaactgtcggaaccaagcatcttttcttttactcactattcttatttcaaatcaacagacgaccagttttctctttaacgtgtgaatcgtctttttaaatcttattgtgcatggattagcaagctcttctatggcaaagcaagtacgagaggcaaaaacttgaaaccccattactgtacaacaagacccgcagaggcagggtaagaagaaacgtttaatatgtgaacggaaattgaacggtcgtcatggcaacttgaccatccagcgtcattgactttgaacactgtgttctcctctatactttgcccttctacactcacccaagtccactcttcttgttgttctctttctgtcatggcatcaaataaaccctcgctcccggtgactcaacgtcaacctccaccaccaggagcccctcagcctcgagggccaaacaggtaagatacccttgtccgcctgccttgctgtttgttatgtaaaccgcctcggcttgtttgaactttcggttgctgatcgcttagatattctttccataccctttatatctactgtccatagatctacgaaagcaagtcaaaagctcaaggtgcactaaaccctctttctctctcatggcattctggttgaggacgagaaactaacgacgaattaatggaattggccttactcttggcactggttaaggtcttgccggacgagcctgaaacgctacctcctcaacctacaaaagtcttcaaggccgaaaaacctcctaccggagaggaaggagacgacgacgatgagagtgaaagtgaggatgatgatttggacgaggacgatgatgatggtgttcaggtgagtttgtcctctcttgccgctcatgtatatgcctatctgtttgtgaagagtaagtcgatagattcaatgaactgactctcttgaggattatctcgtgctcgattgatcatccttacaggtctataaacaactggctcaaatcccggctggttcagctagaagggatgcaatgaggcttacccggaaagagaaagctcggttacccagggtcacagcttactgtgttgcgacgtaagtgttttatcctgtcatatcgcttggatctatgatcgagtggtcttgttcgagacctaccgagctttatgagtctcagcttcctaaactgtcccttctgtgtccatctggaatttcaatcctatcaagatcatatcggttaccggctgtgtttgagcatctgaaatcccgtagggccacacatgacaccaaccctgttcaatttgacgaagcgatctacacatcctacaccgttcctgctcctccttcttcgtctccttcaaacgcctctacaagaggagggtccaatctgaatcccgcaaatcaccatcatggctcaagctcgaacactggtaggttgatcgacatcgaagaggaaacctcatcggccaatggcgaaaactctcagaccgatggtcctcccggtgaaacctccagtaaagaagagaccgatcagaggaagaagaaaaggaaatcacgatttgcagtcgatagtgaatatagtggagacgaacaggcaccgaacaaacagttcggtcaggatggccagggcagagtgaccaaagcagacgtgtttgtgttcgagtacggaactggtaggtcgaagattttgcctcctcaggtctgatagacgctttcataacagctgactgaaagaagtttttttttcctcttcatgaatagtcgtcatctggggtatgactcaagagcaggagaagcggttcatctcttcgttgtaagtcattccgcgacgtctgctccgagaattcctttccatgtatcctcgcgcaaaaaaactctgggagactgacatgtattctctctgtcagaaaacgatatgaggtcgaacgactttctccagatgatatcgagatggaagacctcaacttttactatgccaactattccaggtacgtaccactcaagaaaggtttttttctttgtctctatcgacgtctactaatctactccttatgcttgtgtacacagaatatataacgacgttattgctctcagaaaagggtcttcatatatgtaagcaagagaagtcaggttctatctaccttgcgtatatcctgtcctactgattacatacatttcttcgaaccgattaggacaaagctttcgctctctcatgctctcgctcagtccgtcaaactatctttcttcgaaggagcagtatccaacacaatcgaagagacgaaggatattcctcaaaacatttccgaaacaggaaagattaaagtatgtgctccgagtgaccatttgttgtgtatactgatatcacaacatctatcaattcctgacttcttctctgatttgtgtctgtatatgtagatgcctcgaaaggagatcatgaagcagatcggtcgacttttccttctaagagtcaacatcagtcttgtcggttcctcttttgttgattcgcccgagttgttctggacgttcccagatttagaaccattatactcgttagcatttatattcgcctcccttttttgtctgaggaacaaggatgttgatattgattctgttccgtgacgatatatttgtagcgctggagtattctacctggaagtcccccaacggctaaaagtcattaatggtcgagttgatgttctgcaagatatgctcagacttctcaaggtttgtcttttgtcttgaaactttcttaccatgaaatatggatggcctgctcaacttgaaattgccacaattttgaatataggaatcggtaaacagcgctcacggcgaaggtttagaacgaattgtcatctggctcatcgtcgtcagtcttcttctttctgagattttcttctgtctgtttatcttcgtctaacgctcttcaccttctctctctttcctgttgttgctggtatgattgatcgctgatggtttacagctcgagatcatcttgggattgacgacgattatggtcgacttgtttgtctaaaacgggtccgatccctcttagcttcaaggtttatgtatccccgataaatgttgtttttttatcgtcgctctgttttctcgttcatctcgatgtaagtgagtaacgaagagaactaggctagcattactcagtttgatatgattacatagtggacgggatacatgttgagagaagtgagtacacggtcgagtttagattactcggaactgtggtcgattggcgtggtgttatgagaaagcgagaataagtttctgatgtctcgctcgatagagaaacccggtctggagtcctctgtaggtagaccagagagagagggcaatcggaaacgaaagaacgaaccatgttgttcttcacatgtgtcttcaacccggtccaagccccatcctccgtactcaacgtcgactgtccaccatccctatccaacaacttttgcatcatctctgcgtctctctccgctatcgttcgttttccctttccttgtgctccttcctctgtctgagagtcttttgacgtttgggtgatcccaggtggtgctggcggctgtagtgatgacgggagagatgtggcatgtgaggtgaggggctggttggtagatgtcttgtcgatcggagtaggtccttcagaagtttctttcatcgacttggtcgtaggagatccttctatccctgtttgtactggagcagaatcagaagatgagaacgatttgaaccggccggaagggagagtgaatcgtaagtgtgcaaaaggaggagcgaggccaagggatggtctgattcggaaggattgcttcaaggctcgtgtgagctgcataactacaagtctcttttgacgggtggaagatcactaccgatcccaagaggtttgttattctttcgtccgtcttcttgttattatcacttaattctcaaccgatatgtctggagagaatcggctgttttaacaagcaagaaagaagatgagaagtggggtgtctaggtcaagtttgagtagactttccgaagatggagaacctagacggctcgtatgacgtcagtcaagacagctcttttgatgtatctcctttttgggatttcttggttctatttctcctcttctgatgtcgattgatcgctctgaagagatcaagatactctggcacccattcgcaaacggtcgaaggcctttttaacatgaaaacagtgtttcaaaggaagactccgaagagaagaaaggggaattgtagtagaaagaagaaaagaagaaacgccaatcacggcaagggaacatgtcgtagatgaaacagtgatgatgaagggccagaaaggaagggcacggtgcaaatgtaaggaagcgacaaatataaaaacaagattggagcagacgaaaccaaagagaaatacatcgaagtgaagctagaagaagaaaagcaaaacagaagaaggaacaaacaaccttaagagatagaaaaaggagaagaagaaaagagagggagggaaacccaaatactcaaaaggagaaagggaggataacttatgttcttggttctggtgtttcctcttcattctctggctcaaagccgtcttcggactcttcatcaagagtattcagactaggcggtcgggtgatggcgtcttcgaagacatcgtgaacaactcgatggacggccaccagtccacccatcactataacaacgacagcagaagcatagtacagattagtagaatgacacctaaagcgtgtatattcagagagagtaggaacagtaggcgcacaaagagcagggccaacaaggtgttccattagccgtctggctagggagagtcggcctcgatcggtatcagcagctgtatagtttgagaggtgaaagcgccatggaaaggaagagagatacaaaagaaagacatgtcccaaaacatgagcccgacatacacaccggtcgactagtagtcaaagaaaggacaggggtacgaacgaatcgaggtgaacagtggtgtgatgacaacaaggacgagggtcaagagaagaacaatggtgtagttgagctgtgcaggtgcataggaatgcggctcccgattgaccagttggaagatgagggcaaactggaagagaaagagaagatggtaagaaggaggctcggcttatagcaagggacgcacagagtcaaggtacgtacgaggattgttgggatggtgacaactttcaatagccaactggagtacggacaggatattatcaaacgttggatgagtatcgatggtatgtgtcaagaaatatcaggcatatgaactctgagaagaagacggaaaggactgggcttctgtaatacgtacaacttgggttcatgctggtaaggctcttgaaggatggaagacacgatgctgaaagtgttgattccgaacagaacgatcgtcaagactggtccaatgagagtgagagtaagattgataagtcatcactcgttcgctggcttcactgtttataaaccggcgggagggtgtaaggtgaaaggatacacaaaaatagcttgcaaacgtacatatcaggtatcctcttgcccaggtgtcccattcatacttttgtttcttgtactgaacaccatcgagcaggtatgtcagctcggttctcctttcggcatctagtaccttgagtgaccgtctgcttcggaacatgacgatcgcccaagaggccaggagaaccacaatgatagcagtgagggtgagaaaagaggaaacgaatccggtcggaggaggcgggtgtggaagattcatgacgactgcttgggctgctattcacttaatgtccagcgagagggaaaaactgttgatcgaatcgaggtcttttgccagtgaacagccagatcttcgtggtcgcgctcgactttgtctaccgggtaagtatccctggcaagaaaggcagacgatgcacgaccgtttgatcttcttcaggtggaagttgaaagtcaagaaggaggaaagttgacgagtcgcgtggacggcaaagtttttgctgcgcccacgtggaaaggctgcatcttcagcgttcaatgcatcggacgcagtctaacagatgcctctagatacacctatgatgatgtagtcgttgtaggttcacttgagggtgtctgatctgatgggagggagggacgaaatcattgagaagacaggcaggcggcgctatgatatcagctaacgattgagaattcgtacgagagcagggatttggtgcagactatgaatgaggcatagggtgagtcgttggctcggtcgtcgcatctatctcttgaccttgattcagagatacctccaagaacagatccatcggacatcaaacagttgtatagcaactgtttcttccttccaacatccagtgcaaagttccatatatgttgttctggtatgagcgtatgctttatccgactctttcctctccccacgcgcgcatgcagactgtcttccaacattcgtacgacaacggaccaaggcaagtcatgctttgccaagagcatctactgagttgcgctcctatgctcctcccaccttctctcctttcttcctgagtcgtgcgcgtatgtctgtgatgtcttgatcggtcgaggccatcctatccaagccacagtcgggtttgccctctggctgttagggttacgaccgcagtcaggcttcattatagccggcgctttacaacaacttctttaccccaatcgtcttcactgccatcgaccatcagacgttggtgttggactcttggactctatcactagctcacacacccacacaatatgcctccaaggaggacatcgttcacatctaccgtcaactctagaaacggattcgctccctcggcggatgtggcttcctacaaggatctcttgctgtttgaggaacgactcaaacagaacgcagctctgcttcgtagcagaaaacggaagtatgaaagtgagtgccaatattcagaaacaagcaggacatgtgcagagcagagcgctaggtgatggctggttatgtgtaagtgtttgcgcgaaggctgattgtgcttgctctcggttcgttcactctgtgcgtctgttcccgtcgtgctctggatcatagtcttcctcgctattcttgtggtctccattctagtgcttgtccacaaatctttcttgcagccttcacctgtaagtcgcttgctaccgatgtgactctctgtcagtctgcgtttgggagttcgtggaattgatctgtcctttcggaatactccttcaccatcttagacaccctcactgcactatctacatctctcgttactaccggtagcagtagtgacactcctgttgttctttgcgagcgggatgtacgccgaacgaataggatacgccaaccggtttgtgcttgactttcggtctgactcctcagttgtatcgatcacctcataccaaatcgattgtctcccgcttctaaacagttacgttccccatgctaacagagcacttcgatcgctaaacatgcaccttaatatgcgtgtctcccccaagccgctgatcccatatattcccttcccgctctctcttcttgtgccttcctctttgtcttcttctgccacatcgcccagtccaagatctccgtcgatatcacccacgacgctaccgagctcgagcaagtctcagaagcctgccagcggaccgaacccgaagccaatcccggcgatcccaccaacaaagaatcccagaggagagctcatcttctctagtagagtcgatcgggtctttagggatggatacgagcgatacagagcgctgtttgaaaagaaacgagaggaacgatacagagagctccgagctaggaagaagggcctcaccgggatttggtggaagtaggtgttggtttcagttcaacgtcctctagtttgcccggctggtatacaatctgttgatacttccctactcttcattgcggactgttgtcaatcgtaggctactcggctaccggtcgactcaacctaaaccgatggcttccggctcaccatcttcgcattcgcctgcgccttccaaaacgtcttcccaaccgacgacaccccctctgtctcgcattcattcgaccttgcatcttgtccctaactcctcaattccaaccaaccgttctcgatcccggactccgtccccatcggtgtctacccgggcgatgacggaaaagagtcggtcgacaaagctctcgtcctcaccgacaagatccgaggggttcgaacccatcccagagatagtctctgtcgaccaatcatcagggagggaaggaagaccgatgaagataggacggctaccggaagaaaaagagaaccccgggctgacaggacggagtcgggccgagagcttcagttttttgttggaaacaggacggcaggttggctcggcctcatgagcgatgtcatctttgttgttctttatgatatgtgtatttgaaaatcatccggtaatagaactactattccttccagttatgactccagcggtgttgtcatctccatggccgtggctccaaagctgtttcatggccatagcttgaaaatgatttcctctatctctaagcggtcagcgcttcgaaagtagtcttggctccctgagacttcccggccattaatcaacaaagtttgtccatccggcgaattcagccggatatttcttctttaatctacaacttctacatacgccagacatctcttccatctcttccgtctaccgtttccgtctccgtttccgttcttggtccaagagagcttcatataaacatctctttcactggagtttgagcgtctctttgttccttctcaggtcgcaatacacacacacacacacacatacacaagattttttattctcaaaaaatggaccagatcatcccagagcttaacggacgattggatacgctcaccgcgttcctcatcaacatagctggtgtcaaagatcgagtgaccgatctcagagtatccgaccttgataactcggtaagtgattcgttgctgtttctttatccggttggtcataggtttgatcagcagttgtactgatccgctgagccgaatactgcctcgtacagggtcttgagctgtcctaccaaccactcacagccgaacctggcgctcagccaaaactagctcaggtaacgagattttctttccaattctctttcgatttagctgaaatcggagctgacgtccatgtgtcatcgccataccgaaaacgttgttcagattccattcaatccgcctgtgaagacagctgatgaagcacggacccggttgtcgaaacttcgggaagagtccttccgagccctaggcgtcgtatgttcatgaggtcttattccacttctcaagccggacaaacgaccggttgattctaatcattaccttccgtttggatattggttaggtccctggtagttcgctagcaccgttcgagcgacctccagttctctcagagtggggactcgttctggccctcctagggactcaggcaatgtttctgactgctactcctacatcgttcgttcttctttccctggtttattcatttcgttaactcttccgctcgaagctgtttgataaggtatcctaacacgaccacgagggggcccgatagattcctacctgtgatgcaagagatctcgaggatcagagacacaaagcttccaggaggaataagctttgttaaatggtcctacgcgcttctcttcgttgcacactctctggagatcgtttggttcaccggaagtttccttaggaagaaaaaccttgtcaggagggaagacctggtaagtttttaactcctcatcttttctcttcgtgttctccgttttttttttctttcagttcgcgcgcactgtgcaaacacaagatgttgactgccttctcttcgtccaacgatgcaaacagacaaaatggagttggtggactctcttctttggtctagctactacgtgagtcatttttcctctcgtgtgatacccagagtgagacgaatgctgaaaccagaccttctcgttcatctgtcgggaattactgtaccgtatacggatactcaagttggccgcactacaaacgaggttcgtttctctagtctatctctccttcgttttctcttcaagtcatcgttttaaacctttcgtctcttccggtatcctgatcgttcgtcctctgtcttgttgtgttgatggcgcaaaaaatcaccttagaggttcaaagaacccatgttgagacaatgtactctaagcggtcataggaatccattcaacctcactcctccacacggaacaatcgccatctgaaattacctctattctgtccctcctcctctctagtgttgtctcgccgtttttattagattaaagcaacttacaatggctcatgtgccggtagatagaactatcccttcagatttatcgaatagtctttctttggatttacacaaaaataacatgacacatatattataggaaaagttcataaatccattcgaaacaacatatacatgtgcaaaaacaaagaacattgaacgagaaaagattggtttaagaccgggtcagtatcgtgaggtggttgctttcgttttctttgattagtgttagcgactggaaatcaacagtcttccctttccagtggtcagtatgggacctacccccaaggattcacgcaggtaggccaaacatgtagcgggggacgaacgaacacacgaaacgagaagcggcactaaagggccaaaagaatacaaaacgaaaacgaaaagagggaaagaaaaaagccaccgtccccgcctctaccgacgaaggactacctcaagattttatcatgcaaaaaagggtacatcaaagaacagataggtacgccaacattttttccaagaaaataaataaattagacaacggtccagactcggacgacctgatgagcacgaaaagtaagaaggagcgtaagtgaatggaacggcaacaggaaatgaagtgtggaaagaacccacgttatcggtgaaaccagcgaaaagagtctgtccgtcggcggaccagttgagggaggtgcactcgaccttcttgtcggcaccctcagcggtgagctcatcaacgatggacttggactcgaggtcgaagatcttgatgccagaggcggtggcagcgcagagccagtatcggttgggggagaagacaagggcgttgacgatgtcaccggcctcgagggagtagaggtgcttgccctcgttaagatcccaaagcatggtgattccgtcctttccaccggaggcggcaagggaaccatcaggggagacagagacggtgttgatgtaaccggtatgtccgtggtggttggtcttgagcttgcactgggaaagctcccaaacctacagttgaagaaacaaagggtaaagcacatgtcagtaaaaggtttttcaaaagattctcgggtcagggatgcagagatttgtgatggtggaagaaatcagcgatcttggtgattaattgttctcatagactagatgggtctctgaagtagcaaatataggttgatcatcactttaaaggtgggagaggtggttgtgggggtggcagttgaaattgtactatctggatagagacaggactgatccacgaaagcagcagaaggaatgataaagcaaacacgtaccttgacaaccttgtcccatccggcggagacgatgacggggttgagggggttgggggagaatcggacgcaggagacccactcggagtgaccctcgtccttgatgtcgaacttgcactctccaagagtgttccagagcttgatggttcggtctcgggatccggagacgatctgtcggttatcggcagagaaggagacggagaggacatcggcggtgtgtccaacgaatcgctgggtggtcaaaccagtgttcaagtcccaaagtcggagggtgtgatcccaggacgaggagagggcgtactgtccatcagaggacataacgactgggtagagaaaccaaggaaaaagaagacatgagcgtcttgaaggtttgacacgaaagcagcaaaaacaaggaaaactcaccgtcagagacgaagtgggagtgaccgtgaaggatcttcttggggtaaccgtaagaagtatcatctcgggtgagctgccagacaatgatgttcttgtctcgggaagaggtcaagatgatatcggggttctcgctggaggtggcgatggcggtaacctaaaggaatggtggaagaaaagagaaagaaaagacaagctatcaattctcatgctcctctttgaccaacgaattcaaaatctcaatcaaacccggagaaaaatgaacttacccatccaccgtgaccctcgagggtacccttaaagacaagagactcagacatatttgctactggttgttgtttgggttcgaaggaagctttcggaaaagaagcaagagtcgacgacgggaggagaaaagagaaaaagaggaggagaaaaaattgtgggtgtgtaggttttcgcaggaccgtaaccacgaacagggctacgagtcgagtcacgtgtgttcggcagtcggaggtaaattcagcacggcttcggttttccacgtggaagttctcgccacaaagcgaggtgtggctacacttacgccgctggctgactaatctcgatcgctttaatcgcttagtcatctctaccatggttacaaaccctccatcttgggttcctggttccttgttcctgttgcgccctctcggtcaaatcccacttctcgcccaacacgatctctcttcttcttctttcgcattcatctgatcgaccatggtacgtgttctattctggttgacctcagccgtcgaacgaaacgaaggctcacatgtctgtgtggttttgtgtgtgtgtccttggtcctcgggaaactctgctttggttgcttctttcttcttgctcccatcgtcactcttggttccacatttcgaaatatagtccaagcatcatcccggtacgtgcttattcattctgttctaatatcatctgagccactcatcatcgatctgatctgacttgatattcacctggctacatttgcagatctcatcatgtgccgtaggcaacctggtatcggtaagtcacttcttttcctcttgaccgacgtggccttttcattctatcgggccttgcttgatgacgatgcgtttgcacgaatcaatttcttccttactttatgaatagctatcggtcgtctgtgcgagaaatgcgatggaaagtgtcctgtgtgtgattcgtaagtcatcttttgctttgaactatctgatatctgtgtgattaatcatgacccattcctacaggtacgtccgaccggctactttggttcggacgtgtgacgattgcaactttggaacgtacggtggaaggtgcatcatctgtggatctccaggtgcgctgatacttccttcttatcttcctgctcccgttttcttgctgatttgaacactcatctctctttcacacttcgctttctcacaggtatctcggacgcgtattattgcacagagtgtacgcgcttagaaaaagaccgggacggctgcccaaagatcgtaaatctaggagcgagcagaacaggttcgtgatctgtcacttaatttctcacttatctgtaccctgatcttgtaccgtgatgttgacattcactttttgaaccgttttacctgaactatacttagatctattctacgaacgaaagtcagttgttaaatgctttctcgcgccaatccagataataattgtttctcgaccttttttcgctaactgcttccactttacttctttgttcttgtcgtgatccctcactagaaagcttgggtatgtcttcagctctcatttcattgacccgggaacatattctgatcagccatggctttcataattacattctcactctatatcttataggtttaaaaagggttgaccgtttccgatctatagtcttcaagaaagatgcacatgaattgtacactatactgaatatccgacatacacaccaggtcgtccaagaatagaatcaaatgtcagacgatttctgttcagaaggaaagtccacttttccacatacacgtcaatctattgagggctttagacacagagcgttcgtctctgtcttcatggtcattcaggacaaagatgggggtatcatgaacagaacggacgaagaaaaaccaccttcggcaatgtccggttttgctgctaggggtatccaaagtttgtgaatatcgacctcaggacgaatgctgggcaaacaagacagacagagaatcttgattaccctctaatgacgatgaaacagagtgacgttctgtacgaagctttcgagcaagacgacaaacgatagaaagtaagaacgcgtagctcagcgagtcgcctgataaaccatttgacgtctacctgttcgttgtgtttctgtacttgttcaaattctttgctatccatgtatggaaactgctactctatcatcccctcttcatacgaaattcacaacatcagcaaagaacaacaacaacaacatttctcatctattctcgatttatgtagtagtctctctaaaatggaccgatccccctttgaatctcacagtaccagttatccttctcccactcttccttaacgagtctaacccaattctgaccttgtctaatttcctttccttctctcgcatcttctccttctacgagagaatttacaaaatgtatctgatcaagctcgcaagcttgcttgacaagggaagagagctcggaagatttgaagagatgatagtacctctggaacacctgcggagggcttgccggtcgagcgggaggagtgatctcttctacaggcgtcggttctgagactgcaggaacagctgttggaccatctgtttcatctgtgagttggtcaggctgagcacgagaaggcttcttttttgaacccggttgtttcttctgtttcgtaggtttcccagccccgggtttgagcgcatccttgacagtttttggggcttctttcgagaggacccaaggaacgaacacgtcctgagctttgtcatccaccgcaggttctggtatcgctgccttgctagccactggcatactcgaatacgaggttgatggtgaaacagggacagaggaagacgaaggagtagggttggtcttggcggacggaacaactcgacgagcgccttcaccttgctcaagagcccagacgtatatcattccccgaccatgatcaggtacgaggcatcggatgaacgttcgcattgcctccaaacgcctttctggagtagataggtgatgcaaggtggcgatcgagatggcgaagtcctattaaacaagaaagagatagagaagaaaaaatagccagcaccatgagccaacgttgaaaatctaaattgcttgaaacacgatcttcgagagaaaaaaacaggaagacataccatcgagcctggtcgaactcctccacaatcaagaacatccccaatcatgacctctcttctcctttcatcgtctgcctcctcttccgtatcctgcgcgtccgaccgtttctctttgacatatccaaccctctgcgcgagtgacagaagtctatcactccgatcaagcccaatcatcatagacgatccattagatccatcccaagccggaaggtatttgccgttcccacaaccggcgtctagacctaatgagccagggggaatagtgtgcaagaatgcagctatcgagggccattgcttaggaacgtgatcgagcagagaagggaagagaagaaagagtcaacttctgaaaagagaagcatagaacgaaagaaagatgagcacttgcaaggatagacacataccttgtatctggtagccgagaaatgagtagcaatcatctatgaagtagaaacaatctatgtgttttcttaagcaaggcaggaacttgagcatatcaagaatagttagacgtacgttgtagacctcgtgaacattcttttgctcatagtccgatggaagatccgggctgggcgctacggtcaatggtggtggtcccataatcaatgttactgatgttgatgatgttgctatagaagaagacgaagaagacgaagatgacgatgatgacgacgatgatggtggttgctgtttgctctgctcgcttggatttatttgggaaatatcaaaattattgaagaaaaaacgatttgaatgaatatctaatctctctcgatcgctcaagcccaagataccttcgattctcatacaccatcacggttcccgacgatggacactcaaacttctcacccggccttggcactctccttgtcagatggatccgagtccgattcgtcatttaccgaggttcagtacgatccggcaaaagatcgagagtggcttgaggacgaagaggaggaagcagttgtggcagctgccgtggcagtgaatatcgacgatgagaatagagaacaggagaaagcaagtgaggttgtaatcgagtcatcgagccaagccgtaacaaaaaaagagaaagagaacggagaacttctaatatgggacaagaatggttgggacgacatggttctccttaaagcattcgatgcagccagagaagaatatcaggttcgcttctctcctgtccttcgaatgatactacaacaagctgacttgaatatgagatcattctaaatgtctaccggccaaaggcgtaccatgcaccgatagcaccatacaagccttttgtagctgatccaatgctggccattcggtcaaaggaaagatcatcaaattcatggaagctgaagttggagctcaaggagcaacttgctcgagaggcaaaggaggccaaaggaatccctccacccggtgtatccaacacgctgaatttgttcgtcatctttcttctttgattttcatcctaagtccgtgtttttttgatgaagaaaccaaaacacctattgaattgagcgcaatcgtcattgttcttacaatctgaaataatcgaaaaatcgaacaatcatacttggtggtctattgacaaaccccagatggtacacccgactcgttccttccgcttccggctcgaagtctaatgcaccgttggcatcatcatcaacaaattcgggccagcccaaatccagtacgaactcttcaaagggccgttcgaagaggtctgctcagccagacatctctatcaatccatacggttctactccgtctagtttcgtccatcatcttctctttttgttcatcttcgggttttcattcaattgtttaattgccttttcttctttcacaatgtacccaaacagaaaagagacacaagagatcgaaccaaacgacacctccctcgatcatccactctctatctccgacccataatgattacacgccggattcaccaagttatacacctcaatctcccacgttctctatccctggttctccatctccacggtcgatcgatcaagcaccgatagagcctgaggtggaaaaatacgataagcaaggccaagatctaaggagtgatgacggcagaggaattgaagaagaacaatgggaagaaggccgcgaagtcgagtttggtttccttggtgtcggaggtggaggaatgctggattccaaccagtgggacgattctagtctagtagaagattgggaaagacagaaaaagaattggcaggttcgttgatctttttcgggtttctttttcattttaatatctgtcttgggtttccatcttctccttcccgttcgagacagaacattctcacatcttgttcgctaactttgtctttgtctaccaaggctcaacacggaactaccaaatcatggctcgatcttgcgcttgaggcccaagctcgaggcgaatccatttccagcctagacatccagcctgcggttcctctctcttccacatccacatccattcctacttcgtctatctcatccgcttcgtctggaatcgataaagttgccgagagaaatatagctcgattcaaggcggtcgctcaagccggaatacaaccgaccaaaggcactggtttggaagacaacacgtcgggcgaattgtgttatgattaaaagcaatgcatgaagataaacacaactggcttcacctgcccagtccttccttccctatatgtttatcgatactcaattaagagcgtcaatgagagaaagaataaggaacgagaaatgatacatggatatacaagaatggcagtttcgcctgctctatgtagaatgagtgaaggggaggataaggaaagatcctactaaaatcctattttctacacccgtcttttatcgtcctcaaggccagtctagaagtatagtgaagcagcaaatacaatgtctcgcttgatcaacgcctgcgcgtcctccatctttttgaacaactcagcgtctccgataactcttgccgcgtcccggacttcatgacaagtttggtcgagccgagtaatcactcggacgatcgttccttctgctacatccgtgagttcagtaatttgttcgaagggctgaaaatcaaagaggaacagagcgatcatcgataagaacaagttccagaagcaaaagaagaaacggagaaacaatagatgaaacgaaccatgcccttggcccactcatacacggcctcaactagaccaaacttcagcgtagtcgcataatcatcatgcgggaccttgttcctatcctgcacttgaccaatcttctcggccagttctaagataacctttttaccctgtgaaatcaacccaaaagatcagatcggtctttgatgctggaaaatgaaagaaaggctccagttgcttacttcttctagacgagggggaatgctcggttccgaatcagacttttcttggaacacgaaacaagacagaagagccacgatttcttccggttcaaaggtggcactgattttatacaaatcaaacaaatacggtcaattttgatagcgtatataagattccatcatcaaaatcagtacgtacaggatgttctccagaatgagctctgtgagaatgagctcatttgctgagttaatcttttatcgagcaaaaaaaaaaaaccacggttcagaaaatatgaacaaaggggatactgcatcccactgtgacacctcaatcgagtgaaatcaacatacctcacaagccactcggcctttgagcaagacagtagcgttatggtcaatgaaccgaagttccttcaagacctcgatcctagactcatagtccggtaacaactcaagattctgatcagaaattgccgccttgagttcggctatcttgttctgaagtatcttctcctcatgcatagaatcgtactggaaaaagaacggttatatgcggaaggtcagtatcagttcatcaacccatttcttgcaagaaaagaagtcaaacaaaaacccacgtatttctcgatatctccatcgagcttggactccagcttttgctgtcgtcttaacatcgactgtcgagccttcagcgcgtcttggatctcgatcgctctaagtttggaccagtcgatttctgggatctcgcctgatttgataaatctgtccgttgtttgagccaacccctcagccgtctcttgaagagctgaaatttcaaatttggtggataccgctcggaatctctcggcgtccatctgcaaacaagtgaagaggcgaagagggttaggttgagaagacaacccagtcaaactaccttttacgagaggagtcaagaacaaaccttgtagatcttcgaagtgaccaggtttatacttgatgcaggaaccaccaccatctcgtatttgggctcagcaggtcgttgcaacatcgacaccgatggcggccacctaggaggaggcataggtccgtctgtccatgtttgaaaggcggtggtataagataattaaccaacttgccccacaaactagttaaggatgattaggcaccagcgctaacaaaccttcagtgatgttctttgtaacctcgtcaaccaggaccaacacagcgtacgacttagaagttgccgctgtcgggcttgacatatttgttaccgggcgaagaatgataccaacattcaaagaaaatcgctagaattaaaataagatcatagaagacaagagaattagccgaaacacaacaacgatcagatgtcatcaatgacgaggcttgaagagagatcttacgctatctctaaggagaacgacacgtccagaagcgaagatcttgggaccttgtgttgaaagcgcagcattgtcaatgatccaactgttaaggtaaaccagctcggtcgaggcatcgtagaaagggctcagttccggactacagtcaagttttgttagttgactcaacgccctttcaatcttctcggtttcaagacaaacaccagagaagtagcaaaagaaaaagtgtcaagatagtaagcagccttgagggtataaaaaaactgagcgctgaaagaaacagaacatacctcggcaaccttctcttgttggtcgggaagaagactctgcgatgcgttctcagagaaacttcgtttgatcatctcttcaaccttgagcgcttccactctgagcaagttgagaagcatcgagaacgtaagtcggaattgagatgccagcttgtttggtgtaccgagcatcatctggtgaagtgcttgcgcctgataatagaagatatgtaaataggaacatagatgaacaaaagagatccaagccaactcgaaagctccaggccaagaaatgggaacaaacctcgggaatctcatctttagggataatgataaccactccagttgcgtcgagacctcgtcgaccggctcgcccggacatttgagtatattctccaggtagtaggtctcggaagttcgttccatcgtgtttccgggtaccggagaaaacaacagatcgagcaggcatgttgactcccttgagaatcacatataccataaatcttcagctttgcttgatagtgagaagcaattcatagacctaggaatatcacgtaccatcgcgaacgtttcagtagcaaacaagactttgacataaccggaagcgaataaaatctcaacaacctctgataagggtgttttccagggaaaaaaatataaaaaggaagagtttcagcggccagtttcttagaaaatagcgacataaacaacgtcacggcgagacgatacgtacctttgacgatcggaaggagaccaccgtgatggattccaatacctcttttaagtagctccttcattcgttgaatttgcggcaaccgttgatcagattctgaatcaatttgtatacacatttgcatttttgttagtgaagcagaggaaaaacattacattgatgtcaatgaagaagtgacaaataaagaggacttaccactcagtcgcttcattgcgttctcgatgatcacatgcaccttgctcttctccactgctgtgcacaagttcacgttacttaatcctccagcatattcctcacatcgcttcttcgagaacacgaaacaaacgactggcagcagattatttttctgaaggtagttgaccaggttcgaccaaaggttcttgtcctgaccctgcggtcggaagaacccaccaccgccgccgccccc

SEQ ID NO: 1529 - DNA, 50897 bp, Xanthophyllomyces dendrorhous
ctctccctcgagtcatagcaccacctcttccgccgccgttagttggttgtcctccccgaccgccccgagaaggcggtccaccccgaggaggtcctcctcgacctcctcgcgcaggaggcaatcctcgcccgcccgtccgttgaagtgggggtaagccagccgcttctcgctctttaacctgtttccgtacaacggcgtcagacgcgctcttcaatctaataaaataaaccatttagtcatattctattgtcagacctcgtcttccttgctcaaatgatcgaaagagtccttattgagaataacaaatgaaggaagaaagagcaaacggacccgtcgttaaggaattcgccgttcgagttgacaatcttgtgtagctccttgccagcccacaagaaatgttcaagaggtactggtcgttttggcgtcgaaataacgtaaacgtcctttttcttcgttcgactaccgatgttctccaccaaacgcggactgatcagcaacagttgagatatcaattatgaaacaaacaagtcagatatgcatacccgacccatcctgcaaactccttggtattgggcactgtggcactgagtagaatgatgttgacatgttccgggagaaggatgatgacttcctcccaaacgactccccgctaatccaaacaacccaaagaccggttagcaaatacacaaaaagacataacgcgacagcagagcagaatgatggataggaaaggacaaacctcggcatcattgacatagtggacttcgtcgaagataacgaactcgacatctcgaatcaagtctgctcccttgtagagcatacttcgaaggatttctgtcgtcatctacggttagaacgcgagaaagatatcagagtctgaaaccataatcgacatcatgaagggaacgacaaccaacgatcaaacagcttccttctgggttgatctgaacatctcccgtcaaaataccaatcgtgctgggatcaaaactctgtttgaagtctctgaacttttggtttgacagcgccttgatgggcgatgtatagatagctctatataccagaaacgttcattgagtgcagaaagaggtaagacatactgatttcgacaatatacgacagaaagagaagcaagaaacagttggttgacgaaccttgtcatatgtttcgccgcaagagcaattgcatactcagccacaactgtctttcctgcacttgtatgcgctgccacaaacacagagtcacccatttcgagatgatagattgcttctttttggaaagtatccagattgaacgggtactatttattaaagagataatgatgacgttcacaataagacatgtatgttgagaggacggtatagagatttggtagtcaggaacttacctggtacgccatatcaggaacgagctcatcaaactatgtgaattgagaggaacatgaggtgcattagttggagtgtaccctacgcaagacgacttgagaacaactgacgttaacaagctcttggttcacatctaccacatgagcccactccctcttctcaatcttctttactcgtttgggtttggtaactgcgccggaggtggacgcgccgaacgactagggagaaagaaagaagaaagacaccaagatgaggctttgagaatcaaaaagtccgcttctaaagcgatatttagcttacagaaggggacaaaagatcgtctattccagatatatcttcgttgagaacaacagatttgggatttaagagtgactcagctgcgagtttcgcctgtggtcgtgcgtcctgtgagtccaattcacacacaaaaatcgacaactcagtcagcatcttgaattattttgtgtactgcaagaaaactcacgatgtttgcatcgtcgccatccccaaccttggctttccgaatgccctcgcctggaccacgacctaagaaagcttcgatgacccaatcgtccgtttcttctgctccttctgctgtgaacattttttcaagattcaagcctctagcaaaaccaggaggtttgactctccatcccccctgagactcttcttcctcttcgacgaggacgttctgctcggcatcgagcgcttcctgttcggccgttcggagactgagctgagaggagattgcaactggctcaagaccacccggaaggaagggaagattgcctgaattcccacggacaaaagaagttgctccagctggtgcgcgggtgtatgataaagaggtcaaggatgatggcggagggggaggggctttcgtctagagtttgggagatataaatggtaagtaccagggtggacttcgaagcacacaagggtaaaggttgaaaactgacctcaatccagcctgcgacatctccagaaagtccttttcgaagaaaacttgttgtatgcgtgggcggagctggcagcaagggtaatttgggaaggggagtcttcatctcccattgactatgtggaacggagtttaagacgatcggccatttgccccgtcatcaaaaagaacaatacgacataatcaagaatgttccaatttttgtttcacaaaaggcaaaaggaagaacagaaagagagaaaaagagtttggaagactcacactgtaaagtccttgagccagtcctcctgaaggacgttccgaggagtgaggaacttggtctcgatctgttgatggacgtcatcttgtgtgggaaggccaccaaggttgagctgagcgagcagttcgtctgctggcctcgtaggaacagcgatggccatgtagatgcggatgtgtgtgggtgtatgtgggtgtaggtgtaggtgtctgtgtgtaagtactagggcttgatctatgggtttcaggaacacagggcggtcaggacagatagagaaaaagaagggactgcaggaacggatcgagcgagaatcacgattagtctgacgtcggtttgcgaatcaaagggagaattggatgtgaggaacgtggttgccatggcgacgacggaaacagggcgatcgtcaggcacaccgaatgcgatggtcgttttcagggcaagacgacatgccgaaccttcatttcgttcctgagtttcatcggttcctgaatctgcttgccctgagtccatctcaccgctcacagcatgcctcgatcttgcgctggatcacctcttactgccacgacttcccgacgtccaccgggagagaacgagcctttggaggtcgagatcatcgacctggcgaacgaggattctgatagggaagaactcgtcccagcaacaatgaaccaggcagaacaacgggagcgagaacaagaaggtgacgatgaagacgagatatcctttcaagggtcaaccgggccaaggattagacggtttggtcgaacgctcgagagaatcctcgggggtaagtgagtctgtgtgtgtgcattcttatcatattcgtctttcaaagaaagctgactgacctaaccgatccctggcatttaccttagagatcgataggcctctacagaatccagaagagcactcaaacaccacttcttctcactttaacacatatcctcaacagtcctttatctctccagaggaatatgatggctttgacgatgtcttcgtttacgacactcccctatcacctcccaaagccgtccagaggattcccaccaggaagggattctctcgaagttttgagctcgagctaggagggtttatcgactctgacgatgatgaggacaaaatcaaactggaaggtgaagagaaagtcgaggctcctcaaagcatacaaaggaagaaacggaagctgtccaaggtccaccaaggtctaacgttcgcctgctcgggatgtgagaggccactattactgaacgccgaatcgtctgggaggaaagtatatgcactcgcttgcggacatcgtgagtctctaaattctctctttatttcctgtttctctgctcggcatgtcggtttccgtttgacagaagatgtctcatctgtcgtctgatcctttgctgccttcttttgccagtgatcgatgggtattgcttatcctttctctcgacaccctcacacttaccacctgatgcatctaaacacgcacccaaaccgtctcttccaagaacctcttctgtatttcctagatctcactctttgtcactcccggcgcgaaacgcaaaacgagctctcaagagggctcaaacacatcggtatgtctgcccggtccagggctgtgggaagacgtactacagtgatctggttgaacaaccggagattcttagaccggatatagacctctcaaaagatcaagagatgctctggaaggtcagattcggatctgatggggtgatacctgtctatgtatgacacatgtagttgatagagtagattgagaacaaagaaaattattagttgttcatctgcgctgcttgtttataagctcgtcagaacagagacgggtgctgatgatggcgcaaaaacttatggagtaatatatcaatgatcaggtgaatagatcgcatataattcatgacatatattgtacaggatatgtccggatagacaggtcaggaggaagcaaaaagggagagaaggatgatttcaagcgtactaagaaaacaagcaatatgatgtgcgatcaacatcagtcctggaagtttttcgaatgaaaagaacgaatgatagaaggaagggttttttctagacttactctagtgaacgttcctctggtaataaagttgtcttcttcctttcctttcttacccgcatacagacttttgactgcatcgctcattcctcccgcctttctcttctcctcagcagccttcaattcatcggccactgctttcgcaattaacccaactctacctccattcccgttcatctctgtcttcgccttggccttcttgtgagttgtcttctcagcaccagcactgtctccatcatcaccagccgccactgctccagacttgcgtttcttgttcttcttcgcagccttctcctccgcacgagcagcattgatcaggatcaaaagatcctcctgaaggccgaacgaggagttcaagtagatgatatctccattcaataactcggcagcctggtctttgtcggtcgaacggatgaatgtcggtctgaatgaggtggaacacgttgggcaggcgtacatccttgacttctcatccgacggagaaggagaagtatcagcagtcatcgttgagggtgatttcggctgaacaacggatgaagtcgtcagagtggctttcaaacctgcctcggagaaaacatctccgcaaggacgaagggcgacaaaaggagtcgtgccgttcgcctcccgttgagttaacggacacgagaatgggaatttaggagctgtcacgtcggacgtctcgtcggcggaaggagagtagaaattcgggttcggggtcagttggatcgttaacaagtcctatatcgggaaagaaagcgaacatacagcatacaaccgtcaattagcacaaaacaataaaatcataacaaaaggatggtatgaaagaaacaaactttgaatcctcggatgtgtccgcagatcgattcgccatccccgtacgaggatctatctaggagaaactcgagcatcgcgtccttgttgtacattcttcctaacgcgtccagcacgataggtgatcgaagagagcgctgatcatcaagattttgagtcaattgtcagaagacgtcgagagaaaagaggataaggacgacaaagattacgtacctttgagagagcgcatgaactccattgggctcgacggaggttctctccatcggtctgctgtgctttcggcttattcttgacaagatcccttcgatcctataggcagtattccaggcaaacaattaaactcagtcgacaaaaccttttgagaagaaaggaagaacgaaacacagcaggagaatgtatcttacagggattgatcctccatcggctctaagagaaggattaaacgccggtataacagaaagttgccggtttcaagtcagtatcaagactttattgtacgccaaagaaatagatactaaccccatgctaagataaaactaatatagaataaaggaagagagagggtgatagagacggttgagagagtgtgtgtggatgttcggataatcttcgacgttaacagactttggtggcaacgataaccgagtgagcctcgacgtcagcctggcattcgtcacatgctggaaattacctgttcaaatgagttgctctcaaacagtctcattctcctcatcatcctttcttttacagatagacataaacatggtcaagacggagacgacaatcgattcggacggctttagcaccgtatctcgtataaagtatagagctcctttggcttctactttaggcaaaggaaagaagaatcgaaagggtaggcagacattgctgcagggagccaacgcgcatgacaaggagtgtgggcaggaagaggaaacggtagaacatcaagtcaagaatttgaatgaaactctcaacagccggaaaagggagatcatgggccatggaggatgggcggctgcttgggaaggtttgtcctatctttcttctcctttgggtttaaaaccttcataaagagcatggtccttccatgcttatgtctctggtgtatcttcgactatgcttgcatatcaaatactcgtcttgtcatgaagaactggtggtgtctctcaagacggattcgaccttcccgaatccatcaaggatgacatgtttcggactaggtcctgtatcaacgtcccgaatagctcaatgccagttactccttatgctcgaccttgctcagaaattgcaaatcaatgtgctagaagcttatgaccctgtgttctcaacattggataagtccctattgagcacatatgggattgatatcatctcagagaatactgtatgtgcttcctatcttttctcgtgtactttgggtcttttcaaagcaactgacatgatcatggcgctcttcgaacgacagcacggtcattatcctttatctatttctgctggcaattctcaaacaagcatccatccttctaccgagcctgcctccgatgaccagctgccagcttgcccttcagattctgtcctctcatcctctcctgtgcctccgttccctccggtatctcttcatccaacatcgactgaaccagacacacggacggctcacttgttctacatgccccattgcccacgaacgttgtatcaaaacttcttggcgtccaattggtcaaaatcgcagctgggaagcattgcgctcctcgcaaatgagtttgaaggttatttgacgaggtgagaatgagcaacactctcggagcagttgaatattttggtctttccgcttcattttgggcagtcatctgacaggccgatgcattgctgtttgttcgtagggaaccgttgaaaagacttcaaaaggaagttccttgtttacccctcataggtaactaccctcaattcatattcctcgatggtcgtgagggatctcttaaatgctcaccgttgcttgatccttttccttctgtcctcgaacatagcccctcacttgaccacgaaatctctacccctaaatttcatttctaacgatgtgatcaacgatctagccttccaatgggtctcagccgagtcacttgctaagatagacttctcgaccaaggcgcctgtagggaacatagatcctaccaaagatgaaattttgtagaaccaatctgtgtggaagctcattataccattttggtgctggtccccaaactatctgtcaaacccatgacttttcttgtcgtctatacctttgtttgaacatcattgatgcttcggaaggattccactacgatgaaacagcttgcttgagtctagacgtgtcatttgtttatatagagatacttgtagcttgaagggtgcttcattcaaaagataattgagaactgatatatagaggaagaatattcattccatcgaatctcgtctctaatggttcaaatcatcacacgtacgagagacaagaaaggaacacagagagaagtcagtctcaagaactaggaatttgaagaacgatatgtaggtaggaaggcaaagaaatcacggacctctcgctgtcttggttcgtcgtcttcactttcatctccgtctcgctctcgctttctgttctcctccaacactgtgtcaaaataaattggtctcagtcagtatacggggaagatacactgcatgcatggagaacagcaagaccagcaggaaagacatactctgatcggctccttctccctgaggcacctgtcctccaccaagacccgttccacccacaccagcataaacctcatactgcatagcccctcgggctcgatcctgggcttccttctcagcgagcgctcgctgatgaccccatccacctcgaccagcgtcatattcctgccggaactcgtctcgaacctgtaagaatcattttgagatgtgaatcaacagccattcttctctttacatacaagaaacccaaagattctttcgataatatatacctgtccaccgttctttcctcgaccaaactgtcgaccttctatgtatcctgggtcgagatcacatcgaatcactcgctcgtccaaccgagtgcccgagatatatctcatcgaagccagagcttcttcgtgggtatagtactcgacaaaacagaacccacaaggtgtcctttgagaagttgatccattcaggagggaaagtaagatagttatgagattgcgcgtttgagatatgagggataagtaaaccagagatagaagtacggcttacttgttcctttagagaatagtcgataattatcgaacaccgttaataaggagctgaatgacagtacaagaagactgtagagacatacattctgtcaagacccataatgattcgcttaagtccaccgccttccagtggatctgtacatctcgagaagactaatgttgaacaagagaggatgtattgaagatgctcagccaagtcatgaatattaaggtctcaaacatcctgcccaactggacataagcaagagaccaagagacaagaggacccgttacatacgctcataaatctgttgttcagttgtgaagaaggacaagtttccgacgtaaagtgtggtagactcatcaaggagagatttagccctttgtcgatccagcttaacgatcatcaagtttgaatggtgagaagagcaagagtgtatttacgatcagcctcatcgaactctttcaaaagcaaaaaccataacggtacctacatgagactgggagtctctataagtagacggcttgtccaacggttgaacgacgtgagccatgattaaacctgtatgtatgctggatgatggatgctctgatgctggtaggagaatcctccgtagtgggcaggacaattataggcgtaaagtcacgtgatctcttgcgccagatcgctttgcaattgccttgtgctgcacggcttgattctccctcaacctacacctatccactgaccgtctctccctttcttgtccttccacacatcctcatacccacacacccacatccagctaaagaagatgcttcgccaggcagccagaaaggctatccagaagagttcaccaaatgtgccttacgcttgtagggtcgccgttctgccagctgctcgaaagtactctgtcgaatcagtccagatcgatcagaaggatggagccaaggagactgtgctctcgccttcgcctggtatgccttcccgcaaagcttatgtatgacgacagatataacccaaaacatttctgatcctttccaacgttgtttatactctatgtttctgtcaaatcggtcaatttttcctcctctctctctgatggacttttggcggttgatttttttggtgggaattatatattgtggtggaatcgtctggttggattttgaatcaatcgaactagactcgttcggcttccaagtcgacctcaagaacaagagcgatcttgcagagagacctatctacttggatatgcaggtaagctttcttgttcattgatgttgatgaagtccgatatcctcggcaaactgcttctgctgcgagcagagctagtacatatgatgatcatcattaaatcttgatattaacaggcaaccaccccgatcgatcctcgagtgcttgacaagatgcttccttactttaccaaccagtacggaaaccctcactcccgaactcacgcttacggatgggaagccgaaaaggcggtggaggaggctcgatcggtcagtgtgctcatccggatgcagttctcgcgtcgtccgccctgtcaagatatttattctcattcgttcaatttttttctctctttctcaatattcggatgaaatctgatcaaatagaatgtggcttccatcattggagctgatgcgaaggatatcatcttcacctctggagctactgagagtaacaacatgattgtcaagggaatcgctcggttctggtctggctccaagaaacacatcatcactactcaaactgtatgttttaattttctcgtttacttcttgttctcaagtgtctctttcatgtctgacttgaattgttttgatcatcaaaacgactttctttgatgacttataggagcataaatgtgttcttgactcttgtcgatacttgagcgagcaagggtttgagatcacctacctccctgtcaaacccaacggactaatcgatctcgaccttcttaaatcctcaattcgcccggacacctgcctggtctctgtcatggccgtcaacaatgaaactggagtgatccaacctttgaaggaaattggtgagattgtcaagaagcaccgaaactgtttcttccacactgatgcagctcaggctgtcggtaagatctcaatcaacgtcgacgagatgaaaatcgacttgttgagtataagtggacacaagatctacggacccaaaggaatcggcgctgcctatgtgagaaggcggccgagagtcagactcgagccgttgatccatggaggtggccaagaaagaggactcaggagtggaactgtccccgcttcgcttgtggtagggctaggagaggcttgcagaatcgccgagaaagagatgaaggttagttcatgcgacgcatctatcgtcattcttttgaattctacaatatcagaatgtgcacgtctgtctacaacagacggaaagcgttgtagagttggaaggaggttttcatgacgaattctgccacgctacagatcttctacggaaatctgaaggtctagcagagatggagtgtgttgaccttttcgaagatcgttctgatcaccagatgggaaactcactccagtctcttgcaatgggctgcacctatgcaggggcactgataacctcttttttcgtgctcttttaattctgagcgaatgttgttcatgcgtcatgattctatccggttatcatgaactgactcaatctacgctgcattttttattctcgtgtcttgttctacgatgtctctgggacgtatatagtatgaccatgctcgagtatccgccttggccgagcgattgatcagtggaatcacttctcagatcgaaagtgtggataggaacggagacccgaatggataccccggatgtgtgaacttgagttttgcttgcgtggaaggtgaatccttgttgatggctttaaatgatgtcgcactgtcttctggttcggcctgcacgtcggcttcgctcgagccatcgtacgttctccgagcgcttggctcgtccgaggatatggcgcactcatcgcttcgattcggaatcggtcgattcactaccgaggaggagattgatttggtagtcaacaagattgtggagattgtgaaccggttgcgagacatgaggttcgtatggctttgtgctatttttgtgttccttcactccaaaacttaagtttgttgaaatgatggaatcctaaacgcccgtcctttcttgccctctgggttttcattagtcccttgtgggagttggtccaggaaggagtcgatctctcgactatcaactggggagatggtggagggcaccactaagccctttttccttcgcattcccatattttccccgttcagatttctgcccccttccgcattcgtctccctgattaaaaaaagaaacataaaacagtgtttttctttccgcgcttttgtttcttttcaagtacatctgcctgttatttcctttttctggggttccgtccgcaattggttctatactagtgtacatatgctcttctttctccttcatgatgaggttccattcattgcccaccttacttctacatgagtctatatcgttgtaattaagtaattgtgctctgtgaaagaaaccaaaattaatgcaaacagctccggtgggcggtgtggtgtgtatatgaacgagtgccgggtccgcagtcgggcttggtagattgacccacatcgctttcaacatcatctttcttctcttgatctctcttcctctttcatctttatctccccactttcgctctattctcgtttctgattcatccacactacagttttctctctcagtccaccttcgctgtattaggttgaatatcgatctcgagaaaagcttgttgaaatccgcccgagatgagtaatgccatccagagcttgtacgcgttcctttctttctttcattcatcgaattctctataggccaagccatccttttttgttcgattcctgcgtcaatatctctcgccgtacgatatggagtcgtgttatggtcagatatcctatctaaagactcaagttactgaaccggactgtttgtttgtctctattcttgccggatggcgtttggttgattgaaaacggatcattggtcaccatcgtagcggtaaaggagcgttaagagtagcaaaagtaaggaaacccatgctcttaaaacgaaccatgctgtcagtttccgggtgccttttatttctaaactttcccttttctttttgatcgatggtgttatcgtaacctgtagaactacaccaaaggatattctgacactcaggtcagtgtcctttggatcgagcgagcttcccctctcttccacaatcagtcatttcagtccagatattttctggtatggtacgatttctgacatgatgaaacctttgatgaatggctttcgatccacaatcttatagatgaaagtccgagaggcaacctcgaatgatgcttggggaccttcgggaactcaaatgaacgatgttgctcagctaacattcaaccagtacgttcatacctcatcacctcttcatgtgatcaaccgacatgattatctgcttgataagtatgttgacatgacgaagcgtttatccttcagaaacgactttgtggaggtgatggaaatgctcgataagaggttgaacgataaaggcaagaattggcgacacgtcttcaaggtctgttattttctcgttgtttctcttcgctcatcgtattgatcatagcttccaatcttttcaggctcttactgtcttagattacatccttcattccggctcggaaaacgtggtgatctatttcaaggacaacctctacatcatcaagtacgcgtcttgtttgacggatgattttgtgagaacgagcttactgatcacacgattctcttaaataacgtgtagaaccctgaaggaattcgtatatgttgacgaagatggaaaagatgtaggcgcgaacgtcagacaaaagtgagcttttcttgtgagaaagaggtggctaggctgcctcgaaaaaatctctaacatgtctcgtgtcattgaaatatctgtaatttaaacaacctgctttgtctttctttactcaatgactacactcaaaactcaactagagcaaaagacatcaccaatttattaatggacgatagtcggctgaaggatgaacggcgttcgagaggagcaatgcaggatcgtatgacgggctcttcttatcgaagaaactctgccgaagaaaatgagaactttaggaggtaagtcaggttcatgagacagatcacgacgaagaagagaggccttgccagcggtcggaaagacaatagctgatgtgtcttttcttcgttgttgacaagtagacgcgaagatcaacgtcgtccgtctaaacggcctggtggaacagaggatgatgatctacagagagcgattcgggctagtctggtaagcgatgatgatggtgagcggaagagacgggcgaacgagtaagtagtctacgtcaaatgtatgtcgacggatggataaaagcgagactgacaatgcgcgtaccaacgatctacttttgtgtgtgcgtcgccagggaggacgagttggcaaaggtgcttgcgctgtcggagagagaagaggctcagcgaaagagggatgaagatgagcgaatccgaaaactagacgagcagacatcacgagcgttgttcgatgacagcctccaattgtatgtggtcttagcttaatttttgagttgagcaaatggggcccatcaggtcgtaagttgacatagcgaatgcatactgaccccttgtctctcttgcttcgtctgatagggatggaccgaacgcgtatcaacagcaaccgcaagttgatctgtttgcccaacaaactgggttccaacaaccccagcagactggttggaattctcaatttaatgtacgtttgactaccgtgtaggactcgagtgtataaagacttatttcgaattatcattccccttcctcgtaacatttacagccattctatcagcaacaaatgatggaacaacagcaacgggaagctcaggctcaacagcaatatatgcagatgcaggtgagctatatacatatacgtatctcgaagattgattttagaagctgatatgtgcactttattttatgtgcgcttatctgatctcatagtaccaagctcagcaagagcaattggctcgagaacaggctgctgctcaacaagccttcctcttccagcaacagcagcagcaacaacagctgttccctcaaccaacaggctatggatctaacaaccccttcgcggctggcttcaccggccaacagcaagcaccaccacctatgccgacgatgtcttcgttcaacagtaacaataatttccctgtcgatacctcgtcactctccgccaccgctacttctttcacgccatcatctccggcgaatgtggccaagccagtgaaaaacgatggagaaaattcgagattggcaatgcttttggccaacggaaggtgcgaactgatcctttgaatttcctgatgacatctacaagggtgtgtttgttgaactccttttgctctccttctaatcttacatgagatagggatggcggtctggacacattcggaaacgttggaaatcttagaatgccggcacactatggcggtagagaaggtcttgttagtcaacagacgggagcaaataatccgtttggagtggctcggtttcaacagcaacaacagcagcaaagacagccaccaactagtggaaatttagttgacttttgagatctcttaggtctttgctttctttcccctctctgtttttaccatattgcttctggtttttcatatatatcgaacttcaccactatgtgtcatgcttccgtcattcacgccgttctactgtctacctcatattcgattaaattgcggattgacttccatttgcttgcgcccatgacatgttgaactgatcttcacagacagtgaagtgtaggagaacaaaggaaacgagaaagatgcttgctttgtataaggaaatcgcgcgctatacttttcgaatgctgtgctgatgagatggttggatcgttatacaaacttggccaagctggaagcgattcatccgtgctggaaaccacactcttgtcagtacgtaccctaggctggaggatgttcatctgagctgtcggaaccgatgctaactggtttttagaagatatacgattttagtttcaatcaaggttctcattcttgtttcattcattcatggttgatcaaagtaagatctgttctacattctttgattaggttattctcaaccgagtcagggatatattctacgtaacagtatcattctgatcttggactttctcttaatcctctttgctctatatcgaaggctcgctcgtcggttctactcaatatgcacctgcagcttcgataccgttgataaaatcgccatcgctctacctccctaaacctgttcgtgtgcactcgctgttcttgaatctcgatctacaacacgtttgaccatctttctcatttgtcctttcgtcttactttgattccgtttccagatcgaactccctccagatatccatccgttacctgaagatattcaggcttatgtgtgtgaccagcttcttcttcttggtcccacataccgctgctctacttatcttgcactgaatatccatcattattcgtctatacccgacgttcaaatcagtttgtctacccattcactcttgaatctcatatactagcccatggaccagctcatagacagcaacttcaggcgagacaaaacgctcatgtcgcttacttgtttcaacgggaggaggacaagaaggcgagaaagcgggcagagatgaacagggttgctccgggatggagtccaggtggatcagcactggtgccggacagaccgaaatcaaaattgcaaaattcacaggatgaggcaaaattgacagcaacgacaatgattacaaaagaggcggaaggagggattggacagagtctttcagaggatcttgcgtcgttgaatttcgggggctgaggcaggaacggtctttgtacatcgtttctctctctttccactcttttcggtctcgctcttctagttcttctccctgcttcttggcatctgcctctttggacgttgatgtactgtattactcgtattcactcgactatcaaatatatgttttgaacaagacgatgtatggcgatatcggttcgatgcgcctagtccgcagacgatccgatgacgttgccggcctcgcgggcgagccaaacccgattcttcatcttctattctttcttcctattcacccgttcacccactcattctccaatcgacccacaagggaaatagaaacatacacacaagtcgctgtcatgagaaaagcaccctacgtccttgcgtaagccttgtcgttgactcataggtcttggccaccaagatttaaaggctctatctgatgatctctgttctccgctgttcgatggaattcagtctaccggtgttggtcgtcaccatcgtcgctggattcgctgccctgtttagacctgattggtaagtatatgcgacgataacgacaaccacctcattcattttgactctatagaggctgaaaatcgatagattctggatctcatggctgattcacctgtatcaaccttgccacttttcgaccccttttcgaccccttgctggtgattctcttcaggattgtatcgacaacctcgccagcaggatctcctctccttgtccgaacagaatatgggctctggaggaaatgtaccaaagctactataaagcgtaaccaacctaacactttttctcctcatatgtgggagggagcgtcttggacgctggacgcacttgacgtaccaccaccgtccaacgagacatatatagttggagaatggaaatgtgtacctttccgtaagatcaccttctcctcttttcccagcttctttttccacactttttgggtaggcgagtatcgagaactcattcatcgtcgacatttcgaatgcttcgtcggaaatgaatagcgtgagtttctttctcttgtagtatcggaagaagtcagaagtggcgagatgtgactgacatctgttggatctgtgtctatgctggaatttttagcactcgatctgaatgcgagcagaaaggaactggaaagttctgcgtactttggtcgacggcaggatatctgtgagtgacgcttttgaatcactatgacgcctctaactcgccctctctgacttgtggtcgtttgttcttctaaaaaatcagaaccattctgtcgcttcttccgctgttggcatcgtgtgtggccttgttagttatcgccgtcggagctggagagagacaagttcgaaagagtaggcgaaagaaagggtgcgctctggttttgctgctttacttgtgtcgtttctgtgagatactaatcggttgttgaggtataaaaaattaatataaaaaaaaagatggaagggagttgccggatgctgtttgtttagcggtacgtctcctgtaggcatataccaagtgggtcgtttatggctgatatatgcatcctttggtcttacatacaaacagcgatcttacagatcatagcgtttgccatggccgcccatgtattccgaacggattctcctcgattcttgattcacgccagactatgtagggctcgttttctttcctgctgatattgatagcgtcagacaaactttctcacctgtgcgccggatggatgttgcatttgtgcgcagacacatcgttctggctgatcgtcggagcctcaactctatcgcttgctctgtttggagcactaaccttcactggattggctgcccgtgagttttctcatataacagattagacagggcttggctgaccaaaccttctgattgtttttaccatacctgttctcttcccattacaggtgccggaaagaggtgggctggaggtcggtctgcgggaaagaagcggggtcgacacggacgaaacccctcaacgggctcggcaaggcaagctggggcaacggccgacgagaacgcgcctttgctgaatgcctagggaatctgtgcactcttttcactccattttcttctgcttcttctgcatcttcttctttttcacctcgacatcttgtgatcattctttctttattctgtctctgtacatatcgaatgatccttccactcaccgtctatccaccgttgtatcgatatcagggtgagaatgaggatgagatgaaaacagcttacgtaagcgagccaagaccgcctaggtcgcagttctcttcttcctctcctcttccgctcgacttcagatgtttgccaagcttcctttacgtgttgtcttagccttcgtgctgagaacgcaagcaagatgagttccttgtggctttacgcactcacctactcactcgctagtctaactacgaagagcaaagttctgtcgataaagtatcaagagaccaaactgacattattcggatcatccggtgatacttctcccaagacatccttgggaacggagcaagtgaagaggaaccggtagcctccaaatttacagttttctttccgtcgactcactcgtctatcttggacgattctctgaggataaagatcgtctctttcttggtctcgtcctttccaaacaccagcagcccttctctttctcgcacacgtctattgtcaataccaccattaccaggacttctaacgctttgctcaagagtttatcttctggatatcatcgatcatgcacacccgacggatagatggccctgatagaacatcactcctggttgtcctcgcccttctctcaaacatatcacatgctagaccgatcttagctttagacaggcctatcgaaggtatgggttcttgttcgtctgtctggccttcttctctatactctccctgcctagcctccttcccttttttttcaattggatgagatcacgatagccatcgagtcaaatgtctcactaacactggtgcacgggatcatgtttgacggtttgggacctcttttgttatcaggtctatggtcgaaacctatcatcgagcacctcattccccgaaacgaatccatgccctttgattctatctctgacactggcgaagtcgaagctcccaagtaagctgtcctattttactttattttatatctctttgtctctttattctctgtcccacagagaataagagtaaatgggtaccaaagaaagtttcagggctatagacttggttcgagcatttcgaaacatcttttgctcgaaggagaaccggatgagaccgaggtcttggcgctgctaaaattaaaaaagaagagaaggctaacccggtcttgtttccaatccgttctgtttatttccatacaacaatcacgtctttttgtttgtctgtaccggtgactttatatgaaaatccatccgatccgtagacaaaatatcacaccgcttgtcactggccttaccgccggtttgctcgtcttcttcctatcagtcatcctcggatggatgtactatcgacatgtcgtccggaaggctaggcgaagagcccaacaggaagaagaagaagaagagcgaaaggcggagaagaatgaacgagaaacgaaagtccggcaaggtgggacgaggggagataggtcaaggacgaaacagactatgagtccatcaggttcgaaacccaaacgtccagaacgaacccgagaacgagctcagagaccgacaagtcgaccgcgcgcagagctcgagagggagagtgaggggaatgagcctttgtcgatatcgaacgccttgtccatccttccttctaacatgtcatctacaactctgtcatctataaagacctcgatggaccgaatggattggaactcggcagctgagccaacggaattgacacagacgggccctcccacgcctaaccaggctttcttggaatcctcttcccgttcaggatcggtctcttcagcttcaggatctacgaattcatcagattcagaacgtacacgatttgaggtcaaccggtccgataagtttgttcatgatgtgaaaggtacctgagcttggtgttgcatctgttgtacaatctggttgcttctttatctattcactccctcgagcaactgcctatatcactttctgtttctcagcgccttcttctttcatgctatacgttctttcctctatccatagactaataatagttgtataatactctatcttcaaactccctaatatacatatgtatgcctctgcttttacccatctagccctctagaagatcacaaagtacttcgtatctatacatctgcgaaaactttatgaccccttcttaggctgccgccacttctaccgccttggtctcggcctcagttgcgggttcggctctggcttcgaccgcaagtcgaaatgcctttgcctttttctgttgtctccgctcatactttcgagcggcttttgaccttcgggcagcttgttgttccactgacagtaacaacaatgaccgtttatctagatgcctattcttaagtttgctcctgatgggttcagagacaggaactgatgctgatgaggatggagaagacgacgatagcgcgcggagacgagctcgttcggagagagctcggaggatggtgactagttgagaagcaggccggaaacgaagtcggggtggtctttcatccagatgaggaggtcggtccttgtctgtcagggttgacgttggcgttgatgccgatgtcgatgttaaaatctctgatgaagaggcggattctagattgagagtcgaacgtcagctcttctgatcatctttgaaacctgatcaaaaagaaagtaacaattgacggagaaaacgaaccagtctcaggtgggtcttctttgttcaagtcgttgtctaacccattcctctccgcctctaccgtagctgccgtcgatcttccttcttctgccgccttgactttttcccatctggcggcaaacacatcctgcatctcttgttttgtcatgtgagggggtaggaccacagacgatccaagctcttcttgatctttcctcatcatctttgccatcagaatcaagttcgcatcataagttggagatgatcgctcgatctttgtcaagactttccctgtttgtccgagaagaggcaagggtaataatcttcagcatgcacaattgtggggacgattgaagacaaataagagagttaaagacagacatgacagagctccttcaggccccaaatcaacgccggactcgactggtttatcctgcaccgtactgaaaaagctgagtttgagtcccacgatttgggtatttgagaccacgccggatggatctaccggtttgacaacggtcatcatgctgtttggttcatgtaaatcttttgcgctgagcgtgagatgtagcgtcttgtcaaaccatagaagattagcaaaaaaaattgggcaggagagagagagaagaagcaaggaaacaatcgaacctgcttgggaaactgttcggtggcttgtttcaacagtctcgagaacgcttttacacacatcgagtacgcctgatcgcccatcctggtggacccaaagaggtacttgtcgagctgagaaagggggaaatattcaagcccttgtatattagccgtattatggtaggcaacaaacatgcccgacattccacctattcgaccttggaagctacaagagagatcggcctgagtcaaatagatgaagctatatatatcagagacgagaagagagagaaaagactaacttgtacttcaagaaagcggaacgcatcatatcgtaccgctcccgctcgaagctttcaaaaagaccaacatcagaattgatttcgtagtgctttcctccctatcaaaatcgaaaattgtatctgatgagtctcgtatatggttgaagtattgaaagcgacgaaaaaacaaaacaaacctcaatgttctcgatatcatgccttatactggccgtcgctcttgtctttatatcaaagattccggttccaggtaatcgagggtcataaccatccaactgggaacgcatgacgatatctggtccctgtccacccagagataacaaagagataagactctgactcgaagcgagagcttgactggcataccgaaacccatgacgaaccttgctataatgataggtttcccgtctgtctctctcttctgtagagatagcgtcttccgatgcgtcctttctgtatcgcctcacgtcctccaccgttgttgtcaacatcttttccatgacgtgaccctatgagaaaagcgaaacaaacaaagtggcgaacttgagaggttgttcaaggaagatctgaggccgatctagaatgtgaacttacaagatccattagatgagttggctgaccaacatgttccatagtcttgtcgccatcgattccgtatgttccagttttctcgttgtatctcaaaaatattgagcacggcacggtggccgaatagcttgttgttatcggctagagagagagcaggatgtggatgaaaacaatcgagatcagagatagatccggagaatgatagagaatggaagacaaaagtaaattaccaagccaaaaaagtgatagctcagagaagacgtgtcgaccggccgattgtttgagagcgcgaaaaatatttgagaaagtgaagccgttattgaggaggtggagccgaagaatgtgcattcattgtcggaagctaactttgctagcgactataattcacaatgaagaattgaggtaagatacaacattgagtgcgtgatctagagcggagcgatctcctcataaacgaacattataggaaagctagaaaaggacgcacgagatcttttgaagccgtaacgtatttggatattcgagccaaatcaaactcatccggatgagcaattgcctgggctcgcttgtcaaagttgtagttgttcgtctttgggtcttggtagaagtgaactcccggccttgaggaaccagaagaggagagaaacgagcacccaaagaacaaagataatcagacactgccaaactaagaccggaatccagagatgaacagattacaaataagaggaaagaataatagaagaaaacatacttgaagagcgctttgtcgaactcatgttctaagccagggactggtgcttggccactttgcggcggtaaaactgtgtgaagaccaggtgcatctgatttagagtacgactctgatgctgatcgtgccttaaacatactttttttcaaaactaccgtgagggaagagatttactaacgggttacatcctgcacggccttctcgccatcccacgtctcctcccataaagcctcccatccaaacactttgcgtggattgacctttttgggtttgacaaagaacttatctggatccatgataccttctttagcttaatcataagttatattcacagagaaatttagtagaaggtcgattcatctcgaggtaatatatattttggagaaaggggaggaggatacgcactagctgcccgcttttttgctttggtccagagtggttttaagcctctgtttttagccttgaccatcgtgtcgagctttttctttggccagcgatctgtctttctctgatttgggagcgctttggttaaggtagccgttcgcgaattggtcacatatccttgacgttgagtggaaggtcctgctgattttcgtaagaaggcgtcttggaggaaggcccaatcctctgatgtagtcttgaatctcgatcttgatgtgttctttttgggattgggaccgagtgagcgctgaccactcatcaaacatctaggagctttggatgaggaaggtgttgagttctctgcattgaccgcttttgcggaaaactgatgatgtttttgcaaggtctttaacgatttgcgcagtgcggtgttcttttcgtcagaactcgcgcttggcatgctaacgatcgactggactacttcaatcgtctggctagtcgtcttgatcactggcgcatctgttggaccatctatcgtggtggagggagaagtaagaagtggtgtcgaggtaaaagtatcggtagtggtgggagtgggagtagggattgaggtagaaaccgcgtcatttgttttctgcgatccgttacattcttcattttgagcacggtggtactctttggttggtttaattctaaccagctcacttgatgatgaggttggtgaaaaaccgtcgatcgaggaaagtttggactcttggctcggaggatgatcaggttgagctgggaggaagaagaaatgaacagagtatgttcgtacacaatcagctcgtcattcaaggcgaacacaccatgatgatagcatagcagagacatggttaccattgatcccactctctgcattctcctgagccttactagatagagaagatgtggcctgaacggagggtatcgatatcgaggctggccgtgcgagcgggaagattatgggtgatctgttgatgacccagtaaggacgggcgaaacatggacggagcagcatggtccttctggaacctcttcctttcggatcccttctttccttccaggagctgaagatgacgagatggagagagaaggagaatcctttcctttcgttgctactctttgggatcggacgaggtgggaatggaaaaggtaccaggaaccgataatttcagaaatcaggaacacgccgatgcggggatatagatcacgtgatatttggtgaggtattacgtaatcatacacctctcagcgtacagcgataaatcgtcatctccttcccgtttagtcgcatcctcagtttgttgcatgttctctcaaagcagcaacctttcaaccagcacaacattcactcgataataatgtcagactcaatgtatcctcctcctactcatccctcaacattgttgacgtttcctcaggctaccctttcccatcatctcgggacacacgttttcccgttatcctccggttcgtgctccctggttgagatcatatcggaggatgaggacaaggatggaaagaccggtggggcacctaagaagcttcttgcgctctccatgcagccaaataccaccgttcttcttggaaaggagaatctggtgagaaagaccgaccagaatgaggtagggaatcttcgatatactctccttcacttctcgtcgcgcactacaccactcactctctttgatacatacacacatgtatacaaatctttttagtcgcacgcctcgtattcttttaacttttctccctctccaaaaaatgttccttcgagctcttctgccggtggcatgctcccgacatcaaaccaagagattggaggctaccttaagctaaagctaccccagcctaagaacaacgacgaagtatgtatcttgcttctcccttctttctcttcccttgacccctcacttcaagctgattcccttctactacctatgaaccgcaaaaatagtatgaagacacgacggcgcttgctcgaaagtttgaatcgtaccttctcgaatatcaactgctcgacaccagactcgacgccgacatttccgaggatgacgacgaaaatatcgggtccgtcctttccggctgggtttttggctccatcgcaggcatcaagcagacagcgggcagcgtgtttagaggtgcaaaagagttggtatttgaggacaatgcgaatggaaaggataaaggaaaagcaagagaaccgttcgttactccttgttttgtcctgtcttttctatcttttcgttctgtcagtagactgattttaaaaaaaatccctcgtgatctatctcggtttctagtgctcagaaggataatgaggccgtttgacctctttcgactctccttcttccagtgcatacgtccttgtcttggatctttctgtttctctttctctgttttatatctccttctctctcgatctgtaatccttcgcttttttctccatatttctccctcttttcaacgaattctccattccttgatggctattccttgtctctggcttccgcccatattcttccttgtcgaaaccatgttttctactcaaaggttttccctccaagagctgaagagatttgagagatatattggttgttttatcataatcgcctctgagcgatcactctcgtttcctcaaacacacacgctccgccctcacccaccgtctcatcttgcccagtacttctactcctgactctgctcctgctcctgctcttttcggttctgatcctgaagattagcccactttgagtttgatagggaagcaggcaacttgaattcaggtggcgtggaaggctcatttgcgaacacctcgtgataactcagtggttccaggtcgtctgctggttcttctgcgaatctgtttgtcgagatcaaagcgagagaaaagagaaagaatctaggtcggttaatcttgaaaaatatagaggagaagtgtggaagagagacggaccgttgcatgaaagcaaacacttcggggttcggttgtaaactattcaaattggcaggacgataagtcaggcccaagactccaaagaaaagatacgaaaggagaaaaaaaaggaaaaacgtacatagaagccagtggattgaatcctctcagctcgatacttgagagggaggtcgctcgagagagagcgacgtatctatttttcagatagaatatcaagagaacacaaaagcattggttttgaataaaggaagcagatagacacaaagtggacgggaaaacgtgaggaactagacgaacgcttggcctcgctcgaatgtgtttctcaggtcaatctaggaagaatagataaaacataggacgggattagaccgaacgacaaggagaggagatagacagtacggaagaccaaccttaacacgctgtaaagtctgaccctgggatttatgaattgtgatagccgccgccaagaccaaaggatactgattcctcctaatcatcaccattcctctcgagtctctaacctctccggcgtatcgtgggatcctaatggtcgtaccatcaatgaaactgacaactggatcgcccgattcatgaaacgagactactttgccttgtaaaccgttggataatcgccagatatcttccttgtcttgagtaggggctgacccaagagatttgatgcttcctgttgatttgatgtccatgttcttgacaaccatcacggaaacgccaaccttcagcttcaacgtcttggccaactttgtgtccctgatcgaaatggagaataagaagagattcaaagggtaagaacgaattagaatatagaagtctctgtttactccaaccaaagtgaaaatcacactaactgctcgagtttactcgtcagcatgtgcagatctccgaacgaagccttcttgctaacaatgtttttacgaatccctgagatatcgtcaaccgcctcaaatgaacgttcctcagcctttatcgaagctagatgttcttggttccttctctccacatcttccaccaatgagaacctgacgttttgttccaggagtgagggatacgatcagaatgattgtcgaagaacatgaataaaagacaaagagagcgaaaggaaaaggcgacttgcaggctgataggctcgatcccgtcttcatagacaatctctctatccaatgatttcagagtctccacgtcctgcattgacacctttcctagacgtaaccggttaagtagaccaacgaagaccggatcggcctgccgatgaacttttctaaggaagaaattgttggatttcttgatgaccgcttgccaattgtgcgcggtaaaagcaaacccgcgggccgcgtcggtttcgatatctttctcaactggggggagctgagtgttggacaagagtgaaacacgtgtatcatgataagcttcggaatgagaggaagaactggaaagagcgagacagaataaactcacctggtagaaatcaccggcaacaacgatctagatggtccaatcatccgagtagaggttaaggagatggaaaaggaggatgtgcgtccgtcagcttgtaatcacaaggagaaatctaatctgcagacacattgaaatgaatttacctgaagaccaccaaatggaaggctgttatttctaatatcttttccgagcgcatccaatctatcgaataactccgcgctcagcattgacactgattcatattcgtaaacgagaagacgtcgacttgatgagcaacagtttgatctgtagaaacaagcatgctagcaagtggaaagaaaaaggaagcccaaccttcgtcgatgatcaacacatgagtacccaaccacctctgaatggcaaaatctgttggggttgaaggtctcggtttcctgagagcggccgtttccttcgttgattttcccttcactgaacgcatgtaatcacgaagggcatccactcggtcgatgcattttgcagaactgcttcggaccgagactctgagagattaatcgaaggtcaagggtaaatatccattgatgacggaagggggaacaagggaaaaggacacaagatttacccagcccaagagtgtaaagtggaggccattgaaattcctaagttctgcgcagcaattcccgttgtagcggtcacgcctactacctttccgtcctccttgagtgccctgacgatcgctctcatcaagacagattttcctgttccggccgcgccggtgaagaaaacgttgtgacctctacggacggtatcgaggatctgagactgttcgtccgtcaacatcggctcgttcggcggtcggctcttgtcctgaaaaggtggcagttcgatctcacgtcggatgaggggcgtggatcgtgtatgcgcaaagtcacatagtgaaaggagtggagcgaggctagaagtagaggagagaggagcaaagagtggggtggacgacggtggggtactaaagtcttggggaaacagcgctttgacgtgaactatcaacacgaaggaggaagcatgtatgtgagaggacggtcagccagtagggacgagcggtctatggatagtatcctttgacttgatcggaactcagacggggggaacgtacggtcatcggcaaactcctcttcggtaggagtaatctctctattgctataatctggatagaataccggttcaggagctagcggatatggccggaaaggtttgttgcaagaccatacagagaaggagaaagaaggaaattctcgtcagtcatgatgaagaaatccaaattcaagaatcgacgatggaccaggcttccgaccgaggtgttggatgggccttcttaccatttggctcttcaaccgtggcgggtttgatgggcgccggactttctgccggcgtgtactccatctggtggatgtctggatctgttaggatgaatggaatgatgagaacgtttttagacaactcactgcgcactttcttccttaggtatgatgtttcatcaccagaaacagacgactgaaactaagacctactgtatggctctatcggtatggccaggtcgaacgtcgagacccgagtgggtgtagggcgtatggtggatgatctacgagcaaacggaataagggactgtcgtgatgcagttcccgctctaactagagcgcatgctggggagaacgaccttctgagcatgtcctgttgaagtcgacagttggtgtggatcgaatgaggttattgcggtgtgagtgtgtgttctctcttctatatgtaaaggtgaaaatccaaaaataattagaaaaaaagttgtggtaattatgcgggaggtcaaggttatgcttttgtagatcacgtgcagagtaacaagatgcccgtggttacgcttgcatgcatggtcgactgtgcaccgggccgccgtaccttgcaaaggttccttgtttcggattccgtgcctggtttcggattctgtacgtgttcctgattctgtacctgtacttgttcctatccctgttcctgttcctgattcttcgaccatccaccccttcatcccttcgtgtttcccttcttcttcctctttgtcgtcctctagccaatccttctagtcgtatacactctggacaccctccgctctctctcaggatggatacctcacggacaccgacatcaccgacgggctcatcctatgatttgttcatttcatcattccactcgtcaaattattcctccccatcagcatcagcatcagcatcatcatcagcatcgtcctctgaagacggatctcctcgggcttgccagtcaattccatcaacagacaaagacaactggcttatcagaggggagctcgtgctcgagccagaagacaatggaacggagctatggagtgatcccgaaactcgagagctagaagaaaccgagtttctttcctcagaattcgaatctgacggtggacaagaagacgacagtttcatcccctcgcgtcgtcgttaccaacctcatcaatatccccaacgtcatcatcgccatcaaagacaatcgtccagatcgctcaagcattcttactctctaggctcgtccagcacgccaccaacaggcaacctaaccttattttggacgacgctcaaccttcttaacacgtcattttcgcccaccatcctctcactcccttacgcagtctggcttctgtctcccgagttgttcataccaatgctcgttgggatctcgctcataagtggtgccagccatgtggtcattctctatctggccagatatttgggaatcaagacactggacgatcttggtcaggctgtaggcggagggaagaccgttaggttaggaatgagggttcttactgtaggtgcaggggtaggtgtgttgatgctgtacctccgaagtaagttgcttctgtccagactacagaaacacatgctatctgaggaacaagctaacgcaagtatgtgggttatgatcattagtgactgcggacctgatacgtccgatttttgtctatagtacacctctctcgtcagtcctacagtcatcggctctttgggcattcttggctagcgttctggttggttcttagttcttcacatttatcttttaccttccgagttgagtttaacaattcttgtctcaatttgggctcgctcagatcgctccgatcctcctcgcctcccaacttcactccaaaacgattatccgaacgtctcttctgtcaagcgccttcccaattgtgcttttcataatcactctcgtcaagatagtcgcttactcaaagaaccagacagaccctcccgttcctgttgaagcctcaaggattcagttcggggagcttgtaggtgggaatggaataggtagagggtctacctggggtggaatcggttagactcttctttgcccgatggctgcttatgtgtatctgaccaggaatcgtttaagcctaacctatgtctttttttcttcttcctcttctcttcttttcttagccctaatcacgtttacacagatgtctcaactgacaacactacctaactacgcgactcttctccagccctctcagcgaacgttcttgctctctcctctgcttctttctgtactctccatcgccttgaccctcccgctctctctagtaccatactttctcctctctacaccaccgcctcctaacatcctcgatatccttccttctgccgattcatggatcatcgtcgctcgcttatcgggtgctggaatggctctctctgggattcccatgctattcttgcccacaagagatgttgcggtccgagctttcaggtcggctggtcttaagactgtaggtgggagcggattcgatggacagggcaagaagcggagagcgttctggacggtcactgccatcggatggggaggtgtcactgtgctgtcggtagcgggagattggatcagcaaaaagggagtgctcagtggggtattcttggggttcttacttagcttcttcatcccaggtgtgtgattctgtctcactctccttttcttaagtgttccactatgattcaccgtttctcctcaactcttggaacagccattctattcgtcgttctcttccaccttcgccggcctttctctatcattttccctccctctaccaacttttcttctcaatcgacatctacatccagttcttctcccaccgcgtatcttacttctggaccacaggaggctagcttgttgacggacgttctgttggctcaaaaggaaaagcagcttcagaagagaaggtctggtagaagaatctggcaggatgctgtggtgttttttgggatcttgccggttggtggggttgtctgttgttggtcggcaggtcggctttttggaggatggtaaaggggcttcaatcccttcagacacgttcctttcttttcttcttggacaccttactctgtgttatcttgggacgccttctgcacctcttgcttgctcccgttgttaattcaaccagtcgacttccatttcttgttcttggccccacttcgattttttctccttatcttcgtttcgattatgcataccctctacacatatcattatctctttctgctatccgtccttccggcgcttatacttttggctctgtgaactttgcctgtcttcgttttctctactatctaattctttgcggtccttcatctatagtcgtaatgtagacatatacgtgttctcgtgatatcttatcgttcccatcagtgattaggtaatcggccgcgctcatgattcttctccattagtggccgttcgctaatcgatccggcgaacgacgacttggaaaccaaagaaatgaatcgtctcgtctgtcaatcgacccaacgaactcaagctatacgtcccggtttctctagacggacgtttaacattctcgctcttgagagcagcgcggacgacacatgtgcgtctgtggtagatgactcgagaaggatcctgtcgaacgtcgtttggaagcaacatgagattcatcaggcatataaagggatccaccctatgtacgctcaacatgcacatgtgagagctatggtgagttcagccaatataaacaatttgaacaggatcttttaacatattctaattatgtcgaacgggtggattctgctggtttgtttcgcgatggaaacctgggggtatggacgagaagccaggagttatcaagcaagcactgaaagaagcaaacctgagagttcatgacatcgacgcctacgcgtgagtccagcttccttccttttctgcttttagagcagagaacttcgttaaaacaagacaagaagcaaaactgaaagagagttgagtttttctctcctgctttgttcaatgaaacccccctgtaggttcacacaaggaccagggatgtttaattgtctgtcggtttcgtgtagctctgcgtctgcgatggctgctcttatgaacaaaccgttgatcggagtgaaccacatggtaaacctctctgttctgctcttctctttgtcttgaaaaatatcctgataccttgcttctgttgttctacttctgcttttgttttcgacgaaattcttgtatagcaaggtcatgcgctaacaccattcataacggaagcgaaaccaccagaatttccgttcttgacatgtcttatgtccggaggtcacactcagcttgttctcgccacttcgttcgatgagtttgagatcttggtcgatactggctcattggctattgggtttgtctgcttttttttttggtcccctcttttcttctcttccttcttcttttcccttctggacttaccgattttctactttgggcatacatgcgaacaaaaaagtcagtgtttcgaccgtttaggcgctgctctggatcttccagccccccaaggttacggacccgcactcgaatcacttgctctttccctcccttcatcggaccctgacattcctcatttcgcacctctccctcttcctccactctcctcacccctattcgaattcagtggtattctcttatcgctccttgagacgctccataagatctctcctggttcggatccaaaagcaaaacattctgtcgacccaacaggaatcaaacaggccatacaggtaggcgctgccagagaatttcagaggtcggttggagaagcttttgtcagaaggatacagagttgtttggaaaagctaaaagaggatagaggagtggtcatcaagggattggtcgctagtggtggagtggctagtaataagtatcttaaacaacggttcgtccgagcacactctttccccttctctttttgttttctttccttctttgttctttctcgtcatagtttggacgtgagtcggttaaaaatgtggtctttgatttcgcgtgcttacgtatgtatatttgatgaatatgtcgagcgtagattccaaagcttggaaaaatcgtgtggtttgagagtgatgttccctcctatctcattatgcactgataatgctggtctgttcctctcccttcctttttcttctctcttctcgttctcgtgttaagctgatggggctttcgtgttctcctcggcattcctttattgacgatgaaatcaatacaaaacagcgatgatagcaaacgcggcgatccatagatacaaagctcagtcgttcaccgatttatctgacacattacctcggaggaagtggtcgatcgaggaactaagtcgaccagcaggtccgtcgggcgatccggctgttgaggctgagaatagagatgcgggtgggagctgaagaaagtgaagaggtataatgatacatgcatcgggtatagagattgaaagagcgaattagacgagagagatgagtgaaccaatatgaagatgtaagggagtggataagcgaaagggcaaatgcacgggtatatggggtatacgaacaataatatgaagcagagcacatcaagatggaggagaatagatacaaaaaggcagtagagaggctgtcttggtataatgaatatgaaaaaatacgtccatttttcgttctattgttctaatgcaaactcgttttttaagcagaatacatttgccaatcgaataagaccggagaagacccccaaaagccagccggacaggatcgagtgacggtcgatccaccgagcggaaggatggttgatggactatcgaattgcttccagttggtgtatgcacctctgtgttattttccgagaggttcaggagaggaatgaaaaaggaagttcgagggattagtcgttctacctcctattaggagggatgtaacttaatcaagtagaatgagaaaaggtgagacggacccgttaggcgtactgtcccggacaaagctaccccaccgggagacgacctctgcatttgacccggatgaacctgtcccaaacacgactttaatgtcgtcctcgtggcagaccaagccggtacagtatgggatctgttggttatcatcgtatctatatagggaaaccgtgtaagcatcatggacgtgtccgaaagaggatagagaggactaacggcgatccggcctcaaactccccgacatagaccgcccctccttttgatttccaaagtgatgcggcgtactgaacagcgcacgtccacaaaccttccgttccaacctggtcgagacgtagcatcaaagaattcacccccatagatacatcaggtcagctgcaggacgaaagaaaacaaaataaggcaggacgaacatcaagaagagcagtccgggtagcatcgccgtcggttcctaacgggtactccagggaattaaggatggctgccgatttgtcagattctctaaagacgacgctaagctcaggtgcatagtacgcgcttggcaccggttcagggttcagagggcctttaaatgcgacaaaatacgatacgatcattagcttatgacaagactgacgcgcccggctgaacaacggaaggaaataggacgcttaccgagactggagccgaattcatccttgacggtggttaacaacagaggcacactcagcgtcccactgggaagactaccggcctgtagagctttgaagaaatccatcggaagggtagcatccgagctggaagccgtcggtcggatggattctgcaaggggtacagaattatccagagtgtaagcgtagctgaggaattgggtctgagcagccacaaggtcggcggcagacatctgagcagtgctatttgtgagtgtggagtagaaggcgttggtcaggatggaggtcgtcgtaggggtcgacattccgtatgtctagatgaaaaagataaactggttgagaaagcgcgcgcagatgatttgaaaaggtaaccaaatcgaaagatgtcgaccaaccataggatcactttggaggatagccgaatggaacaggcctgaaaaatatttgcagttacaatacacgcatacacacaaaggggcagagttgagcactttgctggaatattcgccacatcctttcgaaagcatatactaacctttagcttgagggctggacagcaaagccctgatcatgtgcgctcctgagctctgaccagcgatggtgatcttgttcttgtttcctccatacgaactagcgacagagcgcacatatttcagagagtttatgacgtcacgaacggcaaggtttgggctggaggatgcgttcgcaggaggaagcaaaccgagaacactatgagtgtatgcgcgcgcacataatgaatgattgaaattcggccgggtatatgaatgagtgtgttttcttctgtccgtttacttccgggtagagatacaggataaagatatacttaccctagtcgatactgagtagaacaacagtatgtatggagagaggggttgttcaagacagagacaaaaagataaaccgtcaactttgtacaaacaaacaaggtggaacaaggccctcaccaacctgaatgaccacgacgatcacatcgttcttaagagcgaacttggagccgtccaagccaggcgccgaggcggaacctgtgacgaaagaacctccgtgaatccagagcatgatgggaagatcctttgcgctcggaggcgcgtaaataactaaggagagacagtcttcagaggaggacgaggtggaggcgacgtttgatgcttgagggcaagtcggagggagcgacgttccatcttgcctgaagaaccagacgtatgatgctctgcatagagaaggaaagagtgtatatgcataagagagagctgagaaaggagcaagaaggaaagctgacctacacgttatcccaatatgtagttatctgggagtctttccacctattggcctttgcatacttgacggtatatctcgtgacatcaccggacaccgagccttgaacccaacccagcgaggtgaacacggactttgtgtttgagctattggctaaagcagcgacggacgagaccgactggatgaacagtatcagcgggaacaagagaccggataagaacagcatggtcgagtggatttagggtatacgtataaggaagaaagaagaaaagaaagggaagaggcatagctcagacgctatcctttttgtagtttgaatgcagagaaggttaggaggaagaaaaaaaggtgaaaggtgaatttatttctcgttcctattgatcggaaggaacgtgggaaggatgaaaagatgggcaacgccgtgaatagacggatgggacctgatcgagttagtcgacttcaggaaccaaagtggtcaatcaggcactcagacacagatgaccgacagggcggtcagtcgacagggcggtcaaagtgcagtcaggcggtgcatatcacatgcatcagtccgctagcggcccgagcccagggacccatgcatctatgaggtcagctcaatcgattgaacagagtgttcggtcgaagttcactcgacagggtgaaaacgaacgggaactccatcaaagggagctgaaactttgtgagtcagtcaccgaacaaaagattataggaggaatgaaaggagcaggacggagaggtgagcattaaggcgcgggttacagtataatcgggtaactactatagttcattcacacttgataatcaatcacattacaacggcatacaactaaactattctattgttctattgtccttccccgccctctacctctgcccctacctctaccacgagtagatttctctctcaacggttgctcatcggaaccactatcgctagagagatcactgctccccttcaccgcgtccttctttaccatctcgtcctgtccagcgtttccagactccatcttggcgatgctctccctgaagcgctggaggacggactgcatacgcttgctcggatacgcgtttctcaccctgggcgcgaatacctcatgccgaccgccggaagcatcgaagaatccatcgagcgtgccctgtcggttcgtacccgccaacacgccctggcctcgtcgagcgatccgttgaataatcggcaggagctcgtcgtcaaccttagagaccgaccaagataactcttccgctagatagactcggagttgatcaaggtttggaaatccccaagcaaaaggctcggtcgaagaatctaccgtcggactcagataggctggtctctgaagaggagcagttggatttattcgagtagggtcagcgcgtaagaagggcatagctagacgcatggatacgcagtacacagcagataagaacgcaccacttgtcgattaggaaactctgccaccgtcagatgtaaaccagccttgtgtttctttttctacgatgattttagagaaagagataggcaatgagcatcattcggaacatcaataaactcttcaaaaacaaacactcacaaatgactttttccacttcgtgttcgtgtcggccgcggtgtccatcccagtctgaaccttcatccaccaattcctgaagtcgaccaagccgtcatctccgttccctggaaattctgccaggacctccattgcgctcacataacccactcctgggataccgggtgtatagtccgagccgagaagaaaggcgagcgagatcaaccgatctctatcaagggatagctctcgagagatatccccagacacgtagcattccacatacttgtgatcgttaaataagttcttgaagcaagtctttgccccaaacagaaatacgtccgagtcatcggtgatcactccgtcgactagacctagactcgctagttctgcacattgcgcctcggcctccatcggcgccgtcacgtaaggaatgccatacaaccgaagcaacacctggatctgtgacgtcatttgtacacttacattctcgtccccttcgctcgtcagcttcctcctctgcgcgttcaacacattaatctctcggtcaagctcggcttgaacctcggccaggtctttacctttgacttgagaaaggaatcgtgcatatccgtcttcctctgcatccatgtctataggttcatcttctgcatcggagggtggggcagagaacgaccgatcgaacgacttgtctggtgagtcgccaaatgactgatcttcctcggcgattgcgtggatattcatcggagagcttgagcccatcgagctatcgctctcatcttttccccctccagacggaaactgaacagattcaggtcgggagatacgaggcggaagatcggaaagcaatggttctctcccttcttgcgttggtgttacgtcaagtgtagctgtagagtctttctctgtggtgatggtgggagcgatgacatgggcaggactagaagataaatcgggttgtatttcttcggagggatgcacagtcggctgaaagcccggactcgaaccgatcgtcggacttttatgtcgatccgtaggcggtgatggaaagggttcttgaacgtcgggtgacgtcaacggtatactctgagtagaaattgtcgttggaaaatgaacactccgaccacccagagatccacccggagtctccttcgttcgcttgaccgccggagagagatcaagcttttgtgagttacctatagaatctagaactttgaactcgtccttgagctcgaacgagtcgtccagctcaaacacctcttcttccggcttacttctcttgcgaggagacatgatcggtttagacggcgtggtggtagagatcccgataggaaacgtctggtaggagggtgaatgagagatttttggggttggggtcgtgaacgtgtctgttccagatgttcgacttgtcagaggtgtcgcccggttaaacatcgtcgagtgggacgacctccgggcggataggctacccgaggatcgttctctctgttcgctctccacctcctccgctccaccgtccctcttttgagaagaccaaccaggccgaggcgtcatcaacgggtcggagatcttcctcgagcttccaaatgaatagctcttcggaagtgacgatggaaccgctcccccaatggacgaaccggatatgcttcgcttcggtcctcccggtgttcgaggcgacgcgctcggaataggctgaatgcctgaaaacttccgggcgatcgacaggggagagagaggtctgataggttcttctggtggtggtggagtaggagaataagtggttgaagaagatgaggcttcgatagaaagaatgccttctggaaagagaccgtccgatagaggctcaaacacgtcttgtggatctggctcagagctcagaatgattggatccgattgttgaggatgtgaggtcggatgaggccgatgttctgatggagcgaccatctctaaagcaacctcttccatgtcctcgtcatcgtcttcttcagatccgaggacaaccggtacgtcctcctccgccttcactctggctatcttccgtgtgttgtcttgcctggagagactcaaagctcttcgtaaatcctcatcctcgtcctcagctagtcgaatagcttctaccacatctttatcttcttcctcttcttccatctcatcatcttctgaacctggagcaaacagaggagcagaagtcatcggcctagtcgttcctaggactcgagcagttctggggattggcttctgggtcttgagaggggaatatctgttcgctaaagcctccatggcggcttgtcgacggtttcttcggaaatcattatcttctaaagaaacccttctcctgttcatttgggggttttgtaatgctttgatttagtattttttgttcttgtttataacaataagaaatgaactccaaaaggcgcaagagaaaatgaactagttttgagacagacctttgatccatctctaaggcttcatcctcttcccctggactttcatcttgatcaactaagagcattccatccttaatcaactttcgcctctttctcctttcctctccttttctaatctttcgatcccgctcgatccgaacatttagatcctcctcttcttcgagatcaatcggcttttcttttgtgccctcttctctaataccgagcacccatccaccgccttgttcgttcttcatcagcacatattccctgtttttttcattcgccatccgtactttgacatctaacgaagcagcctggctctcgatccctgccagtccccacatctgttgagtgagtacgttcctcgcctgtagattctttatctgtgcttttgagaaatccagaggagtcttggaagaagtcaacatcgactgaagtctcagatgggaagacgaccgagaccggagacgaagatcgttgatgatctcgtactgaacttccgcaggaaggagtttgaagtctgaggaagcggtatcgatgtcatcgaatttcatctcgtcgataaactctcggagctctgcctcggttgcaatccgggggtcttgtcgatcggaatgcatcgatcgaccgggtaggtcaggaagttgatatgggtctcggacgacatacttctttttagcggattctgtcgtcgtcttttcttctgtgaccgggcttgggtttacaactggatcaacagactcatcggatgaagaggacaaggatgaacgtcggcgacggcgcggagtgagtcgtgaacgggaagaagaggcttcggatggtgggggtccctggtgatagtcacgttgagggggtcggtcatagtcatccagaaagacggcattcttaggaatgatcgctccggtgtcctgctcgtcattcttgtctggttcttggtctttatctcgtagttgatcgttttctaactcccattctgcctcatcctctgggtcggatatcggcgcgctcacggcacttaatgaacgctttagggctcgcttcctagaaaacgccaacggccgataaggattgaagaagaaccaaaggccagatcatatacatcagacagaagttccttggtcagattcaaagacgatgaaaacatactcttgagcttgtctgattgcctctctcctgagttgagcgttgaatattttttctgctacttttacgtgactagcggcgacgcctgctttccgttgttttctctcggccttttgatacacaaaccaaacaaccaagaatatcagaggctctatccatcaccagccagaacttgacaagttatgaatggaaaaaaggaggaagaatttgaaacgagattgatagaatgaaaataaaacaacacacacgattgtcgatcgttttaaagcgggtgcggcaccatcaaagacaaacactggtttaattccgtggaagagtagcttgttgatccttcggatgaatcccaagatatgagcgttgacgagcgttcgaccttgtttatccttcattgtggcttggaactggtcgatccgggatggtacacgtgatcaagttatatgtttgaacggttctgaaagcggatgaaacggagaggagacctacctgatacatccaaatactgcgttaaatgagaacatacagacgaggcccagtgatcagtcagcaagtcgacggagagaagagaatgatgggaataacttacgacgaatcaatcgctagcttctttccctctaaagtttcgattctgattcatccattcagatagggtatcaaacacaaggaaataaacgatcgttgctatcaatcatctgagcctgaaagtctttctagccgtgtgtgagagcgaagaagaatcctttgcatacttgatgggccgtgctactggctgaagcagctgccagagtcctttgactcccattatgtgacgttcacaacaagatgatgctgttctctgtttgcttggatggattaggtgatgtagtcgtaggaaatgcaatgttggtctgatagaaattgtgtacaagatgggaacgtcatcgatcgaagggctgatcgttcttatggttacatcattagggttacaacatcattacagtttctgggcactcgctctatcagccaacggcgagacggcgtgggatggcaaaaagtccaaagatggatcgtcgacagcatggtcagcagcgtggtcaatagcatgaaccgtgcagacgggtattgagtgcagtcggataagatcaccatgaagaaagaggttgtgtgttatgcccattttatttacccgcgaacggactccgactaccatccctcttctcgactggagccgatcgatactgctctctatgtttttccgaaagatactccattcggagcttatccaaagccttgtcggtcattctgaaaaggttcatcataggtttgaagagaaggtagaacacaggggggagagaaaacgaaggtaaaacgcgtcgggtgcttagcataatcggggacgtgatgtaaacggagagagtgtatgtgttgtcaacccgggacgacgtacaatggactcatgcattcgttcatggctctctgttgaggtctgcatgcccaagcgattgatactagtctaggagcagcgcaagcggcgaaagctggtgggtggaatgtcgtccaggtcgcagaaacgtcaagttcaaggcaagaatgtcagcctatttcaatcctttcacaactcattcaggcctctcggaagttgatatgtaccacgagcagatgccagcaaagaatgacggacaggggatctgaaaggatagaaagagaaagagaaagaagacggtagaagaaagactcaccggcaacatactctctacaggcatcccttgcactggcctttgcgtctttgaacagagcttcctcctctcttctagacaaagccgacataccggcaacctctggtggctgatactcctgtctccatgtgaactttttgtgtgtatctgatgattcgggctgggacatgatgtatgtgtggatgtatatgcgagtaagtgaaagctagcgtatatatgtatatgatctcggcctaaccgtcggcggggaagtgttcgttagggttaatccaggtgtgaaagaaacgtctcagtcacaaagaaagttttctcttcttgttttttgttcccttccaacaaccatcccgaagcaagtctttgtactgctcctgctactctccttcgttccagaacaaagtcctcttttccttatccatctttacatgcccgacgacgaacctggttgtagtggttattctcaatttatgaaagccagttcctactcgtgaggttttttctccatctgttttcttttcttctttccttatctttcattttcactttcacttcttctcttgattccgttccttctcttgggtaacaccaccacattatcattcgttgttcgtccttgcttaccgtgctttctgaatgcatccgtctttttcaacacaatcgtcatcatctctgcagtactgcacgaacccttaaccgatcttcttctctcgttcaagacctgctctcttccggtgaaaagccaccctaaggaccgccactcgtcatccaaacaagcctaacctttggtcatacacatcgacctcacgtagatgggttaaggctcttttcttctacctgaatatcccccgaaagttcctgtttttcaaagaacctgatagatacacactaaacgaacaaagctccacaaatatctaacaacaaaaaatacgacgcatcctattggatcttaccttccctcccgcctccccttctcttgactccagccctcgtccttgttgatcgttcctacactttctccacttctcctaaacgattccaaatacttctttcactccaacatggtctttaaagctccgttccctctttcgaccttcaagccgctctcccggacctcttctcccgctccgacaaacagtcgagcctctcccgaactccctcctagtcctcctcggggacgcccctcgttggatggtccggagaacaacgagaagcgctctcggtccgttacgagacccagacacattctttccctttctcgttcggcaacccctatctccactcctagtccatccccgcagatgtcgtcgacgcctcttccggcaggatctgctccgttggtcaacggctcgaccgagtccgtctgccatatcgagaccgtgggtgaaagactgagcgaggccgtcactaaagccttggccggcagtctgacggccggagagttcaaaggccgaagaggtttggcccgaggaagcggtcgggacgtagccacgatggtgatcaagtaagccgttctccgttcctgattgacgtcatagggctagacaccacactcacacaacttcttccccatctattcgtacacagagagtttccagctcctccggtggacgtctactatttgcgagccatcgtccgcgtgtctgtcaagcacttgtctgtgctgtaagccaactctcatcaattcctggttttcaagcttcctgtgactgatgacgtctgactgttggataaacatacccagtgcttcccgaattgagacacttctcttgcccgccattgtcgaccccacgttcgctcacccgatcctgtccacccctttgcctcctccttctatccggctgaactcggtctcgcctatcttggcctcgccattcaatgcctgccagacttactgcctctcattggcgcatgcagcgttcgaagttagggataccctatcgagctttcttcatgccgaaccgggcgagaacaagcctcggtttgtcggtgacagcttgaagcctatcttagaaaagttagactttattatgggcaaggtcatgcaacctttgctcgcccggctcaagaaggaattggctgacaccgttcagggcctgaagactgtctcgatctgtgcatcgggtaaaccaacaaaggcagccgctccagcggaaccgccaattccctcgagcctgactccttttgcgtcaaaggtcgagcacgcccaccggtgtctcgccaagatttctgccaactgtggagacatcggggaaggctgggtagtcggcgtagtcgcctcgactgtctggagagggatggttggtatcgttgagcggccttgcccacctggagaaaagtctagcccgaagggaacgaatcaaaggatgtcgccagtatcgaccccatcggccctcggctcgactatggctcagccaaagcccaagccgaccaattctgtcaagtcgtccacaattgtcgcaacgctgctccgaccacctggctcccgaccaccctcgcccagccggccagttgtgacagatccgagcacgatcttggtaagctcgttcgaggtgttggtccgaaagcttgtcgacggtttggtgccctatgtccttcctgcatcttccgaccctggtcatctcgctcgggaagctctggccgaggcccttgaggcactccaatcgctcaagattgttttggccgcgcttggaaagccaggcggtctagactttttgctgaccgggctggaagtcctcaagacgtcctctcagacggcagccggacaggtcgagcaagatgacagctttcttgacgccttggatgatgtcccgccggtgttgttgtttcacctttggggagctcggctgagttctttgtctggagcagaggagcagcagcatcgaccgatgttggttggatctccccataccttgtttggctggtcgagggaccaatacgatcgaaccgtcctcgccggatttggctcggccgaagagtgggaacgaaaagtcggtgcggcagtcaaggctgaggtggccggggtgttggcaaagcagtcaggatcaatgaccgaagaagagagaaagtacctgagggcgatgtcgctcacggtggatgtcatttgatgggcgaaaagccaacgactttatgaagattgttcttttttttcttttcttttcctttctctctctctcctctcttgtgtctgtccttcccttctttcttctctgaatatctctcggcgctgcctctacttctgctctcctcgctctcctccgtctctgcgtatgagacacaacttttgtaaacgagagttcatctttctatctatctcttttctcttctctctgtttgtatggcagtatacactctcttgcctggtaattattgcactcgtatgagatttctgttgccctcttgttggtaaagttgaaacaaccgaaaagacaaagcccggccgagaaatcatttgggccgacgaggccgataatatgaatttcctattcttccgctcttccgcatgaccgccgccggatttttttcgaaggtgagcgaacaccttcaacgttttccctttcctttccttcctcctcttgtccttctccttcgttgtctctatcgttcgtgctcttcgttctatagactacgtcctagtatacacatataggatacaagcacatccaagaaaggaaacacgtccaaaacacacaactgctgctgctgcttccgctttcgacctctttgtagcgcccagtacgtgttttcctatctgatttatcttccctcttttgttaggatcatgatagccggatcatggttccatgttatctgcacacggcatgggttctctcactctctctgcttcctaaccgaactcacccgatttgacgaagcaaaagcttcatagaagacaaagtttacatccaacatccaacagccaacagctgacctctcttttgcctgttcttcccctttatctatctctccctgctttcggcgccggcttacgtcaataacacttcactcgctatcactccactcgactccatccagcaggtcgattcgatggacccaagcctgtcgaacactatcgaacccgaaccaactcagacaaacctcccgtcttttccaccggcgctcatcaacgaactatgctctactatcttctccctttcactctcggtctctccccagctgtcgagcatcgatcctcggccgtcgccaaacgatgaacagctcacccggaatactcttctcgcgctagcccttgtgtccaaagagttctactatacctcccgaccttggctctggaggacacttcgaatttgtaggccgagaggttgggtcggcattgttgacaagattagcgggagcgatcaggttgacatgtttacaggcgcagatggcaacttttcaacaggtcccaaccaagaggcactttctaggtcttccacatcaagctctctgactcgtgggaagcaaccgatgattagagcctcagacgaccaggccgaatcagacagacaagaccaagagccatccccttcatcctctgggttctccgtcttttccgccccgcccctcccagggatatcagacagacctcacctatcactagagagacggagccactcgattgaacgtactcagatttatattgacgctcaggcgagcgctttaaagaaatccgtctcgcttcggtcgacctcgaggtcttaccatcagacgagccggtctcctctgtcgtcaaactcaaactccccggagcgaggcccaaggtcctccagtgctagacgacctcgtcgaccagaagcctcgacgtcaacctcattctctgtgttcctgcctcatgacagagttgtctcagagtcatcctcgtccatttgttctggcatgccggaatccaattcgtactcctccattgccaccacctcgacttcggcgacatcggtagcgacggaagacaccgaacctgcagatcaactcactatccagcaaacgggtagctggcgagggcaaagtccggagagagtgggtagaagccggttcaagcttaacattgcatcgtccagcttgagagcgagtagtctcgatcatcatctggccgagactatcgttgaggaccaatgtacgttggagtcacctcgctctggttgtatactcgtgtattctactatatgctaaatatctgatatcttcttcctctcttcctctcgctgcatacagactatcctattcctgtgccacatcctactccgcttgttccagtatcaatctgttacccgacatcccctgtgccgtcgatctcgtcggatgagaacccatggggccgacctgaacatctggatttggccgtagatgatcctcttgctgaaggacatcatccgtgggaggctgaagaggaagaacctcacaccgaggccgagtttcaacatgtcctcaacgaggccggacttccagtcaggttgatctcattcgccagcttcagaactactgtcagtcagccttctcctttcccttgattgcctacctggtcgtttctttagtgctgattctttcgtgtctggctcttgacgtttcattctcttttccttagggcttgaggaggtcattggaagatggtatcaccggcaaatatgtcaccccagatagattaggcttggtgttgagagggtttggaaacttggaatcattcggcgcttccgaatagtatgtcgttctattgtcttttctagcgcatatacccatgaaactaactttgacttctttttctctttcttctgactccctctcgaagtatggactcggctctcacccttccgaatctgatctccctcctcttcaggggcgctaacccattgccgcctgtcctcgctcaagaccctgaatggaggcatctcactttgttcaggccgttggttgcgttagatctaacaggtgtcaatagtagagtcttcgagaccgctcttagaaactttgttgccacctttctgacgcaggaagtcgaagaagttgatccctcggacttggaccctgaacatgttcgtaggagctttcttatgttgttttcatttcctacccttctttgatcggatgcggagctgatctgatcgtttcctctctctctctctctctctctctc

SEQ ID NO: 1530 - DNA, 22493 bp, Xanthophyllomyces dendrorhous
ctctctctctcacacacacaacaccatagcctgtcgaggctattcggaacgaggctaccatcccgttcctcgagcgactttccctccattcttgcaaattcatctcgtcccatgatctattgctcttccttccatctttggtcaacttgacccatctcgatctgagttacacgcggataaccagtctgaaggagattgaaggtctcaagcttaaagcgatcagtttgagtagatgtacgaagctagatggagaccaattgctacagtgagtatcatctagtgaatggcttcgtccttgatcgtcttatcttctaatcggggttttttcttcctacctaatatcagattcttgttgcacccggctcgagctgagttggaggacctgaacttgtatggttcgatgtctttcccttctccgctgagcgcgttacagctactcgaagtccttcaggaatcacctgcgttccattcaaagaaactccgatacttagacatttcgtcttccaagctgacgaccgatcacttggctgtcttccccgagcagccctcgcttgtctcccttggactctctcatatgccgacgttgcctctccgtgatatcaccgccttccttaaattgaaagcgttcaacgttgaggttctcacgttgacgaacacatcgcccgagatcactcgaccgccgaacgtagcggcctcgatggtcgctgttcacgcgcttctcatcaacccactaaccgcccctccgttctcgttctcgttgccctcgccggatgaccctcctccaccggcaccgggcaaactccgcgtgatcgagttgaccacaaatttgcttcgatcgctttctcatgcaaaaggtgctgcttggagggttatccgttcgaacggttcaagaggctggtattgtgatatatccgccggctgggtgtcagattctgttctccccccgacagctttcccggctttcccgacggagagtgaggcaccgagatttcaacgaaacatcaagcccgaacatccttggcgaaagtggttggcgatgttggcggagagtaacggcaaggttgatagcgccatcggtttccattcgagaaagatcgaagtcttgaaaggagagggcttattgggaagagaagacgggctgtatggaggatttgctttcgtgagtccttcttctctttttttttcactttaggcttattccttttctttctcactcattttggtttgtgtggctgatccattctttctctcttatattttcttgggggggaataatgtcggcgatttaatagggattcgatggctaaagaaccaaccggatacatccctcttctcttctgtactcttcattcctttcatctctgcatccacacaaacatctttgcacataatcgcacactacacaaaacagaatagacttttttcccctttgctttttgtcttaatcttcgccattcacatacatctcacatgcacaagtccttagctcaattcctagaacgcagaagagaagaatgactggttcgtttctgacaggaatcttgtggtcgatttatttaatgattatgattgttcgttggcggatctacacgaatacacatcctggacgaagattaactctctctcttttcttttctgtgatcggcttacttcttgcatctcggctgaaaggtatgggaagaagttctatcgatttttagagatgaaacgaaaagggattttttttacaaccacgcaactgtactgctacaaaggaatgaacaaacgaacgagaaaagaaagaaagaaacgagaggatttaatccttgaaccctcgctccttgacaccgccgacatccttcttttgcgacacgtccactcccaattccttcgctcgctcctctgcccaatccttagctttggcattgtacttctcctcatactgagcgactgaaaggggtcgttctccatgaggagtgaccctgacgccgtgtctcctggcagggaaaaagtcaaagagagccgagtggttgacgagcctgttatcccagaacacgactgttccctcctcccaggacgctcggacctggtggtcggcgctggagacaaaagtgtcgtagagaagacccaagatcgcgtcgctttccgatttgggaacaccgacgatccgtctggtgaaccctgggttgacaaagattgacttctggccagtcacagggtgtactctgacaataggatggatggtctcaaccggatcccgtcggacatggttaccggccgcttccgatcccttggcttgggcgactccagaatggacggcaaagagggtctcgaggtacgcttggaagcctttggagaaggacgagtacgcggcgagaccactcgagaagatggtatcccctccaacctcgggctgggcgactaatcggagggacgtcaaaccaggtggctgaagttcgtacgtaacgtccgaatgataaagctcgacctttttgaaaacggtgttgtccggtcgcgagttcttgtcggcgtacaccaagtgaatctcgtcgaggtcgccagatttgggaaccgcggtggtagcgtgcttatgaagtcttccaaagtatcgaccgaagtttagctgttggtcaaccgtcaaatccttctgacctcgaacgacaactactccaacctgagcggcgagtagagcgctgttttagaagttggttttattattaccattcaattttgaatacacaacaaatcaaagtcagatttctccgtgatctcaattagcgaaaagaggatagatagagggcagatccttacaaatcgttcttttcctcatcagtcaagctcggaagatctaaacctctgagctcgattcccaacgcaggagtcaagaacttgtgtcccgaggctttctttaagattaggttctccttctttgattttcccagactaggcgcgctcaatccaacgtcgacgtggtcaaactcttcgagaggaggccagttgaccttggggaaagatggcttgaggtggttgaactcatattccgaatcatctgttgaagaaagatgaagagttgccagtagagatagtccgttagaatgatagtatagtcaaaggtgagaaagactagagaaaagaaaagatgggaccgaccttgaccggcgagctcatctccattgtgggtagagaccaaggcgagcgacccatctgtagggtaaaaggcaaggtgatacccatttgagtgaaagaaggaaagaaaagtagacaagaacggatggaacgtacaggcagcagcctcggatgcgatctttgccttcctaggctcttcaaccgtggtacttgatttactgttgaaagggtttacgtaagacattcttaattgattgattgaaagatatggatgtaggaatgtagatgcgaatctagtcgggaatgtgtgtgtgtatggcaagagagaagagagaagacaaaacgagaaccaaagaggaggtttatgtactgggctaagccatacgttcgtgcgatttcgtgctttcaatcatgctctcatctgaatccaccggaggacagcgaagactcggagggaataaacacagatgaggtgaggtagggagattctaactcggtgtttctctactgtcggttggaggtgcgaatgctcataggcacacaaagagaaagaaaaagaagcgtgatgaatcactacaagtctcgtcatcgcctcggtcagccccttctgccggttaaatctccatccagtcagcacgatttgccgacaggtcagtttagatctagtcagttgtgatgcatagtgagcgagacggatggagtgtacacacacacacacaaaaggagaggaagagaaaagaacgaaaagtcgccatttggttgagggaagcacgaattcaggcgggatcggtggattgtctccggcttgcgtctctttctcgctcatctccgacagccttccatctatttgttgctaagtgtccatcttctataccatgatgagtaagatatccttcgtcggatcggcaagcacgaatcatgtgcaaagccttcttagtgtggtcgaggagagtataaacatatgtatactcgtcagataagcaaaacagagagagaaacaaggaaaacgccgcggatgcatgtcgttttctattgcctgtgtatatttctccctctgtataatattcttctttcttctcttttgcttgcaacgatgacacccttagaggtcttaagaatcaaaataccattcaagatatcgtagtgaagagaaccatctcctccgtctttgataacacatcgagtaccattatccgtggaggggacaataagaacacactggacgaaccgacgaacgtcgttcctaaaacgagttgttcgattattaaaccacaaaggaaagtgatgataagcatttgaaagaggcatctaagacgagaaaggaataagccaggtcaaaccttcttcgagtccgaccctgttgcagcacacaaacacaacttccttctgtaagacctcacgctcatctcgctcgctcgtctcttcgagaaagatcccaggcggtggcggcggaggatcgtgtaatggcattagtctgtgggcccaatagtttagggtcgagaacgaaggtccgtccggagaatccttctcatcttcttcttccttatcctctagctccgagcctgtaggtggaggatcagtcggtgccggtggatctagccaatctaatggagagagcggtcgagcgtgcattgttttactaaattttagtcggagtgttccaaaaccatatgacaaaacctgcatatagagatgcacgtactagcagtgaggacaagagtgtcgaccgagtctatcgagagagagcgcaaatcataaagagagttctttgtattaaaaagaaagctatcggcccgcaggatgatcccgatataatcaggctcagatcacttacgtttttgggcgtaccgagagagttcgtatgcatcccacggagagagaaaatctttcgggttgatatctgaagaggaaagagaacatgtcagtggggagacggacaaggatatgaaaaaggccatacatacccatacatatggccaaacaaagtcttcctataggttggggcagatctacaaacgagaatccatcgcctgttcgccatggttataaaaataaaaataaagattagccattatatactctttgaatgcaacccaacataaagctaccagaccgaccaaccttcctgggcccaaaatttgtcggtatcgaacaggaagctcttccgatagttatgtacgatgtcgcccgaagggctgaacactgtggccgagttccagccatttgtgcctgggacagatgaacgttcggggtatcctgcaatcacatacgccctgtttagcatgtgtaaagattcgaatccggtcgtcagccagcaagaacaagatttgggacgattcagaactaaagaagacgtacccgatccttttggcgagtgaccggcagaacagcgctgtaggcccaatccgtggttcctctaagaacggctcgatcgattctgggctagtaaacatatatccggtgaaggcctggagaaaggagagaagaggaagaaacgggtgagtcagaggatcctatgagatgacttgaccgaacagaatgtacgatgtttatctgaccatctcaggaaataccaccaggtctacttgaccaggcttcagacttgagttttgacgataatagagaccagaacgtaggtaagcgtgtgtcggcctgaaacaggttctgatgacgggagaagaaaggagcttacggatcggtcatctctgaggctttgttgaggtttccttgaacgtctctcagctttgggtcatattggacacatgcaactcttaacgggtgctctctgtacgttggagctgatgaggacgccatggcgatgtacactatgaacttctaaaagggtatatctaagtcgagtcaagtccaatctggttgaccaagctaaatgcggatattaaggaagattaagataggtgagtgtatagcctgacgcacgacacgtgtttgtggcggaacccgccggttggttcgagtactattcacctttggtcgtccatttgacacgactcaaactcaagataattcagagatcacgtacgaaccaccgagaggatgaatgatcagatgaacgtgtgtgttttcgtttttaatttctttcttcttctttggacaagaaatgaaagcataaagatatcgcatataatctctgagatctaggctagagagagatgtgatacgtttaaaagatgtattctatacatcctttctggtcagactcggacacgagcgagagagaacgacgctgtaagaaagaacgatggaagcccaggcggaacgatctttaacagtccctccaatatgtctctttatgctctatttctttgccgtctgtcgttatcctcttgtcttgtcatcgttcttgttatccttgttctttccctctcgtgctcgtcttctaccggaacctgttttctcatatcagagattcaccacgttagggttaacgctcgatatcattaagaaatggtcgatcgccgcccgaaaacatgatgagcctagattcggtgatgtcatgaatgatacctttactgcgcacatcaccctgactgcgtaccttgagaatgtttctttcctctttctctctcaaacgcgcctcgcttcagccaaacacgcgattgatgacgtacatgtgtttgagagagaacgcgacggaaagtgcacgcgcacagaggcaccagccagaagaaaagagccctcctgcgacgtcatcgggcggcgggacaaggaacaaagtcagggaccggtcgagtgggcgtgcgtctgatcgtgggcgtgagattggaagattgagtgagagagtacaaaaagttggacgttgaagtcgtctcttcttcttttccttcttcttcctttctctcatacacacatcacatacatatcccacttctctatctcttctttatatattttatagttttatactttatcttctgttttgatagcctgtagccctaacaaagaaaacacaacgcacacaaacacttgatctctaatcaccacatcctttcatcataatgaccgttccccaagccacccagcagatcaccaacaaccccagtcactacgccgtcacctcgcccaccgtcaagaaggatcaggaggctgatgtcgagcgaaagatgaagctctacggagtacgtgtttcgtctttccatctttctactgtcttcatcttcctccgttcgcgcgctcatatttctcttccctttcttccaggtcattcaagcgttccgagatggatcgttcccgtccaactcccagatcgacgctgctttgctcgccacagaaaaggctactccggtcgacatccgaaatctctcgcccagcggaaagaagctcatcaacgacgtccgagacatcattgagaccgcccgacttatgattcttacaaagaactctgacgagcttttccaaaacttcatctaccacacaaagtgagccttgtattcttctactttgtgtccgttctcttcttctattcttcaaccgttgcttatcttttatctgatgctctcaggaaaactgatacgaccaaaggcgcccaggacaaatctgttctccccacctccaagggcgaggttaagaacgaggctgtcgaggccgcctcccaccttcgaacccttctcacccttgtgttaacaaactctgagatgcgaaaggtcatctctgatttgggccttgtcggtcgggatctcttcgcgtccgccgccgttcgaactgctgagaaggtccgaccggatgaggaggagttgaaccaggttgacaaggaggctccttccggacagtgggagggacctggtggcaagaaggttggtcaagaagtctctctgtcttatcctttttggctctattttgactgaccctcttcacgttctcaattcatcagtacggaaccaacgagactcctgtcctcgaggctaacattgctgggcacaaggtcacccacgaccccaaggcccccgtcgctgaaggaacagtccacaccgatcctaacggtaacaagaccaacgccggagaggccgttcagcaggccaagcaggccaagaacgaggcccaggctcagaaggaggacgccaagggccaggccggaggcttgaaggagcaggccaagcaggtcggatctcagaagttcgaggagggtaagcaggcctaccgagaggacggtgtcgagggcgtcaagcagcacggacgaaacatgaagagtgacgctgatgaccgatccaacgatgtatgtcttctttccttcctctcttcctttcggtatcagttggccttctcgcttatcgcaaccctttccactttctccaggacgatgctcaaaaggccaagggaaagtttgccgccttcaaggacaagcttagccctggagatagctcccgagataaggccaaccaacagaaggagaaggttactgacttccttgatgaggaattccctcaggagcgacgagatcaattcatctaccgaatgaagaaggtggttgtcgagtgccagaagcacaacgactacgatgagggtttgtcctgatctatgtgaataagctgcatctactttgattactctgctgacagatctctcctccacatcttaatcagccatctccttcttccttgacaaggctgagacttacaagggacacaccaagagccttaccgagactggtgccgactcaaccggagccgtcgcctctgacccttctttccagcaggcctacggagagatgaagaccttgcttgagcgattcgccgacggagagagcatggaccgaattgtcgacgccgtcaacaacctctacgttgatgcccagaacgatcgggagctcagcgcctggttccgaaagctcgactcttacgtccgaaagtgcctcctcgagcccggatacattctcgaggacgagtccacgcgggagggacagtctctccgagagactggcaaggccttcttcgaccacaaatacaaggcccacaaggacgctttcttcgatgaggtcggaaactggttctccgccatgggtaaagatcctgtcaacgttaggttcggagaggactggaagcgactggtggccgacgtcttgtttgacgaaaacggtcagctcaccttcaagcccgagctctggaacgacattcgacgggagatcctcccttcgttgatcaaccaggtcggatacattcccattccccgaattgagtacaccgataagcaggtcgacttggttattgagaacctcgtcctccagggatcgaacttgttccccaacattgttgagctctcggccaacaactacttcaagttctctccttaccgaggaattcctgacaagagctaccacaagttttccctccacttcagtcaggttcaggctgacatgcgagaggtcggcttctacttcaagaagaagactggtttccctaagctcaaggactcagggttggccgatgtcttgttgagtggtgacggtttgacggtcgatgtcgagcttgagagcgccggctctcgaacagaccacgttttcctcatcaagcacgtcaacgctactgtcgacaccctcaagttctctatccgagattccaagcatgatcttctgtacaagatcatggctcctctcgcccagggtttgatcaagaagacggtcggattggccgtcgagcaggccatcaagactggtttggagtacgtcgacgagcagctcgtcgaggttcgaaaccgaatggatgccgccaaggactctgacagcctgtcccgaaccgatgccctcaaggagatgttccagcgaaagaaggagaaggccgaggtccgaaaggagaaggccaaggagaaggctgacgagaggggttcccagtttgccattgtcacctcccgggacgcctcggtgattcccaacagcaaccctccccactcgaagggtgagaagatctttgagaaggacaagctcgcaaaggccggagagacctggcactcgcctgctttctccatcgctggagagtccgatttgagcggattgcgatcgtcgacctctggttctcacaacaccgcctcacatggaaccaccggttcccacactaccgctgctccttacggaaccactagcagcagtaccgccggcttcaccgctgctccttacggaaccgcggccactggtgcgaccaccaacctgtcttcccagcttggttcttcgaccacccacacgtaccctgtgactcaggctgctcccacccagggtggataccccatcagcggtcagcagcagaagtactaagggcttaccatcgtcctggtcttctctcttctccctcctttctttcttgtctagactgtctgctcgggctgtatcaagatatcccaacgggagagcgaactactttgttgttctcttttctatcgtagtctctcaaacatctgtttctttatatctctgtctggcttgtgttgaattgtctttatcttaatagtccttatttttcctgattgtaatgacgaaaccgttttctgtattgccttcgcttcttataactaaaagtttcttttcttgacctacattttcaattgattcatactcaagcagccaaagcaagaaacatttattgggcaagataagcgaaaaacctgatccagctagagccatcgcgagatttttatctaaatctgttctagccctagtccagcagaaaactcatattagccgagcaaacagcaaaacgtttctgtcgtttaccctctcttgccctatccttgtggtcgtcttcatgctcgttcgagcttagcttacgtacacatgtgatcactgaatttactcgattctttctcttctcagttcaagtctatgaatcgtctgttggtgtatttgttcgtgcacaggtgaatctatctgtccatctatttaccaagctagttagctggctgacttgattagatagagaagtccctggctagattgaaatggagcaggggatgataccaacccatctgtttatgcgtgtttcgcatcaagagattctttcctctttgtcctcgacgatacttctgattctttctactttgttctctatggatttcgttactgtcagacgagttcacttttgtgggtatcgaccatcttgcaggtcgtctaaaagagaattgacggttgtcacaagaaagaagcaagataacaatatagagggggtttcttttatccattaaatacaccaactagaacgttttctattccattctttctctggaaaccggggagaaaaaaaagagggaaaacgcttagtagacgtagccgaggagctttcctccgacgtgctttcgtcgagcctcctcgtggtccatgataccggcagaggtggtgaggatgatcaaaccgaaggatcgagcgggcaaaagctgaagaagaggaagcgacaaattagatgagcccaagacacacacacacacaatgaaagaagaatggagagttaagtctagaagaaccggatgaaaggaaaacataccaagttgacccaggactcgatctcatcaacctgaacgttgaatcggggagagataactccggtcttgttcaatcggccgttaagctcgatgacaatttttccagctcggtgatcatcgacaatctcgaaagcgccgatgtatcctgtaaatacgagaccagcggaagtagatgtcagtatacatggtgacgtgagaaagggcgcaagagaataagaacaagacaagagaaacaaatgaagaaaagaaccagaatggagaaagaaatgtcccaactccaagccaaatgcttgcgagactgaaactttaaaaccaaaaggtatcaagccgccaggcaagcatagacggcaaggggatgtggtgtatggtatgttttgtcgaaaccttaaagaaaggagccagtagggcagatggctagttccaaacagttatggcttcgagtatgtgtaggtgtggctgcccatataaattaggtggaaagaaagaaagagaaaagctccagcacaagaaagaaaggtctcaccgtgctgctgcataacagacaagaatcggacgacaaccttggaggagggtcggatgagcacctatggtatcacagaagatgagtgcgtcagcatagatcgtgtcttctctttggagaacttgagatatcaaacgcgttacgaacctgcctctttcctcgtcgctcggcgttgacgatgttgttcaagcagtcgttaaggacggaaattcggaccatttttgctagtctttaaaggataggggggcggagagaagagaagtttgagcgtccagatgggtgcgccttgctgatagtttttattgtagggaaggacagacgttgggtcaattttggaagcacagtccagataaatcaagtttttcacagtcgaatatagttttttcaacagttcgtttaatgggaggggtttttgattgaaggtgtttgatcacgaccaagaaaccagaacgatcgggaacgtgacaccaaaagcaaaggatcaagaatccgttgggcaaggataagagagcagaagaccgagggggttaataggggttttgatcgataaatttgtcgatggtgcgatttcgaaagataaaatttcagagaggaagagtcaaaccgaaaaaagaaaaaaaaagaaagaaacacatgttctatcagcatacaccctcttctacggacagcatgtctaacataagaggaattcagcataccgagacggccaaaaagaggctgttaaaggtaaaaagggtgagggaagactgagggagatccttggtagttcaaaggaggagaagaaagagaaaaaacttttgcccgggcaggcggccagtgcgggcgacccccgatggggcatcccaaactggggatatcgcttgggggttcatatggggtctaatgacatcctggctgaccccttgtagccatggcaaccgagctgacagttagtatctggtcgaattttcaacagcccctttggcaggctgcgcgagggatggctctgaccaggcgcctaaagctgtgctaaccaagcaaaaaaattcgaatgtggcgtcaatgccctgactgagaggaggctcgtgcggtctcgctttggccaggtcccccccgatacgacaagactcgcttcctcccgtcaaggcaaaccttcagaatcctctcaagtcattcaacatggtgcgttcagaggagcccgtatagagagctcaatagtcgtttctttccaaggccatatccattcccatgctctattcgttccctttctggtatgctcgacatcactacaactgttcatcgctatccgttgctggcaaccgtttgacaagaaaagttgtccaagcgagagaaaaaagagcaattgtcctaatggattgaaggagggagaaaagaggaagagagaatgaagaccgacggcatcacgtagggatggatattagcatgaaatcagggtgtgggtgttattatcatcaggagcaggcagctggagaggatacagaatggggagcatgcttgaatggaaaaggccttgaaaaaaaaagagtctgtcgaccttcagtctttttctgaacttagaaggctaacctatcaatccgggcgcattctcttctgttgtcttctttcgatgggttttgcaacgtttctttcaaacttgtagggacgagtccgcaccaaaaccgtcaagcgagcttcgcgagtgatgatcgagaagttctaccctcgactcactcttgatttccagttcgttcttgttctctttcataagctcgtaactaagggtttggagctgatcacgatcattcgcaaccaccttctatgaatcaacttgtcgctcttcgtacatctgtgaacgtattttcctcgccttcaaccgataaaatcttcaaaccgactacatcaaaaaacctactttgttcactttctcgaaaaaaactaaaaatccaacctacacaacttgcctcctgcagcaccaacaagcgaatcgccgacgaggttgccatcatcccctccaagcgacttcgaaacaagatcgctgggttcactacccacttgatgaagcgaatccagaagggactcgttcgaggtatctccttcaagcttcaggaggaggagcgagagaggaaggatcagtacgttcctgaggtctccgcccttgccgcccctgagctgggtttggaggttgaccccgacaccaaggttcgttaacaagattggaccgtggcattgatgtggtgtatgaactccacaaatcacttgaaatcgtttactgatgcttgtttgtgtcattatttctcttcttcgccatcttgcaggatcttctccgatcccttggcatggactccatcaacgtccaggtctccgctcctatctcttcctacgctgcccccgaggttcgtatttttgtctaccatatcgctccgttttagcttcttgacacgttctcattatatttccgtttcgtctcatcgttctccttatacagcgaggtccccgaggtgccggacgaggtggacgagtcgtccccggagctggccgaaactaagtgttttcttcaaccagggatatttgatgattcgctaggcttgatattacaaccaaaacaccagaagatcgcgaaaccagacagttcagatgacgaaacagaaatagagcagagcatctgttaggttcgattgacacagattgcacagctgatcgagacatgccagtattgtctgcaatagtaacgggaaatggcatgcagtggtaatagaccgatgaacatgggtctaaacgatttaaaacggtacagcgaatgaatggatggggaaacagagagagctatctccatcgtcatgcgacgcttgtgggacgtggacgcttgtctatacagtatagcaagagtccaggtgtctagaacgattataaagagagaaagagagagtgcacgaagggaagagagcccgaatgagaaaagttggggtgagcacgttcgctatggatgatgacgatcagagttcattagggaaaatcatccagttgaaatattgaccatctctcgttactcccgtcctttttcctttcctcttcaaatcgtctctgtttcttctcttatcttgactcacattttcttctatagatcatagagcccttcccgaacctacacccaaatctaaactagatggctctcccagcctctccagccaagcagccctctaagggtgcttcctccgactcggctctcaccggggctgcttccaacaagcccagccctgcatccgagagaaagcctggggataaacctatcgtgttgggaatctgctcaatggatatcaaagcccggtcgaaggcgatgagagagatcttgactagactagtagaaatcgaaggaccaggtctggatatcaagatctttggtgataaagtcattttggatgacggtatgtccggccgtttcttcctctttccttgtcgttcccaacgagtcgactgatttctctctgatctatgatcaaaacatttctgatgattatattccgttggttctcttctctcctgatctttttgaagacatccatcactggcctcagaccgatatccttatttcgttcttctcaaccgactttcctcttcccaaggccattgcctacacccagctttcgacccaaccccctccgatcgtgatcaatgatctaccgatgcaatccgttctttgggaccgtcggctcgtcctcgctattcttgatcacattggggttcctacacccagacgaatggaagtttccagagatggagggcccaaaccggagagagtcgtcaaagagaaagtcaagagggagctcggactcgagttcacagcttgggaagataaggagcagactaagaaggccgacgtgacaaaaggcgaagttgtcagaggaacggatgtctcgctcagagaggatggtgacgcaatcattgtgaatgggcaggtgatggagaaaccattcgtcgagaaggtgagaagcgttcattcgacggacgaacaaactaatctgtgcattatcttgaaaatgcacggttgtgtggggatcctcttggccttgatttaggtctgactgaaaactgagatatgttcctcccctgtccctctcctcttaccagcctgtcaacggagaagatcacaacgtgtacatttattacaaagggggaggaggtcgacgactcttccgaaaggtatatctcttctctcccctctctttcctaattgcgccaatgtggctatcttgactcattgtaatgtcatctgtcgcccatgttgtaggttggcaacaagtcaagtgaatccgatcccacgctcatggcacctcgaacggagggcagttacatctatgaagagttcatcaacgtcgaaaatggtcggtctagatcagcgatctatcggttttgtccgaagaaaggaatctaccgcccctcctgactttccatgctctgttttgtttcgtcttgcctttcatcagcggaggatattaagatctacactgtcggacctcatttctctcatgcagagacccggaagtcgcctgtcgtcgacggtctcgtccgtcgaaacaccgacggaaaggagattcggtttatcacaaagctatcggacgatgagaagtcatatgccagtcgaatctgtgatgcttttggacagatggtttgtggattcgatctgctccggtgcgaagatgaaggcggaaggagtttggtaatcgacgtaaatggatggagttttgttaaaggaaaccaggtgcgcgatcatcgtttctacaattaggattcattctccaaagacaagaaggatattaacgatgttggcgcgttcggggactcctcctggattaggcctattatgatcgagctgccgagattttatctcacgtttgcgaacgggctagaaagcgacgagctgcgctcgccaacttggccttggccgtccctaagtacagaggcttgattcctaacaagacgaatgagccgactggatcgtctagctcgacttcgactcttaaagctagtgtaactggtatgttttgttcctcacagttgaatcttgtcaggaaaaattctggatgtgtgcatgagaacaagtcttgcgaagcaggttctgaacgatatttgaaaactggtttttgctgggtttgtatagtgttccgacactctgacagaacacccaagatgaaatctaaattcaacttcaccgtaggtgaaccttgggccgccccgttcgtctctctcctccgaggctacagggaggagattgttctccgagaatccaagcagcttgatttgatcctcgctgctgctgccgagtcgattgagataggttgtccggaggatgtgatggagaaattggtcaagcttcaggacgttctgcagagaaagaaggagcttgtacgtctttccatcttcctgttctactgcgctgagtctttatgttattacatgattgacaccccgatttacctccttcttttgtcgctgatgcatacgaaatagcctggaaccaaagctcaactgaagcctactttccctaaggacaagtctgcccccaaggtcaaggagaaggatgaccacgacgacgacggttcaacgaccgaaaccgaagatcgaattcgtaaatggatcgctactggagagatgcgtaccaaccaatccgaaggtgatagtgaggtcgagaggttggaatccgttgaggaagaaccttccaacagcggtggttctggccctgggtcagtttcggacaaggcgacggctggaacagccgattccgcagatcaaagctcggtaggcttgacaagaactgtttcgagacagggatccaggagacacaaccctagcttccccgctcctcatggactggagaaagttcagctgggtacgtgctatatttcgtatgctacttgttctcgtcctgtttgctaatagattgtgaatctcatgtggttttattttcctctggctgcatagttgtcaagtggggtggtgaagtatgcatctaccttcgttgttcgcatgtgcgagtataggaactaaccagctcttctttgtctagtctactcatgcagctcgataccaatccaaggatctaggagaaaatatgaagaaggtcagatagctttctatgtgtaggcggactcattttcaagcaactaactcatctgcttctctatcacttcatgatgacaataggatatcaaaatcatgaacagcagtattttgaagaatgtcaaggtttgtgataatatttccgtcaccgaaatcgattcggcagtgttatcactaatgctgttggtaagcgggcgtttatactcatcttatagatatacacaagttccgaacggagagttatcaacaccgccgatatctttgctcgagctcttcttgacaaagaaaacatccctcccgagtcgagtcgattcttggagcggccgcctctggtggatcacttgattcagcgacgagatttgctcgatgattcgaatgcggccaagagcttaatggatggtatgtaattcacctcattcgatgtgaatccgactaaggattgagtggcttatttgatatgaattaaccatggggacacggtcaggtgtcaagaagaaattgaaaattcttcttcgaccaggagagagcgaccgaagacccggtctgtactggcccaaagagctcaagaaagagcctgttcaagtcgttagagtgagtcgctacctatcatgcgacagctagctctctcgacgtttcactgaatatataatccacgcataccatgtttacaggaagttgtagagatgatgaccgacttgagagccacattgttggccaatttccagaatcaagatgtggataaaattcaatctagatggtctgtcttctcattgagcttcataactaacttaggcgtcggaaatggactcattggaaattactctccttcggtcatgctctatatgtaatgtggggcctggcaggtgctcaggagatagccctagcctcttcaaggagcgatgggagaagctattcgaggactgggtggtaagtaatggggtttttctttcgtctttcgtctttcgtctttcgtctaaaattgattgttgctactggctgacaacgtaaacatctatgctgtcatatagggagtcaagcaggaaaaggttcgtacgcaggtttagagtagtagaagggtttgtatgctgatataagtctcttgtttctaaaaccaaataacagtttgatccttcaagggtaaggcatcttctttggtagatgtcatcgtctgtatcggagcccccaagctaaacaacgctcttgtcttctccaggtctccgagctttatgactctctcaaggtgcgcacaggaatgtctgtctgattggattcacagacgttaacatagaacacatcgctcttcacagtacgactctcttcacaaccgagtcttcctcttcgcaatctttgatcctcagtgcggtaaagacctcaatgcccctcaggatcgaaaactgcacgagctcgtagatcgggcgaagctcctatttgatctggttgctcctcaggaatatggtgtatgttcctactatttcagaggtctctatagttaacacggtctgaaattgacgccattacacttttgtgtacatctaactcagattgaacctgaggagaaagaagagatcggaatcttgacttccttacctttgcttaagaaagtcatccaggtgtgtgcatcacagttcttgactaccaagcgacttagtcatgcgatactaattgccttcgcttctgtgatataggatctggaacacgccaaagcgagtgacgagtcacatgcttctttctacttcactaaggagagccatatctatacattctgcaaccttgtccttgctgctggtcttcccatggacaagaagaaaaagattccagaactcgactatggtaagatgccaaagtccgcccctcgtgcatcaatattagcgctgatctaagctctactatctgtccacattacgaagcttcgcacatcacgtttgagctttacgagcgatcttatcccgaggagcagcgaaaggacttttcgctcagtatcgcaatctctgagggtgctcattcacctgcagtgttggactcttcggtcgacgcgagacactccctgaatgttcaagctcgaaagaagcttacttcgtaagtgatcatcttgctgtttccatcccagtcgtttttaagttataagtatcactaaataaccatcgtatgatccttctctgtctctttcatttaattatataaagtcacatcccttacgagcaggctatgactgctttgaagcgatacgagggcaaagccatccaccagaacttgagcttctcgaccacccctcttgaggtttgttctttacagtctactttgtgtttgaagaagatgaatactcaacttggtgactctcttgtgatctggttagggtgaggccatctactttgatagagatgtgaaggatgaactcgttctccctctttcctcttctagatatggagaggtcccgtcgagtgcttctagcgatagggctagtgatacatggtgatagacatagtatttatgagcatatagacctactctttggtggctcttgtcttccccagtttttctatctgtggcattatgtcccgtcttgtcaagaaattttctttccctcttttggtatcctgttactatgttcttctgaaatttcaatacatagatcaaatgtgtttatttccttcttattgtcctgatactcatattactgtatcgggctgtgaatgattgatagagcgcccacaacccttggacaaacaatcttgggaacgcttgtcatgtatcaacatttccgatcactttctcaagccatccctcttccaaaaggaaaccacttcgagtcgttcaagtacttctctacttctacccgatccccccatttaccttccatttcgcggacgaacgcgcagttcagatcatccgattcttcagccgttttgggtaaaggcatcagcccgttttggtctcttgttcgaccgggaccgatctcaccccgatcatgtttctctctgtagtccgtttgggtcttcaatttgatatcgagtccggcctcccagatgttattcatccctccatgggtatgaattctggcttggggggcagggacattcttgatcatccatgtctgtaagaagaaaagagtgttccgtgagtaagataagtcagtgctcaatagttcgattcaacaagtggcgagccaaggcaaagggggagagtcgggttaacaactcgaaaagaggtgtatggtaatcgactgacagaaaaagtctgcatgtcgttcgcttgactttcaagatcaagagttggcccgtttgccgtctaatcataaccaagggaagtagcacgcaagacatcaaatagatgatgaagagaaggaaggtaaatcaggacaattcattctggacagagatcgataataacagggaaaaaactgacgaagcttgctctaatcttcgctaattcagcctgcttaaatttctccatctctgctgctgccgccctgggaaaacaaaggcataaaagatgatatatatagatgagcctcctatttctcttctttcaaccagacaagtcaaattggtacatactttctttcaacggtctccttctccagaatgtgacttgttattgatgcggtcgttgcctgcaaagagatacaaacactattatcagttatgagaatggagacaacgtcaattcaccgctttgacttaagtataaaggaccaaccttctcgaccgctggttttaggagcgatgaatagaaactagcatccaatacaccgggttccttcttcgtcattccccctccacctgtcttttttcctgtcggacctcctttcgagcccgtcggcccacttggtcgtcctcctgcaggcgaagatcccgatgtcccggctacaggcgaggacactgccgagtttgatgatgaacctccgatcctttttaggttggttacgcgatctttctttgacgagcttgacgcaggttgagaggttgaggttgacgagccaagtttcttagttgccgttgttgaagaggaagaagacgcagagccttcaacctgtgttgatggatgcgcggatttcaatttcttgctcggcctgtctactgtgtctacacctttgtctgtacttgggtttgttgagttgctgggatcatccttgtcgtgggtcgtcgttttgagcggcaccgaagagatttcgccggataaagtcgaagttgcatgctcaatcttgtcttcggcggcccttttgctcttttttgttgattttctcctcgagccatagtcatcatcgtcggtaccgtcctcatgatcattatgggtgtcgtcg

SEQ ID NO: 1531 - DNA, 8752 bp, Xanthophyllomyces dendrorhous
ttatgggtgtcgtcgtggttctggttcaagctattttcatttccgtcgtcgtcgtcgtcgtcgtcgtcgtcgtcgtcgtccgaagagaagtgagtcgttcttgacctgatatgcttcttcctgttcttcaattcagctacttcatcttcttccatctgatctttctctcttctcctcttcttcttctcttcagactcctttgatagttctgatacagatgcatctggttttggcgtcgaggctttcggttgaagtttagtcggtttaatgttgaatggcgatcgtccgttttgagcagaatgaggttgatgaaggatggtgacatgcgttttcgtggctgaagatttcttctcaagtgatgcggatgagactaaaagttctttggaagagggatcttgatgaaaggggttgttaaagaggggaaatcgataacatcatcttgagccaatgaccaagagaaagggagaattcttagaacaagaaacatatctacaaacctcgtgtcgagcctctagagttttcgccgtttcttccgacatgcctcttcttctccttctcttcgaggagatttccttttttcgtcaagctttggctatgaggggactttgttggtgaagcagccgatccggcagaactcagaggagaagaactgcccgtgtatgcatgtttcgcttgaggtgtatatcgagaccttgatgaatgagctgctgattcaggttcagtcgaaggctttcagaacaatcgaatcatgacgtatttcatagtgtcagctacacgtttcgatacaataatcactgatggacacatatgattgagaaagaagagaaagagactgggccgagtcgaagtcttgggaataagaagggagaagaatagaaaaaggccctcaccaaatccgttagctccatccataaggatccgtcctcttctgttcctgactgaattcttaatggtgtatccttgactctttctcctctggagtccacctcgaaccattcggattgtccgctctgagtgttccgaacggagatagcatcgacactgggatggtttctaaacgacaaggtggttactttgatctgactcggcctagggtgttttccagtagtggtggccgagaaggacgacgatgatgcttgtcgtttaggtgatgaatcagcttttgaacgttccggacgagatctaacactggcagtacgagccgaagaacgagagccggccaggtgagagctcattctgtgtgtgttgagtatgttatgttttgacgatgttgtagaatgaatgtgaggaagaacggtagaaaggaatttgtcttacgtaagggtggcctcttcggacatctccgcggtaacggcatcgaacgttgttagaaggaagagcagacagaaaagatgagaagaagatcacatacaccgcccataaccacacacagaagtagaactgcagaaagagcattgattggtgtgtatctaaaacagagacgccatatagttgaaatacattctagatacaatttttatagttgaatacaatccgagagacgagaggagattgtgaaggaaccgtcttgagaacacggaaaagaaagaagaacgccggttaagaagaagaaatcaacacacaggggtgagaagcgagagacttgggaagagaaaatgagagaaaagcagggaataggagagaagaacccctaaaacagaaatgggagaataaaaaagatgcacgtgaagaccttccctccttctaaacggatttttttctatcctctaagcgttctggaaaaatggacggaagattgcatccggctctttgaacgcattgtgaacgacgttcacaaggtagtaggtgtccatgatctcaccaagcaatgactttgtcggcgaatcatcatcgtacagacctgcccattgtttgccgatcgagaaggcctcgtccttccacgcgatgaacgagattctgtatgtgttaaaaaaccgtcaagtaagtgaatttacaaacgagaatgcttgtagggtacaaaagatacacatacgcttcaacgatactaagtaattaaaatggtggtagaagaggtcaagttaattattagcccagtgttcaacattggtaccgtgttcagttgaccaaaaactcacgtaggctgaatgatctcttttccagggaacacaccccaggtgacggcgtttggtccctcactgtgggtgttggttcgaagatcaccctggtggtttacctgtttagttaggcaaaagcaagatccaacgaaggatatgaggacaagcgcgcgatacacgggtggatatcctgatacgtacagcgtagtaggtgatatgagggtctcgctcgattcgatgaacaagagcatcaagctgagatggcgagacaaagaactcgaggtaggccttttggtagacgtatccatttgtgggaccccatccgtgagtcttatcgtccgacttggcaccgtccacactatcatgtcaagagcaagaagggcttgaattcagcaaacaaaaacaaacacaatgatgtacagtcactgagacggatagagatactcacgcaggctgactgttaatagtgaggaagccaagctcattcatctttgccaactgtcggttgataatcgacgtctctttggacgcagctgaatctgaccacggaagcgatggctaaagaagagacagcaccatggctgtgagctattgctgatctggctgaataaagatagcatcaatggagtatacttaccaactcgttcatgcaaaacttagcaaacaactcgcaaacatcctgtaccgtctgcggctgaccccatagcttgatagcctcctcccgactaagtttgaactgaggcaacagatatctatggagcagaaacataagtggacggatacccagtttaatacaatgcgaggcgcgaatgttttcaaagaaaagggataatcaaagttccgaaaatacactaacccgtcaaactctccgtaggcaggcgatcgagaatctccccatcggccgttagggaactcgtcccagttctcggctttgaaaagaataggccgaacagcatgtcagtctatgcgtataaaggcaagaaacgcaaccaagaatacgtttgaaggaacgccgacaaaatacctacttcgagaaaggtaagatttttgcctgttggcccagaactaaaagcaggaaaatgacaaatggcgacaatttgagcatctgaatgcatatgagggagctcccttgaacatcaggagtgtaaagagggaacgaacaatcggtcgaatagtttcttgtcgtcgggcaggcgtaagcgactgaaagggccgtgggtaacggcaaatgagaaagtcatgcgttgagtaaatactgagagataaaagggataatataaaaaggcattaccggcgtccaaggcaaagggtttgtgtttgccactctagcaacaaggccaatctcctccaacagcattctcgctccgaccgcgaggttgagggtgtaaatgtggagacctttgattccaacatcggcgtcgaggatatcccggcacatctgagcaacgagcttagtgccgacggctcggactgccgagtcatcgtccttgacaggctcgagggcttcggtaaagtgggcgggcacagaaatattttctcggtagacccactttttgaatgttgcatacgactgaatcggcatgatacctaaggataccgaccaacatatcagtttgatttcaaaagaagcagaagcgggtgcgcacgtgcacgttaagcgaatgaaagaaggaaaaagacatggacacccaccaggcacaatgggcacggtgattccggcctttctgactctgcgcacccaggcgataaacatctcgacgtcgtagaacatctgggtgaagataaagtccgctccagcatcgaccttttctttgagccactcgatctcctgctccttctcctcttcgcttggtccagtctctgggtgagatcctgggaaggcagcaaccgagatacagaacgcatcaccatgttcctgtcggatgtatcgaacaagctcggcagcagtcttgaatccggtaggtacaggttcccaaacctgagatccggcaggagggtctcctctgagcgcaaggatgttttgacagccgaacgccttggcggtctgtttcacgtttggatcgagaacggcgttagccgactatatatgaagagcaatgatgagaacagctgtgcagccttacgttcaaagcttcatcaagcttttctttctcgactgtatgcgtaagataagaaggaaagagagtgaagaagaaagaaaaaactgtcagtcttgggagctcctgatcgagacagtcgggtaaggctagccgaaacgaaccacaagtgatgtgcatgacagtttccattccaatatgactctggcagacctggacgagagacgtcgtcagatctgagcttcttcctccagcgttcctgttgttaagagagtaagggaagaagagagagaagaacaaatgacttttcaatccccgacagttgaccgaagtgaacgtatatgagtgaaactagaccgaccatgtgatatcgaggaattctgggccgagacctttcatgcgctctatccgatcatacaagttctgaagtccctgggctgtccgaggaggaaagaactcgaatgaccacctgttttaaagaagaaaccgaggaaagaggacaagacagaaagaaaaaaagaacaaagaggagaaaacgccgattcgcgtatgaacatctagaaacgatggttcgaactcgacgtggttttggacgcaagcacgagcactcaccatgtcctgttttccttctctgcctgagcgatcttttcggtgacctttgtcattggacgtatagatatatatgtatgtgtgtatgcgagcgggtgttgagtatacaaagaagagcaaacaacggccgaagagatgagtagggaaaaaaagagttaactctcgatcggatcaattccaaattcctccacagctcaaggcgataaggtggtgccatccgagtgagcagagggcatgtggccgcgcgggtatatgtgtacgtaatcaacactgccacaacgtgcacgtgtctgttcgcgtcacgtgtgttggcacgtgacgcttgcaccgcaatcacacttactcgtccccacgtaaccgccacgtaatcgtccgctcttgcttcgcccgccgctttctatcaactcaccttctctatcgacgacaacaccgacaacttgaacaatgcctgtagaaacagagtgtcagttggatatcgtatagtatcaatgcatattcctgccggctactgattatttttgtcaagctccaataaaacagactacgatatcctcgaggtcactcctgaaggtaagcaagatgctcacctctcctaacgcgcgcatttgtttaatctaaattccttccttgcttcattcatttcccgctcttgtccagcgaccgacaccgagctcaagaaagcgtatcgaaagcttgctatcaaggtaggcatcatggatattccctcgaaaaaagctggcttgcttctttctcacctgactcttcgatcaacaatcctcttcccgctagtttcatcctggtatgtttgctcaaaagtatgtcttgggcacagcccgtcggatcgcctaacaccactctgcattcatctcctcgcccttgttcgttcagacaagaactcatcttctgatgccgagacaaagttcaaggaggtcggagaagcctatcagatcctgtctgacccagatcttcgagcaaattatgacaagtacggaaagaagcaactggtgcgttttctctttccttctcatttatctcaatcctgtatatcataattttgataacactatttctcattcttcctctcattttatcaacagggacaaccggacggaggcatgcaggacccatctgagctctttggatctcttttcggaggcgaacgttttatggacctcatcggagagattagcttgatcaaggacttcatgggtcaggccgaagtcatgatgtatgtctagcgtttttttcttatttattatccaacagatggcctcaattaattcgactgaacaatacccttgctccaggtcttcagaagaacgggctcaaatggaagccgagatgtctgggggagcagctcccaagcctgccgcctcgacttctgcggcagataccgctacttcggcggataccacgaccacccatccgtcaaccgagacgactgaaccaacccctaccttcgtgcccacatcgaatccggctgcgccaagcaacaatattccatctcctgccacccagtctcttcaacatcacctttcctccagctctggctctccagctgctccgtcttcgacgtctgcggctgctacaggaaccagcacgcctcccacgggcgattctttcaagaagagcaagaagcccacggtcactcccgagcagcagaagaagctggcagagatggaagaggcaaaggaaaaggccagggtcgagcgagtcgagctattgcaaaagaagttgatcgaccgaattagaccgttcgttaatgctaagaagccgggcgataaagacgatgaagaaacccgaaagtttatagaatccatgagaacagaggccgaagatctcaagttagagagctttggagttgaggtcggtcttcctttttccatattgtctcctcgactacaagggttacacgaccttttggaacagaactctgatagctatttttcctttccattgtatcaaaatggaatgagaacagctccttcatacgataggtaatatctatactaccaaagcaaccactttccttaagtccaaacgattcttcggtggcggattcttttctcggataaaagagaagggcagtctcgtcaaagagggttggggtgtgttgggtagcgcgatggacgtacaggccgcaatggaggagatggagaagcaacaggagaaccagactttgggtgaggaagagctagaggcgcttgcaaaggatgtcacttccaaggtatcgtcttgctttctcttcacatctgtctgcccagcgttctcatcgttgaaatgtgagatttatcggtttgcatcatttttttttcttgccttttccttcccatgaagatcttgttgactacatggcgaggaacgaagttcgaagttattcaggtcctttccgaagtgctcgacggtgtgctcaccaagaaatctggtgtttctgatgagaccctcattattcgggccaaagcaatcatcaccgtcggcgctgtattcaaagccacggaacctgacgagtcggatgaagaacgtcgagagctcgagaggtcagccttctttttctcttctgttcttctcttgttctttcccatcactatgctaatctctagaattccaatcaacttcttgtactctctcttgccttccttaggctagtcgcccaagcagcattgccttccaagaagaggaaagaagctgaaaagaaggaagcccgtctacacgccgagaaggcttgcccttctaaatcgactggtcctgctacctccacctatacaccatcaacatcttccacctccggctttgcctcttctacctacactgcaacggtaacgtcaacggcagaaggatcatcgaccaccacactagacgctcaagttgagcgagagaaggagaagataaaggaagagcgaagacggactggtggtttcggtttctgggggaaaaagtctgcttctcattcagaatcaggagacaaagaggccaagctctaatgttgaaggagaagagcactgctgcttccttctattttcttattctgtatgtctgtggatcatttctttaagaacattttcaagtccgtatataattcttatggctttcattcttaagtcaccaagaggggcaagtgccatgagagtaagactgtagaagaataacgtatgagatacattgagaatgaaagagttatgatgtattaagagggaggtataaccttttttctctttgctttgtcttcttattgatagaatccttatctatcgttaccaacaaagagaacgagaaggaagacatgctcgataaaatgcaagagttcaagaaattatatgaggtgtgtgtaaatggatgatggatggaagaaagtgaaggaaggaagaacaagaagaagaagaagagaaaagagatggggtatcgaaacgaggaagaagaaagggaagcaccagcaatagtgataatgacaacaattaaaaaagagaattggaaacggagccaaaaagaagggaagatgaaccaatcatcttttatattattaaaacaagccatcactcccgaaagcagccttcaagccaaaaggcaggtttgcagaaaaaggactcgattgaacagccgaacaagcgaattggtgtttcgtcctatacaactcgagtacgcccacataatggcaataaatggcgaggacaatgaaccaatgccagatgttgtgactcgcgcctacgaagtcaaatcgctttcaaaagtaaaagagaaattcatcaacagttggttagtattctccaccatccgacccagagaaaagagagggaagaaactcacccctggccatcgaacttccggataatgattcgcatagaaccataggcccgctagataactgccaatcatcggtgtcaatggtttgatgaatttgcctgtttgggcaagtccatggatgagagacatatgtgc

SEQ ID NO: 1532 - DNA, 784 bp, Xanthophyllomyces dendrorhous
agagagagaaatgaatataagtcaaccaaacagcaaggttgattgtggctacagaagacgcaccttgttcttgcgctcattgaaccattgcataaacggtaatgtagatccagcaatctatgacaaagattcaaagcttgtgagaaaagagatccaagacatggtgaaaaaggaagaagactgctcactccaactccgaaagttacaagtccatagaaaaccatcggtccaggctgacaatagaagccaaagtagacctagaagcgtactttgatcaatatcctttgctcacccaaggagtcggatccgacatgcatgtaataactgaggtactgacgactgtattgacgcttgcagcgatgagccaggctattccgaagtaatcctatcgggttcatcaataccagaaggaatagtttgtaatttcaatctccattcctaagaggttttcatgcataagcaggtaaatacgcacgacacaggcaaaggtaatgaagtatcgtttggttgcacaacctgcgaataagtgccaaattgacgaacagaataagcactgacaaggatgaagagaaatttgtcaattgatatggtagcaccaatagcaaagtaagctctctcaaatcagaggtatgatagatagcgatacgtactttgaaagcggccaggaggaagaagcagagaacggcggtgtccataaaagaggaggatgaggcggactcgatcgccgtgaacggcgaggagacaaagatcacgtagggaatgcagagcagaacaagtaaagaag

SEQ ID NO: 1533 - DNA, 13115 bp, Xanthophyllomyces dendrorhous
aagtgcgaatgaatgttaactagttaattcataaaagagaaaaggggatcagcgcatgcctgaaaaaataaagaggtccacaggaaagggtggctacgtaccagtctcgttatgacatgtaaacaaactcttgaaaagcttcggccattggtctataggaatgaaccgatatcctgtgagaacaaattcgttattctgccagaggataggaaggtcatcgaatccaatgagcccattatgggcctcagccgcccgctggacggccatttctacggtgacttcgataacttccacttttgtgaggatcacctcgtcctcaaaatcgaggtccatatcgtcttcgccgtcatctcttcctttctccgacatggccctttcgctctctgctctcgaaactgactctgtggtccctcgcctagtaagttttcccttggatacaattgcttcaagctctcggtacctgttggacgttcggttagggaatgccgggaagacaagcccggattcatcatcttggtcggtctgggagatatggttgtcgtcgggaaggatagagtcgagcaaagtaagcacttgttgagcgcctatacctaatggggacgttggagaaaaagagagatccggtagccgagaagagaaagagctggaagagggcaacattgggacagatgcgtgaagatagtctagtctggaaggtaagcttgaaagaaaacttgtcagaggctgacggacgtggttggcagtggttgaagacggttgttgcagcggagtcaggtcgcgcaactggagaggagagtaatgctggaggctagggagaagtcggagagcttcttcccgaagaaactttacgtggtgtagtaggacctctgggctaatcatcgaagaagctgatcctgttcgactatgggtcttgaagaagcttggctcgtcttctgggtgatgagcatcgacatcacccataatggtgacataagtgacaagcctgcgctccagttcaccgatgtgggagagtagacttgatcggagagacgagtaggtcaggtgagacggaacggtcggcaggtcgaggtcgagagcctgaatgttaggcaaatggtatcctgtggacaaagttggaaagtatgaaaacaggccggactgaattcaaaagaagtgaaagcaacgataggttagcttaacgacggtcagttctcgttcggttgatccgggttatccccagcatttctatgggtgataaaaagggactggacaagaactcacggctgtatccgaccaagccgccgactctgactgtcctctccttcggcttttcggtctgactggttcctgaaaagtgcttgacggaagattggaggcttcgggaagagttagaggagaaggagacacgcgagaagaggttgcaaaaggagtagaggtagaaaaagaggatgcgaatggatcggactctgattctctctctgtctctaccggtgatttatcttgtgaagataatggtgatggcgatgatgatactgatacagacatgtctgtggaagagtttgaagataccgatgagctcatagaggaggaggaagagctgctagcagataccccaaacagtctagaggttggaggtcgcactgggttttaggttgaagttgatggttgttagttgatggttgttggctcatcattcgtccaaccagagttttcgtttcgtttcgtcatcgaccatcaacaacacccatccgacaacatcataaactcatggagtattcttcactattaaggtccatctggcgagatgttagatcagaggactcccctgcgcttgctctctcattgtcgttcgccatcatcgtggccctctttcgttttcgaaatactcccaacatcgtgctcgccttgagcttactctctcgttcgtactgtctgattactgagtatgttttgtgccaagggtgacgcttacctctgccttctacttcacagtgaccgaagcccttctatgctccaatccttcgttcatagaccttaccgacttcccaactgtcgttccctatctccttccgaaggcacacagagtagcctggcttctcctcttcgtcgccgcgcccgcactggttcagtcggtccttggcctggtaagcgtcgccttttgcctctctgtttcatcccatctcttctctcttcgtttctcttcccaaccgatcgaggcgctcagtcatagatggagcagtattttcatcatgcttgaaactgacaagtgttatttcttattgatcaccgaaattacgactcgaactataaaggcacttctcatccgctcaacttggcgttcgttcggtagtctagctcaggtgagggttcgagccgaacagattcgatcaaataaatcatcctcctcatccacaagatcgacagaccaagatcatgtatcgagaagggagaagaagatgaaggtgaaagagctatgataagtattgaatcaattttcatcaaatatcatgaacaaatctgtccagtcgagatcaccgaccaatacgacttttgaggggttttcttcgtgatttctggaagagaaatacgagccagctctacaaatagtgtagagagaaaagacctaagcaaaacaatgtttccttcgggtagaaaagagagtccatccaaaagaaaaaaagaagaagaaaaaaaaacaaggagagagaaaggagaagcagatgatatgactacaacggagatgtttaaaaagttcaaagatatagaaagaaagaaatcagacactcccgctcgatcactatgcgtgccatccagcgcctgttcgagagggcatcattcccatcatgaaaccactctgtgttccaaaaccttgcccctgcgcttgaccttgcatctgcatctgcatctgcccctgacccatcgttgatgttgactgtccggataacccattgacaaactgaccttgactctggctctgggtttgattcagacctggactctggctcatcatactcgatccattcattccgtttgagagagagtatgagctagtcgatgaagggcctggctgttgctgttgaaaagagaacccggttgatgagttgaacaatccatatgccgactgttgctgtccttgtatttgtgactgttgctgctgttgaagttgaatattcgggtactggccactttccatcccggttggaaacgaaccttggcttccatacgagccaccagttgacaaggagtcatagacagaggatgatgaaggtgtgggctgagactgagcgtactgattcgagaaaaactcagtagggccgttgccagtcgatcggaggtcaaaccaccccccataagattggtaagaagactgaggaggtacagcttgaggctgagactggaacgaaagctgttgttgctgctgcagttggggattctgaggagatggaaatgactgtagacctgggttctgactcccttgttgaggagctgtatactgaaaggatggttgggtgacatattggagaggtggctgtatctggtatgaagactgttgctgctgctgaaaagccgaaggaacagcatactgcagaggctggctagtcaatgaagatgtcgttccttgagttggtgctactctaccacgtctcataggttctaccccacctggatggccaacaccttgtccgtttgctggccggtgttctagcatgcttccaaataccggggcctttgctgagtctttagtcgtcatagagctcgacggcgcttgtgaaggtgttcgaacaggaagtggaggcggtgacagttcatccgcgtcgttttgatgagcgcggctcgatggatgagccgcatagagggatgatgaggaagccacagggacaggagacgattgggccggattatggcgaaaggctgcctgaacgatcgatgactttgatagtgaggtatcgtactttcggcggatatatcttgtgatgtgtatggtagataaagcatgttagcttgcatcatgagcatcactatcggtacacggaattacgtacctctcaagctcgttatccctctctccatgttcgagattggtagggggaggatttcgagaatcatcgttattgatcttcaagtttgacttgatgttgccgatatctcttattgtatcaacttgttctctggtgaacgtgctattcgagggacagggcgattgatgggatgcgttagccacaaaacaaacactctctctcttttttgaaaggcagagatgattgcttactccaatgttaaacttttgactctactgatgtgcgtctgtaagtccacggacaggagaacgatagaagcatattaggacgagcgagcgagcacatttcatctagccagcctcaaaccgtctcagaggaaaagagagtatggtataaacacgactagacttacgcccatctttcggtgcacgctcgcacagctcacacaaagaaagattcctaagttccaagagcaccatctcggagctggagatctacagtctgcacatatgtcgttctgagcatgcgagtaggcagatgagtgtattggtcagaatacatgtggattcaagatgataattattgggcatagtgagatagagggaaacgacggatgtcaagacaaaactcacgccaggcagcttggatagctcgaccaggagtcgttcgtttcttgtttttgaggccgacattgatgagatgagaagacaattggatgccagtggtgctgatgaagatgttgctagctgttgtcgctaccttgttcttcttcctcttcttcgtcgtcgtcgtcgtcggtgatgtaagcaaaagaagggagaaaaacatttggtccttaacactcgaccatcatcaacaacgaaagaccaacgagtccataatcctcgttatcttctcctctcccttctctttctcatacactcacgcacacatacaggaatgaactcgactgggtttcagggtgaagtagtccctccgttgggcctcgagcatgtgttttcctggctcactcttgcctcaacccacctgcaagccgcgttcacttcgtcagtagagtgcccttgttttgcttttccttgatccccttcctctttctctttcctcttttggttcttcatctccttgtcctcttcggccatccgctgattcataaaactgattatacattctgactcggctacagcattccgggctcggcgatcattgtgcgatacgtaaaaaactcccatcagaacgatccgtggaggacgctgctcgaactttgtctatttgcctttgcggtcaggaccgtcctgagttcacgcacccgaacggatcgaagtccaaagaactttgtcgagctcaccgataaggttggccatatcctttttcttcactgaagaatctgtggggtgtattgcgcaaacagctgattctcttctgaacggcaacaatcttaggaaatcgatgaactcgtcgtcgactggactccagaacctttggtggttgagcagcctccgacgtcaccagatgctaatctgctcggtactctgcccgttattctcggcagtgtaggacccagagtcaagctcgcatcaaacccgaacaagagtgtgatcaacatgacgagctacaactttactggcatggcagaaaacgaaaagatgaaggaaaccgcgctgacgacgcttcgcgactatggtgtcggtagttgcggtccccccggtttctggggtaccaacggttcgttctgctttcatcttttcctcctgtctttgggatacaagtgcgttcctagaaaaaggcaaatatgaaccaattactcatcaacctccccttttctcgttttagatgttcataccgctctcgaacaggatctggccgccttccttcaacttccatcggcaattatctacgctcaggctttcacatgcatcacatcggttatcccttcattcgctaaacgaggagacatcatcgtggccgatcgagcttgtaactttgctatccagcgaggacttcaaatctcgagaagcaccatccgattctacgaacacggagatatgagctcacttgaacaggttcttgagagtgtcaccagggaagccgcgaggaaaaagtctaagctgactagacggttcatcgtcacagagggtttgttcgaaaacgatggatttatcagtgatctggagaaattggtgtgtgaagctttcagttatgaacagcacttatatttccttactcatgataacatttctgtccaaatcaggtcgagctcaagaacaagtacaagtttagactgattttggacgagtcgtactcttttggaaccttgggtgacaccggacgtggcttgactgaactttgcggagtccctgtaaggatgattcgctctttttccgcttctctttttgcatttgctgacagaagttctactttcttgattaatctgctttggaaacactcgtactataaaaaggccaaggaggtagacatgctgatcggttcaatggcaaacactttaggagccggtggtggtttttgtgcaggatctaccgtggttaccgggcatcaggtgagacttttcattcattgaatcgatttttttttctttacattaatcgctgttcctccatcctttagcgtatcaattcggctgccttcgtcttctcggcctcgttacctccgatgatcgctacgaccgcttcgaccgcgatccggattcttcaatcaagtcctcaactatttgttacccttcgtcaacacggcaaacttcttcgccttacactcgacaaactagaaggaatccatatcccttctcatgcgctctctccacttgttcatgtccagctgtcaggaccggctccagttgatatggcaggtattgaacgtgaggagattatccttcaggagattgtcgaagaagctcttaatgctagcggaatcttgttgacgaggacgagaagattaagaggtcaggaaactttcgaggcgagaccgagcatcaagatagcattgagtagctcgttgacaaagaaggatatggacaaagccgtgggtggaatcaaggcagccatcgtaaaggttttgggtaagaagcgatgatccttttttccctcctttcccgaatatttcttttctttctttttacgatcttctcttcgatccaacgcatcttgtcagataaagtcttctctctattgtctacttcagatcctccattattcgaaacatacttaatatccttttaatcagcttcatttcacaatctgttgtttctcctcttctaccttcgagcatcttatctcctctttgctcctttttttcttttccttttcaaaacttgaattggtttatgtcaacatcgatattgacgtggtgtgatgggttatttacacctcatacctaggtcagattttgaaagtcggttagttgacagcaagaaaagtaaggagcatatcgaatatatatgtctacagaacagatgaaagcgctactactaagtatcaattgaaaaaggtagaaagggcgagaaagagagggtagaagggtagaagcaaatctatgcaagtctatgagaggatttaatggtttttgagaagtgtacggatgattaataggagtcgtaagatgctgtgctggatatatgacgaccgaaaagctgttagaccaagaaagaaagaaagaaagaaagaaagaaagaaagaaagataggaggaagagatggaatgtaggatgaggtaaaagattgtcaggttcaaatatcgattttgtcaagattaacacttctgccactgttgattatcagagatttaacatatcaaatgattagctctcgcagactcctagctagatgaggaagtaaagaataaagaaagaagggataagggatgaaatggtcaaagagacgtaccatcttgaggttcttcacggccaagcctcgttccttgggatcagaaggccaggttgggtaccaagtactcgtagcgttgtagaactatagacccaattccaatgtatttggtcagatctttgcatacatcagaggagaagaatgcgaaaaacagggaaaactccttacgtcataaggagctgtgagagaggtatcaatccaaggtttgtctccttcactatcagggaaccagccactcgttccaccaacagccacctcgattactaagtagaaagctatgtagaaggtagatagggtgatgaaaaaaggcgaccatcagctcatagtagggaagacaagaacaagttatgaaaccccaacgtacctcgatcgaaaggagcagagttgttgttactcttcgcccaagggttcgtcaccgttacatctgtcgaatcgttcttgaccacactggggtactgagctctatcccagaagctctcactggatagatcgtaatggattgtctgctggacccgagaatcgacgtctgcataaagcgacgcgagcgcggatagagataagatagaaaagcagagcaatgagtggctgaaggaaggatgtagaagagggtccatcgaaagtatggaggaggaactgacaagtcatgatatacttgtcggtccattccaatccgaaagttcggaatcccttgttatagtactttcgtcgttgttgctttgtgtttagaataagaaagaagtagaaggcgtaaagagtcagcgtcatcagatagtgaagataaatgcaagtattataggcaataagaggaacccacgttccaaccccaagtccagtaagttcggtcgagtgcggtccaaactccccagtgcaaagcagagctgatgtagtcgactcctcgggttgggtagctggctccatttcctctaccctgaacgatctatagtgtttgggcgttgagacaaaagttagtcgagaaaggctttctatcggcggagagaaggcctgcgacagcttgaaggaagattaaaaaacgtacatcgatctctccactagcaggccatgagccgtaatagtcctcgacgggagacatccagatactaggccaaatccagtcactgcacagggtaaaacttatcaacccaatagctccgaaagaagaatcacttcgaagcgatgtatagaaagacttacccagtgggcatctttgcttcgaactcgatctttccgtaccggatgtttttactcaactctgtagtaatccttgcgctgcgaacaggagggatgatggttcctgcggtcgagttactagtgatcagacagttcggaccagtcaaattggcagccgtgcaagcgccggtggaacctagatcgagagtgtatccgttctgaatctgggcgtcggagaggacgtcgctagtcaaagtggggacaatgtagagcacgttgtcctcaacaaatgagttttcggtagcgttggtatcccactcaaactcgccatttctgaagagaacaaaagagaggatagaacatagtagccaatactgtcagcataaacagagaagagaaaatcagagtattggacaagaccggagcgcacctgaaaccgccgactcgaaggtcatggtgccatatactggtatccaatgtgtcgaactgatcttctagcacaaggcaaattttccccatctgaggaacaactctgtaaccgtcccagcagactgattgaggaagaaattgtatgtagcagtcatccgggagatgatgaagatcaacggtcagatttgtaagaatcaaacgaaggcgctgactcatgaggaaaccccccggatgaacgatgaaaagactgacggataccaccgagacctaaaccgagagcgatgcaaccaaaaatgatgaatctggcccaaaattgcgctcggtctgggttctctacccaaggcttgtagacatctcctttaagtctggtagatttgaagaccgctcgctgattttgagtttgagtttggccagatcttccagtctgtccggacttggccgagtgcgtgtatgccttgctggctctagacgtagctgtcttggtaagacctgaaccagcggacattccagaaatgtaggactctgcgaatgagggtgcgcggccagcgagagcaacgcctggctgaacggcttgatttgaatctggtgtgtctggctgggaagacgagctctcggtgccagctaaggggtcgattccctcagagtcgatagaggtactgtcctctgtcgttccaggtgataatttcttttcagatccgaaaggatcagtattgaatgaaacgggaccagacatggtcgtggattagttggaatgagttggatatgaaagaaaggagagaaggacgaggagagaaagagggaaaagaaagttggtataggacgctagtttagaaagggcgtgaacgagcctggaataggatccaaacgaggaggggtagagatgaagaaggaaagcgcgctgacccagcagctgacggttgatatagtgtagagtgaatccgagagactgagacttttcggaaggaaagggaaggaaaagaagaagaaggaaagaaaaggaccgttgagaaaggagaaaccaaaacgtcgaaacctccaaaatgtttcgaatgattatcatgttgctctattttaaagaagccgagaccggcggtcacaacacgtgtcgcgcagtgaacttaaccatcttggacgtatgagcagaggaatcaacaaattgatgatcggtcgttatgacgatcaatccaaggaaacacaagagatgcgcagtcggtcgttgttggacgaacaagacaagcgaggaactgttttcctttagtcaagtcaacatagatcatagaacatagaacatacacagagcaatacagagaatactcagagaacacacgcaaacacatacacagcgtatactctaacacacaagccccatttgtccccacacgagagcctttgagcactgtgggattaagccacgagaactttaataagaagaaaacgatcgtcaaggctttgcctctttcttttacgttgtttccaatctaacaaatcgttttctttcaaactgtttctgatagcatggtttaaagcagaagaaaaaggctgtgtttgacgcaagaacagatgaattaggcaagcaaagcaagcattctatctaatctatcttttaacacttgacaatgccgagaaactaccttgattagtcaaacctcacttctcagaccctgcgacaactgattcaccatctgagctgaacctgacatcgagctaagtagatagacaagagatcagttatttggtcaatttctcaactgtcgaataacataaaccgcctacatacctctggattggacgagcgaccaatgaacttggtatgatctatagaatttatccttgcacatcaacttttgttgcattcaagggatgcgagaaggcaggagagaggagagaaggagaacagcactcacgtccaaaagcaacgactcgatttgacgagtctctaagttcaaccttcgtaaaccctagtgaacgacctttcgatagaacagtgctcaaaatcttgatcgtgtctccttccttccctgccgcacgcacaaaggttgcgccgatgtctgtcgagactccactcgagtgaagacctgtactagagagtgcaagagagcccattgtgtctgttgatgttacccataaaccaaacgattaattcatgtcttatatacaactatccatgggaagaagaatgtatcctatcaatggggagtaaaaatgtgatcttacctgttatcgagcaaatcgctcctccatgaagagtttttcctctgttaactaggaccgcgggtcaaatcagattgagatgttcttcaaactgtctgccttgtcgttgcctgttcttcaaactactcagacttactgccttcaggccgaatcgtcaacgatgcctcaacagaccctgggatagccgagattatcttgagctatttgttcgtattcacattacaaatagccaatggtcagtattaacaacttggatgttgctcaaacgttcaggaaaagagaagacatctctttctaccaacgtttgggagaacatgtaggtcgtgactttacaagccaattatcagtccaacaaaaagggcctgtcagccaccggctacaagtcaggcgaagaaggtatcgattcttaccctttctgagcaagatggtctagaaagacctaagacccaagataaggagagatattaaacgattgcagattcagttctatcgactcagggtataatctcgtgaaaagaagttgttttatcaccttgtttacgaatcgtttacacgccgacatacgaacaaatatgtatcagttcagttgctcttatttgccttgttcgtttctgtagaaaaatacaaaaagacgaattttatagtcagagctaaggagaaaccatcctcgtttatgtttgactgtttcgaagcattatcagtcgcaaggtaaaaactgagtttagggtatctcacaatgtatgggtgaaaaaggatgtgggaccggacaaagaaaaagaagtaggaggaaagatgtaactgatttaaacatcatcttttcaaccgatcaatatcatctcatctcatctcatctcgactcgtagcccaccgttcgcctcgatcattcagattgatgaataggctattctctctctcctcccctaggagactcattcccctcacaggaagaaacccctcgatctcatcatcttcgatatctgtccgatcattcttaatctctcgaccggcccaaacggcatttgaatctagctcactcataaaaagccaacctagatcgcttgtctcggtaaactcgctcaccccaacctcgctcacttcgggcccacatgaagagcttcctctaccgtacatcaatgaagggggtttctcttcttccaagccccaaatcgctagagatttgatgtcggtttcaaagtttacggtcgtttttgcaatgtcgatgatcttcttcagcggggtttggttcgttggctacgtgtactatctcgaaaagatcaaactcaacgctccggcatctctgtgggaacttgacaagacaatgtctcaagcagctgagtggggatgggagctcgagaacgatgattggacgggcggagtcgcgggtgggaccagtcccgagctcgggtgggatacaaggc

SEQ ID NO: 1534 - DNA, 9675 bp, Xanthophyllomyces dendrorhous
gggtattaaaccccaagctgtccaagacaccgatttcaccggtgaaggagaggaacatgaatccagcgcctttgcaggcgcgttcaaaggaatgatccaagccgagaaggataactttcatcggtcgttcggtcgaatgccggatgagttcaaccagggcgaacatgcggtggcagagatgtacgttctactagcgatcaagcaaagtgaaacgatgccaggagtatggttcccacccccgttggatcactcgattgataacgatcttccgcccgaggtccaaccagtttctataagaagaccaaggcctgaaaatactattggcttggttcttacccttcgacatgcccaggtccttgaacgggcgattgcgcccaaggcgctgagagcagcgaaggagctgtaccgacgggtattacacgtagtcgatggcgttcaaggtgcagagacgctcgaagctcagttagcgaggaaaatcgcagatctaggaaagttgacgggtgttccggaagaggagtctgaaagttggttgcgttggggaattcataggctcgttggcattcatccgacgattgcccctatcgacaagatctccgaagagcttatcgtctctggttctactgccgtccccgccaactcaccatggtggaagcggctgagtattctgtcctcccacaatgcagcttcggttgagcccaccgcttccttgtcaattccaaatccgtcaattgatgaaattctctctctcgcttctcaagcatgcctgcctccatctcgcacgcgcgccctacttgcgcttcttctctccctttcctccctccaatctaacccggccactcttaatcaagcccagtgcactcagacttcagttctctccttcctctcggatactttggcggcgctacctgtgtctgtatctgcaggggcattcgcatacccacctcaacaactttatcatttgaacttgaaactctaccaggcactgttctcgattcatctggccgaagttatgtatgcctctcggtcgactgccgatgaagtaaagaatcgagaggacaagcttgaattgactattcgttggttagatgccgctttccttcaagcgagtagcttggcgttcatcctcacgtctcctcctcgatcgacccttccacccacgctgcctttccttcctccgccaccttccacctcctcgaacacatctgaaaattcgatccttgctgccacactggctggcgtaggtaacaacaccagacagccaggtcttccggaagagccttccttccaattcacggataatcctgttttgcgttcaccctcttcagccctattgatatcgtcccgaaaagcagcagcttctgcagcaaacctccttggagttcttctccttcgtgaaccaggtgatctcacagtctctcgactggagaaagtcaggcgataccttgaagcagccatggcctatgaagggaagccacctccgttggatgaatccgacttggggttaggtgggaaggatgtgatcgatgacgttgaagccggtggagtttggagcaagtattataccagttggcaggctatcaggcagatggagaaggaaatgaaagaatcgacttaagaagtcgaactctttctctccatgagaacagggaatgaatggagaaaagttgtacactgttgtaattgtgtttgatatatctcaattgtagccccagggaatcttgtgctctcttcacaccaaacgtaatgaaaacagaacataagacttggactctatcgcgagcgaagagaatgaacaaggggatggggaaatgtatgtagagatggttgttcagttggaagcagaacaagatggaaagaagaaaccaaaacaaaacaaacaaaacgaaacgaaaaatctcacgtccagaccaaaggaaagcaaacacatttggagacgaacgagtgtaatcaagagataaaagagaagaaagaccccgaaaggaacggaacggaaggttgaaccctgggttttctatgtgaatgatggacgatggcagggcgagcaagactcaggaaagcgatcaggcgagaagatgaatgcgagattttatgattatcagaagatgggatgataggatgagtgacccgactggcgagaggaatcatcaaagacagaggagacgagaggtataagtatacattagggatgtgggtaaagctgagagatggtagtaggttaggcaaaagaagagtgtatatatagagagagaaaagagcgctcaaaaagaaggaggataagcagagagcaaataaaactctgaggttgctatccttgtgcaactttcgatcggatgaagcgagaaggagaaagtagtcaaagtctatggaaagaaaccgttgaaggagaactccgaattacttcttggcctgctttacacgaggcttgcccatggcatcgtatttatcctatggattgcgtcgattgatcaatccgggaaattaggtcagcaatacaatccttgtgtttcgtttatgcggacaaactgagaagagaagtacctgataattcaactctcgacggaaaagcaaaacccatggttcgggtgcatgcacttcactaaattggttgaggcagaaaaatgaggtgtcaaccggggatcatgcagacgaacccttcaaaagctggtttgacttactagtgctcccatcctagacctattcgtacagacatagaacgaggcaatcgagatatcagtaaccttctgtttgaatggagaatgtcgttgttgaacctggttgatagctgagcttgaatcttgacttactctgcatgattccaatcgacctgatgtgtcaagtaagtaccatcaagaagagggattgagaaggatttgttgtcagtccgcaatctaacgacaaccttagacaaagaaaccatgttggactctcatctgaaattgagctcaagaatagtacaaacctccactcggtctcagacaaaatccggagaactccggtgtcgcccggctcaaacattctagacagaagggaagacaaaagggggcaagaataaacgaagtataagctcaataacgtttcacgctttctgggcgactgatttcagcagtcagaaaaggaagaccataccccggtggtatcagtttgagaagctgcttgggaagaatgacatgtctgagtgtgtattgaaagacaggatcagctccctaaaattcttcagaatctatgctagatccaaacgttatagatacgaagaggagcaagcttggctgacctgtattcccactcgtcgtcctcgtctgacaggtatgttaagggttcgaaacgagggatgtcagctagttgttctcaaacaaggagacgccagaaagctccgaaagagaaactaacacttatcactatagaagatcctgaaggattgagaatcaaacgagttttagcataaagcaaacaaagaaattgagaatgtgaaaagaaaaaacacagaaaaaggagatcaggaaagaaacaaatggcgataaagacccataggacatacttttcagtgagctcctcgtatgtcgggtttttagacatgatgtttatgaccttctagagtacagactcgcgcctttaatggtgacctctaagattcgggataaagaaagcctgaagaaactgagggagctgtttgaggacaggaaggagtgccggggagaaatggataggcttagggttaactcgtctatgtgatatatcataaataaattcaagaacgttgtctaagtgattgatcctttgctgatgcctcttcgctcatgtagttcatcttatagtcgtaatgtccaccaacatagccagaagtcgaggtatgtgatcattctgaagatgttctttgtaggagcgaaccagagccagaacgacactgagatgataggaagatgatgggtaagaccgttacccagtggctgacgacacgatgctacatttattctgaatttcagccaagatgacaacaaccaaggctgacctatcgaaagaagcaacccccaaagttcagccggaaattcagccatacgagaaaccaatgaaatggtttgacggactcgtgctggtgcctggacagaatgagacaagaagtctaatagatcaagacccagatctggagaattgggattggtacctgaacgcacggttcgttatgtttctgcttgccttgctgtttctactcaattcgcgcgctccatatgagggacttaccacgtcgcttgggtatatgcgtctcgactgaatccacacagcttcaagcattttcagcagtctcttgaaaagctaaagactatatatcctggcggcttggatgagtttagctctggatatctcaagatgggacttgtagtcagtaaatcatttgggatgccattgataacaacgtacaataaatcgtgttaacgatagccgtcacggaatagttacacgatgataattcaataacatacactgaatgggctgaaggcattatcgaagcttcgctaatcggcgacttcagtaagtaggaattacaagagttcatattcctcggcccgtgactgattaagtctgatactttggtggttcttcagacgctttcaatccttccgcgcaccttctcaagcatgaaatagacgagcacaccggttcttcatactggactatccatcttcctgtcatggagaatgggcaaccacaaataccgcttggttcagaagtaaaggtgggtctgtaccttgagatttggtcaactgaagaagaactttctaggctgacacccgcgaatacagatcagaataactctgccatcgggtgaatctctggacaggttcccagcatgggtgcttcgtgcaactcaatctcagaatccacctgaagttttgttcagagcgcgaatagagcgactcccacctatatataatggtgcgcgaccactagctccccgaaccccaaagttagtgttgctcttcgagatttagacattcatggcgcgcctacgtttgtttatgcctaacattttgcgttcccatttgttgatacccctcgcaggatttatgaagctcacattggagccgctacgtccaaaccacatgctataggcacttttgaggagtttgagaagaacgtcctgtggagagttaaggccgggggatacaacacccttcaactgatgggaatcatggagcatccctattatgccgtgagtggattggcctctaaatcgatcttggaaacaggcagaacgttgatcgtcgtatgcgtgtctgctgtatcctacgtagtcctacgggtatcaagtctcttcgttctttgccgtgtcgtcgcgatttggtaagaaaccatcctagatagcttcagtctgacaataccactttttcccacatactcaagatcttcttcgttcgacaatcaggatctatcgcatccttgacatctcttattgatgcagctcacaagcaaggtatccgcgtgatcttggacgtagtccatggtcattcgtgcactaacgacatggagagtctcaacatgtaagagactatgggtttgtgtttcgatgctgaaattcttatctgactgaacgtatgttacttcttggtgaaaaggttcaacggcacaagaggaatgtacttttcggaagattcgaaaggagatcatcctatttggggaacgtaagaaccctaacgttcggacatctttttcacatcattgtttgttgattaaaagttcttaccctgttggatcagccgggtgtttaactacggacatctcgaagtccagcgctttcttatgtgggtctatctgaagtttctaataatttctacagccgatgtactaactctatacgctcaagatcaaatcttcgttactatattgaacgaataggatttgatgggtttaggtttgatagcgcatgctccaatttattcaaccatagagctgtaaaccagagctggactggaaattatggacaatacttttcgagtgatacagtacgctggatagtttctacaagactagactgtattccaatatccgccagaccgaaactgatagacacacgccttggacctttcgttgaatatctataacaggaccatgcaggcgttgaatacttcatgctagtacgtcgccatacttgctgagtttctgatgctttgtgcttatcgagcttgttccgtcttgtttcatgcctctccttcatcattcaggccaaccatatcatcgtatgctcgtttcggactgttctcagcgatgtgcaagttgtttcctgatggtttctttacctttacctctcgatcaagaaaacactcttcccttttgtgacaacaatagcagaagacacggctgggtttcccacattagctctttcaacagatatcggaggcttgggatttgactaccgtctgacactaggaccagcataccactgtgagtgctgaatcccccagcgatgaagcatacatgtaggataaaacaggagagattctaaaaggatgtttatgtgcattttacagtgtttcacttattgaagacggagccggatgatgcgaactggtctgtcagggatatcgttgcttcattgggcaataggaggctgcaattaggcgaaaaaactatagcgtttgttgaaagtcgtatgtatttataccataaatcttctttggtcgcactgccaatccgatctcttatttcgtagctgacgcaatacattttcatagatgatcaatgcatagaaggtggaaaaacgatgtctcagtggctttttgacgatgagatttatactcagatgtctgtcttccagacacctacgcccaaagtggaacggttcgtattcctctcgttcatcatcacgagagaccatttttgttgatagttctgaagaactacttgtttcttgtagagctatggctctgcataagatgcttcgactgatggtcttcgcctttgccggagagggttatatgagtgagttccgttcaacttcggtttggatatgccgccttttctgattttctggatgttcattgttgttatttctcattcaaagatttcatgggcaacgaagtaagcgttcttacaccttgttattgatatctgtatcatgttctgatccaacccgaccttcgtgtcaatccaaccgtttagttcggtcacccggaagtgtgttcctctcatcctgttcgctatttgtcccactcacccatgtactgacgatctccatttattcttctccagtggcttgttttcccctcggtccagaacggattccacaccactcactgccgtcgtcaatgggacctcgctgatttttcgcgcgatttaagatatagagatctcgcccggttcgatcgagagatgttggtggctgaagaaagaggacaatggggaagcgcggagcttggacatgtatggacacaagatgaggtacgctctccagtctttcgactttcgatacctctttctttattatatctgttcaatatgcatggagagaacaggagaggtggcttatttcttaagttcctttctgttcttgtaacaacgacgaaaacaggattcgaggttagtagttttcacgagggcaaaccacttattcatcttcaactggaacaccaagctaccagccaaagacgacaatctgccgattccggagccatgggcgcttgaaggccagtatcggatcgagctaagcaccacaagcggagtagctggggcagttgtgaatgatctgaacaaggtccgttcgaactctatcgttcgaatccgcttttgcccagagactgattgttgtcgtgttcatgttctcctatgtactcttcgttccctatccagctcattctccaaccaagatcggcagtcgtcatatccacgttgatggaactctcagcataattagggaagaataaaatgacgattgacgtctcggagattcagagactggagtaaaaaagagaaacagttcatgtatcctcctcatagtcccgatgccatctcagattgtttttgaaatctgtccatgtcggccagatctaaagtagaagtatgagccgttataaagacttggttaacttctcaagtagcgcacgagacaagagtagttaggggagggaataggaaaacaagttagacttactcggccttctaccctggccaatattaatgccatcggtactggcccataatcccttgaatctgttgagttactcaaattgtctccctgaagccagacatgacctttcggcactctcacccagccctttccaccatccttcccggacaccgctcttaggtttcctggatcgacctcaacagtatctccttccattgcgatgattcgtttgcctaccgttcggtctggaaggtagggatgtgtagcgataacgaggtccccacgttggaaaggggcgcaaagaaatgatgtagaggggtagtaagggagccgggaatagtagatccaatcaccttgaggggcgagggtaggtagcatggattctcctttacattcttgtataaatcctattcgatcggtgattaagtgaagaatgcatgcactctgcgacaagacattattataagagaggaccagatgaaaagcggaaaggagcaaacgttagaggttgacatccaactttcagcagaggcgttcaaaagagagacctacctggacggtgacgatactagcctggaacaagagccgactttgaacgtataacttctcgccaactctccgaaagaaagtcatcttctatgagcaagaatagatgggtttgtaccgcgcgtgtatactagaggatcacaggataggatggatgggttgtctgatgttatatcggttggtgtgaatgtgtagaggcagaatcatctggcggatacttgttccttcttctttctacgtcctcgaccaacccatcatcgataatctctgctttactcccaacgatggctccgctagcccctcccaagccagcccatccgccacccgcgaactggccctctgatatccactatctgactgctcctttctattcaaacctacctccggaagtcacagcgttcgtccggtcgaaacaaccgccccctgtacataagccgaatgacagagttgttattcagtcagtcatgttccattctatcctatctatcatgacactcttgtctttccatagatctagcccactagatgtttctctctgactagcttgaacggtgactgacgtatacttcaagggatgcgtgtgtcgatcccataaaggttgatcaacaaccctgctcaccccgctcatggtcaacgggggctttttgcaaagaaaaagctagaaaaaggagaactcatcgcttggttcatatcaatagtttgattcaatcaaacatctaggacatgcatgctcatttttcatcttatctgtatcctaaacgcttaatctcttggtaggtatacaggtcatgttcacctcgacccagaatctgatcctgcccgacgtgaacaacgagagaagtctgattatgacctcacgctcattccaaaactgtctaccttgcgtcctctgacatcaactcctgaaccctggtccgacctaggcgtcgccgttgatgcttctcaatacggaaacgagtctcggatgtgcaatgactttcgaggcgtacccgtgcctgctgatgcagttcctc

SEQ ID NO: 1535 - DNA, 6253 bp, Xanthophyllomyces dendrorhous
gctccagctttggggtcgacagcgaggatttggagccgagatcccttggcaaggctatggtggttggagcgggtggtgtcagatggtgatgggcttgcttgtttttggtggaaacaacgagaagggtaagaaagagagcggaaaaagactcggtcgaggcatgtcctcctaccaagtcttcagaggtgttctcgactttttcacaaagaggagctttttcacccagcccgttttcctgcacactcaacccaacgcagcgccctcagctgagaaaaagatcccgacagaagactggatgatctctggattattcgacgctgtatttgtggatccaacggggagtgttaatttattgagcggggttgagagaggtgtgcttgagattttgggacaggaggctaagggaacgttggagctgctggatgaggatgactacggagaggagaaggaggaggtatttgatagcgtgttcttgaggaaggctactggaggggagagaagattcgatctcgtgttcaggtatgtttcctcctttcttatgccgtacacttctgtacttcataacattgtttctcatttaattgcccataaatcaactagaatcgacatttcatctgctaagccgctcttgcagcctgcacttgcccgcctcgaccagccctcccgtactgctcatctgatgacgtctgtgtcatctgttgtaagacgtgcacttaacactcgagctaagtgtgtcgtctctcagaaggccgttccttcaacgacgacgagtagatggactttcggatcccccaagccgactcccgcccccgagtctcaggtcattgagcttggcatcattcttgatcagagagaggccgctcgattagtcgaccacggaccttcggctgaagagcctgaggcatcccaagagttcagagacttctggggagataaatccgagttgaggcgattcaaggacgggcggatattggagagtgtggtttgggaggtcggacctgctccagaggagagaagtttgatcgttggacgatccgttcgatatattcttaaccgacactttggtcttgatgcggatgagattccaatcgagagcctagccgcctaccttcccctcctgcgattaccagcctcggccaccaacttgttgtccaccgacgcttcatccgaaggattcaggccagctatagacgcgtacaaccagcttaccaagactctgaaagctatggaagatcttcctctttcgttactcaatatcttccctgtcgcggagggccttcgatactcttcggttttccctccgctgccgattgataccgaccggttttcacttgctccagattgcctcaagtacatcgagccactggatgtcgtcattcagtttgagtcatctggccgatggccagatgacctgacggccatccagaagatcaagttggcgttctttgaaaagattgctaagcagtttagggatcgactccgagggtgcatcgtgtctgtggcaatggacgaaattgacgatgctgaagaagccgtgattgaggataactgctcgttagaaatcttcgtcccttctgggtacgctttcagacttcgaattcatcacgatcgagaacggttcctgttggagcagatgattgcagataaaaaatcaacaaacccgcatatccgacgggttgcccaaaaggctttggatattcatcattctcgattcacctacctcccccgacaccactccgccatggccgccttacatcacttgtatccctccttttcgacgaccgttcgactcactaagcgatggttcgcatcgcatatgctttcctcccacgtttcggctcagatgatcgaactcatctgcgcgcatgtttacctcaagcctccgccttacagaacgcctgcttctccctccgctggctttgcccgagtcgtaggattgctttcgacttggaaatggaagtccgttcctctgtttgtgcctctctattcagcagctgggatggaggccggtcaaaaggtagtgttccccaaagaaaagggggcactgataactgagaaattcaagaggtttagagctactgatcctatgatctctcatggagcattcgttgttgctaccgaggaggacttatcaggaagagttttcggagcttcgagtcctacgaggttggttgcaggtagaatcacccagttggccaaggcaaccattctatgtttggaacctcaagatcaggttgagccgctgaacgtccttcacgttttcaagactcctacttccgactataacttccttatccatctcaaacctgccgttctcccccgtctgtcgcaagcattagagcccaaccaggccgcttgggcgtcaaagtacaagaacttatcgacattgcaggcttctagctcgacgtatggtagagagcttcgactccaattcgatcctgttcagctcttcattcgtgatcttcgaacgatttacggagagacattcgttctcttccaagattctctcggtggttcagtgatcggtgggatctggaaccctactcttcaagagcctcgaaactttaagatccaaactggattctctggccgacctgtcgcgagagaagggggcgacaagaagagccagatgatcaggttgaacgaggctggcgttgtagcggagattgagaggctaggagagggcttggttgagcgtgttcaatttgaagcgtgagcttcgaatataagatagatttaatgaactctttttctcaaaaagaggtggtcctgctctcgttttaagcgagcgcaatcttaaaaaagagaaatatcaacttgaactacatgcaaataacataacataatgaggatagaaaactagtcgatgacctgacagatcgaagaaagttaagtacaagcgacgcctggtcgcgttgaaactacgaagattgaaggcgtagcaaacaatgtgtgaatcctacataatctcccaacgctggtttcccaagctgattaatcgattgaaaagctcatctcttctaaccactccaaacttgtatgtaacctagagaagagagaaaaagcaagaaagatcagagactgcatctattgactaaatcctaggaaggtgacaaaagggatgacttcacctcttcttcgattttcctacccacctccgaatggtcatgaccttccacacctgactcagaactggcactccttcttatcgtcagctctagtccagctccaccaacaccttgaatacctacaacccagcccaccagcatccgaccctgccagcctcccattccaaatcgtctgatggccgttaggtcgtttgctgaaatagtcaaagcaggaagcggcggtggttttactttctttgctttctttttttcttcctcctctttcatgagtttagagagattatcatggggagtgggattgtgtgatgtattgactggtaaggaaggaacgggttcggtcgtgacggatgtaaatgtaatgtcggaaccatcaatccgaatccagcctggacgtcctgaacgagtggccaaaaatgctgagaccacagaaattcaacaagaacagaagttcatgattagtgagcatgagaattagaaatgactggaaagcgaaacatgttcaagagaaagagcgaacagcagggcccttccttgtcttgcttgaccggcataatcgagagtagcgtccgtgcggcctgattatcaggtgaaatattgagcttttccaaagcagcctattttccgtcgatacgatcttgatcagcttgttcataggtggatattgacaacaagatgtacacttaccatggatattttattccagtttagcttcttctctccgctgtaatatccagcgctctagtcatcaggaaaatataagtattacaaaaaaaaaaaaggtcaggaaccccataatcctcgagcttcggattaaagaagcatgtctaaaaagtacagcccggattacatacttcttctgtgagccttgctgtagccttcaagaacgaagaaattctattcctcccatcgggtttcttctcaacaaccgctgcctctttgctgtttgccgtttcaaattttacatcgagctcgttttcgcgctctaaagaactggagataaaatcaccgtctgatccatccatcttgagttcatgaaccgaacgtgaatctgacattgaagaactcggagggatcgtagaggaaggagcgggtcgaggaggggggataggggtttgtttaagctcagcttcacgcaggaggcggagagctagttgagcatccgtagggcagcctgctaggactccactgagagtgtcgcgcaaaaatagcaagagtttcagtccattgccgaattctcttggcacaaactcagattgaagatcatactttcgaagttcaatcttctcttgccagccaggaagatgctcattgagaaggataacaagttggtccaaggccggttgaccaaagaagcaaattccaacgagagctgaggtaacccgagagagcacgtagtctgagagaacagtggcgacaacttaacatgcatgatagaatcaattcgatgatcaatttttacttcttggtggatctgcccagctcagataggataactagagaggagacttgggactcaactaatgagaggaagaagtatcgtaagaaagatccgcgttgatccttcatgagcggagaaaggcggggttgggcttaacgcactattgtgcaaaatttcccgttcgcaagctaagttagatgaactgtatctgcgagaatcatggagaagagactgtgcgcactttgcccaacgctcccatccatcggctaaatcaccgcagatcatcatcactggtcgcccaatcttctcgattggctttttcttctgagtttttttactcgtagacatttcgatccggttctcctgtggcttcttttcctttggatcatccgaaggcctttcttctcgagcttccgtcgcctcctgtgtctgttcagcatctacaccaccttcttcttcgtcttgggcccacgaaggtttaagacctacttccgctaattcctcaagatctgttgcgaactgagatgcttgagcctccacttgctcttcttgggtcatcccggggacgaagatagttgagggtgtcttcgtggatatcgtttgagagggtatatctgggagtgggaaaagaagacaccgggctgaaggaaagaggactaagatagaaacgaagaagagtagagaggctgtgaccagatggatggaccatgccatcatgtatatctatttatccgaggaaacaaagaaaagaggatgattaatggataacgaatgaggttgccaggtggaactgtacacagaagtccttacagccaaaaatgtccctgtccgaagaacattttcccagcttctcaatctgatcatttcagaaacaactcggatggatccaataataacagtgctatacagcctttcaacgtttgatcgaagtttctccggggcgaattcttcttctggcgagggctgaaggtcgagcagaggtgatatagatgatatccgaggcgaacgactgggaactacttttacccatgggatttgctgataggtagaaggcgtgtcaaccagcccctgataagtctactctaagccagaaacacctgatgacaaaccttatcgaacctcctgagcaatacatcgacctgctcgtttgtcataccttctacaaactgtttttcctgagattttttaggcagaaagattggttcagcttgcttgcgtggaggcaaaggcggaggtactgctctcgatgtcgacgatgggcgagaagggtgcacagatccaacgggctttacgcaaggattcatggtaggatcgcgctataaagagttagagtgtacgagaattcgagcaagtggaagcgagaaatcaagatggatagatagaatgtgatgtttcaatcagcccttggttgaacattatcaaacgtcatcagaatcacacagctttaatcatgtaatcacgtgtttctatcaatcatcttacaagcaatcagttcacttttaaatctcgtcctgtatgtccgaatgatacatcatcatatcttcattgtgaagcctgttcataataacagctcagacatcaacatatccacctagcgcgacacctttagtctcatctgaaaaagtctggctggaaagggagacttatcagagtgtatggctatcaagctctcgaagcacaaatataa

SEQ ID NO: 1536 - DNA, 2538 bp, Xanthophyllomyces dendrorhous
aatataagatccgtgaagaacttgaaatattgttgccactgaggttttgatcgtgatgtactcagggtttatgttatgtcttgtaactgatagcgagcgtttttgctgagattttatggcaccatgagggcaacatgagacgaccaaggtgagcgcgaggaaagaagagtgagagaataattgagaatcatacaaacattatacgtctacttattctctgttttcaagttttgtacgtttggccaacaatcctttttcaaagatttcacgccgatgaacgctaagacggcggcgatacccgctaaaaggatccaaaccggtgctttgacggcaacctctctgctaggaaagatagagagagaatgtattgggtgctctgaattgaagaatggctgcaaatatatatccttgtcattcagatgtgcctatgggccgagcagaggaaagatggcaagcatacagtgacgagtgtccagatagtgtaccaaatgagacccaagctcgtgaagagtagaagtccggctcctatagatttatcagagatcatctgaacagatacaatagacgagaaatgtaagcaagttatccttttgtatatctcaaagataacagagctactcactacgttgattgatggttaagaagaaactaggaggaagaaagaccataggagacaatactaaaacggtcacgtgatcccattccatcagcgctcaccccaaatcctcctttggccctcactgaccatcatacccacaacttacacaaccaacgctcgaacctctatcgatgtcggactcgtctcaactggttcacctgctatcctcgctggcaaatcctagctctcctcaggagttgaccagtctcactgaacttcttcaatcaacctatcagaccacaggtttgttcatgcatatccaatacaagccgtcccttttggttgatgctctctgacagcctctgacttgcgctctcaatacgtaggggttttcaatcaattacaccaggtcgctctaaatgaatcagtacctagagacgctcgtgtactggcctcgctggtcatgaagaatgaaatggttactaggtggagagttaagatgtgagcacgactgttacctactaagctgttagcctcacctaaccaagtcctttttatcaagcgctgggattaatgactgtatgctaatggacagcttgctgcgttgcttggctgatttctgaagcattatacctgaagaagataagcaaaatattcgagccagattcttccaattcttgacagaacccgatgtgaccgttcgttcagcatttggtcagccttggtattctgttttcaacatcgagtctcactctgtcgttttctctttataccgatgtttgatctatacagatatcccaaatgcaattctggacgatgtccaagatctctcgtcttgactatcctcgttcatggtcagcctaccctccattcttctccaatcgtgggaatcaatctcatcattttttccaatcaaatctgtatatcgcaggccagatttgatgcagaccctgaagcaacatctcctgcaggctgctcatgctcggttctcctctacatcctcttccacggaccgatcgactctacgcaacactctttggcttctcaatcgaataataaaagaatgggtcactgtccggctaccaatcggtacaaagtccatgggcgagtttcttcaattactactaccagtattgattccgctgttggattcacttgtcacgctaccgcgagaagtggaggggtcagaggactcggagtctgctatgctctgcttcaagctcgtcgcaaggttaatagggtgggagtgggcgagaccggcctctactcatactactgagtcggaacaacgcgtccgttcaactttcatctctttctagcaaacgcatgcatacaaacataaattgactttttttccgtttcctactcaaatcacccttctcttttgttattgctaatttgtaacgatagtttgccggagtattctctacatcaattcagcacttgacaaacttaatggagactaggaacgcgttgatcgcacatctagtatctgctactggtaatgcgactctcgccgcgcgcgcggtgctcaagaaccttacgaggcatgtcggcagcatcatcaaattcttcaaggtcagttctctcccaattttgtctttttcgaaaagacaggatgaaggttgacgtatgtacatatattgacaagatacgactgtaactttctgcagacactagaggagcataaccccaaaggatttgtctcactcccttctgcaaacgagatcgtgatttacctttggaagcaacttaaggcagagcttgactcggaagacttttctaatgaggatcaggaatcctctagattccctacaaagttcaaaatcctctcgttgttactttataagaatatcttacccatttgggctacaagttctccccctggtgagattactcatatacgctctccgtgtttcttgagccaatcgagtagattg

SEQ ID NO: 1537 - DNA, 4076 bp, Xanthophyllomyces dendrorhous
ggactcacccgcgttttctgtactcgctagttctcgacggagcactcattacagagacattcaacgttcttgtcgtgaagattttaccattatcggtgcttgatctagagactctggcggatgagcctgaagaatggtgtgtcaatgaaacggctgggaatgagcaatggacttatgatcttagagtgagcttttcgattcagaaatatatccgtttaaatcagttgttctaaatatgtgattcgttgtagccatgcggagagagagtccttctagcatgtgaggcgacgaacatcagtgctatctcttatctactttcatctcgtactgatcgaataacctgtttacagtaaataacgcctgccgcaacagagaagatagattgatggataggttgatgcaagacactcttgctcaatcaatgtgtaagtacatcgtctcgatattttatcagttcagatacataggcctttctcatcatcctcgtcttattaatttgtctgtcaatgtttttcttcctcattttagcaacacctattacggacgaactctcactccgacgcaaagaggcagtttatgccgccgctggccgattggcacgttcgcttgtccacaacccgaatactcctccaactcagtttatcctcgctctgacagaagaatgtaaagcacctggaccagaataccgagtgttgaaacgacgagtggcttggttgatcggagagtgagttttgtccttgcaataacgtttctcttgtctgtttatttaccgccagtaatccttccgggcgaataatctacatacagattggttgatgctgaggaagagctcgctcaaggctccttgatctgggagcttttgatcggtctgatttccgaccgaagtgaaggatctgatattggtgtccgacttacggccgctacttcccttaaacaagccatggatgtatgtacattctattttgatttgttggcatgtgtatggtagatggtgaaactgacatcatatggttcgagaacgtcaacacagctttgggaactagattccaattgtttcactcaatacgttcgttgatgcgtaccttgttgcatctttttattcagcgacaggtctcactgatgaattgaaacgaaatacaaaacaaaaacacatatcagatctctcaaatcgcggatggtttgttcacactcttaggagaacttgagcttcttgaaggaagacgtcgtgttattggatccttagaagtcagtcctcattttacatttgatatcctattatgtttgattgatcgacgaaaccaaccggtcttaacgaatcaaacaggtccttatagagcgtgtcgggttagaaattgttccgtacattgatcggatttctcaagcgataccgactctttggtcggatgcttcaagtcaagaaggacaatggttgttcaaatcatccttgctgacactcatcacaaagctagtcgaagtaagttcttggtggactcgtcttcactgtatgtgcggctttgactctggtcaatccataccatttcttctctcttgaaaattcgttgttcttagtctgcaaaaaccaattcgagtaggctctcgacgctctgcatccaactccttggtgaatcacttcgaggtggagtaagtctttccttcctcttttcctttgtatcttaaggttgtctgaggcttatgatgaatttgtcggtggtatcgatgttgtaataggcaaaagttcaactagaagaggacgccatgttgctctggcaagcctggcttcgaaacacctccacacttgatgcggagctcatacagctggtgcccgcagcaattgaacagctcactgtcagtcgagaccaagttgagaagggtttaggaatcttggattcttatatgcttcttgacggacagcgtatatatcaggtaaagaacgtcattttcttgcgttcctggtgcttgcttatcggaagttagagtataacaatgatgacaagctatgtgttgcctttccatgggcatataccttctacaggagtttgccgtccctatatgcgccgtcttcaaagacatcatcatgacctcaacacctgcggatgtgctcaacgtgctatcaagtctagcaatccatgtacagatagcctctgcatctttctgggcggtagggatgaacaacaccggtccgtcttcacatcttcactctaggtagaatctgattactcacactgttgttcgtctgtcagccctcttcactgctttgttcaaaggagcaacggccaagaacgttggaaacgcgcttccctattacacaaacgtctttgccgagatgattctccgggcttctacaagtaaggactccgatggtcagccaaaccaagctgaattcttcacattagccgagatgagcggagtgtcgaaagctcaatttctggacttctggtgggattcggtaagtcatcttgatatgaaagatctgtcggtcagaatctgacaagttgagcgagttaagaactaattctcgtcaatctcatacagttcgatcggattgctaggtcgtccattcgaaagcgtgttgcacttgcttctgctgctctttgtccatccggcgatcctgacattctttctcgattccgaggagagtttgtcaatttgtttttagatgtcctaggagaacttaaaggtaggccactttcttctctatctaaatatatgctcgaacagttcattgatagatatttggggttggttctagaaacggagttagacggagccatagactcgtcggtttcggctttggatcttcattggaaacggggaactgaagctccgacgttgggtgatgccgagggtacggccgaaggagttcgtttgcaagctgtgcgtttgtctcccttattctggttttgaagggttctccgctactacatatctatagtttgtctagaatgactgacaattcagaaaacttgcattttggcagctgttcaacctagatccagtttacacagccagtctcaaaggttatgtgagggaaaagttggccgagacgcctcgtctagccgaatacgtcgatatccaagagtatgtttctgttcctcacctgattattcttgcaattgcttcgtttctacttcatgataggtttgagactgactagtaaccctttatacagccctgctttcatcgaattacaggcatatctcgcttcgtgaacacccttggatggttttccttgtaaacaagatactattttattttactcggcctgatagtcgtgttcattgcccaaagccttttatgaaaccgtgaacatctcttcgagaatcatttgccttaagcggctgattggacgatgaatcgagaacatagatgtcttcttcgacaaatctaaaccggccatcgtaggtgactagcaggattgtcaatgagcgggttccgtaccagcgaggttgactattaggtgttgatggtaatctgagtggaggaatcgttacagaatgcttgaatgttgacctgtcgatcgttgggacactagggctatttcaaaaagagagcacatatccgtgatggtctcacgatattgagatttcatatgcgctgaaagagttataggaggcagatgaaactgaattctgagacgtacctcatcaatgtccggaggttttcaatccaatcttcgtcaccccattttctaccctcatcctcttcttttctcaagagctgttccatctcatgtttcacataattcaccttcacccacgggtcatctatcaccgagttacttagcgctccaatccccagagttcgatcggatacgtctttccatgcttcttcgagcctgtttgaaaaatatccgagctgagcgcgctgatggccacaactagtttcggttgaattgagagtttcaggtgaactctcggatgtgggcgggaagaggtcgaacagaagtagattaaatcctccatatgattgagcactgggagccaaggaagaaatataatcacgtggcctcgaagtaagaaaagatggttgtgaagaaccagaagaggaaattgattgattatttaggtaggaagtga

SEQ ID NO: 1538 - DNA, 7251 bp, Xanthophyllomyces dendrorhous
gatcagagtcgctgtggtcagacgtgagcgagacatatggaaccaaagaacgttttcgtcttgatgaaactcacaagattcccacttgaccagttttgatactcattcccaaccatgttcctcccccaacggtatccaagccgcaaaggatatttccgtctttctctgatgatgctttgagatcgtcaaatctgtaatttgcttgttctgtgggctagagacctggaaggtttaggatcacatactgtcgtaatcgttgatttacgaaatggtcaaataattgcttactcgatgaagaaactcatcccggttattagccaagatgctgaagaatagtatagaagagctccgggctgtgtaaacaatcaatcgtttctggaggtgtggtagttggtaagcgtatacgtgttcctactcacagtttgtatacaggatgagcatccacatcgtatacaacaatacacattgttgaagtcttcgtagatggaggtaggcgagtggttgatctaagttgtcaaggagatgacgtggggcgatgaaacttggaggttggcaaaatcacctctgcagtttcgagagatcaattatacctctcgttcactcatctgccctgaatcatacatttgacccatctgtacatctaacttaactcatgaattctagagcatacaacgaaaccgtcgagttaacagacagagagctcgttggatctaacggcggtgcgtgaaacttgtatgttgttgggtcattgataacccctgattgactcgattaattgatgaattcatttagccatcaggatcctttaccaattcaagcccgcgactactgtgttggatctgtcgcataaccacttgctgggtcatgatggtcttcgatctctgatagatggaatggaagagctctttgtggttaacgagaaacaacccgagtgggcattgaaggagttaagcttggtaaattgtggattaggaggaaacggtgaagatgtcttgttcatttgtgaatgttgatcaatgtatgatgctgattctcttcttgtctcatattggcttgtgcttcgatcgctatgttatagcgaccaatctttctctcatacagctcgctagacttctcagcttgatcccttcacttgagctgttgaatttgacaaacaatgatctcaatgacctccctgctcccttactggactcgatcatgagccatccatcccttcagaccctacatctctcaaccaatcctcaacttggtctctcatttcgtccaggaactcgttgtgcaatctataaactcctcagccggctgattgatacggcttcgaccagcactctgacgattcggagattgtcattgaacgacacagagatccctgccgaatcgtgcggaccactccttgagcggcttatttccctcggttctcgtggcttggaggcacttacgttaaatatgaatccctcacttgaacggtattcgcctgtcgaccaagatacctcgttcgttgactcacgtctccttcgaacacttgtgcggatcgtttcggaaaaaaatcgattcattcagaggtttgagatctttggatgctcatctggtctatcggagtttttacaagtaggtctattacctacacttgagcttgcgctcgaacgaaacaagaccttcttgaaggaaacaagacagacagctctgaatgtcttgagagtcggtcgcatcgtccttctcggttcgatgccgtcttcaatcgagaagagccgtcagggtagatttccaatattggatcttcctccagagctcattcaaccgattctatcttccatgattcctggcgccctgtcggaacatcaggtcagggctgttctccggtgggcaagtgacaggcggacattggtggggttctctagacggaggagcagcctgcgcgtggacacagagattgagaaatttaagttcctcaaagcagtgggttgttactattacgactgttgatcctcatcaaggagatagactatgactcgcaggattttatgtataatacagatttatggatgcccgttgtaaattcttgtttgtgtcttgcaagacgtttcttcaagtttacattcaatctggtatcaatacagcaactagaatgaactatagaagttaacatttttagatctggatgagcttggcgagcgctccggaggacttcgccttgctgaggtcctgttatgatgatgatataaagaagagaaggatgagatcaaggtgcatgctgatttagatctatcaaggaagagatagccaagaattgagaaacttacgtcagaaccaccaacatgctttccctgaatgctgtcgaagagaaaatcaaatattgaattggttgatcagtcatttgtcagacaagtttagtctctgcttggtttaagaggaaagaaacgaacaagatgttaggaacagttcgctgtccggtcttctcagcgaggtagttctggatgtcggctccgttgtcaagctcgtcaagtctagaaaggagaaaagaggagaatcagatagagattagtgacttatgttttgatcaagccagatctggttcgacagactcggcttactcgaaaaccttgatgctctttccctcgggaagagaaagctcgttcaacagagctttggcctttcggcagtaagctagatcggggaagatgagaaaaaaaaggtattggtaagcgagattgactagcacgaagacgagaatagactcacggcagtaagactttgagaacacagcgatgaaatggctagagatagcagtatcgacgagttgcttaacggcggcagacatattgatcaagtgagcggatgagtgatgtgggtgaagtttagaaaggtagatggacgttgtaggacagaaagagaaacagatcagatgtaaaagcgaggatgatgatgtaacggattgcacgtgatgacgacaaactgacgtgccggcgttgttatttgtggttacgattctattctctgtatcggacacttcctaataatactagtcaacatcaccatcatggaagccttcagatcatctctcgtgtaagtgacaatcctgtgttcagagaaaaggtagtctcgtgttgtgattaactgactgatggcctgcaaaaatccacaggacggtatgggtctcatcgcctgaaactcactcagagcgaaagttcgacctcgagttaaccattgctcaactcaaggtcggtcgactccgtcgagaaatcactatgcatctgatcaaaaatccctgatacaaacgccctgctgatgacgattctgccttacagggaaaacttgaacttatcaccggaattccatatgactatcaaagtctatcactcctacgatcggatgaaggcgagcttgtgagaagtttagaaggaaacgaccaaaataccttgggaagctttggagtcgtcggtgagctatcggaagatatggtcatctatttatgttcatgcctactgacttgagatgtttctgtcgtttttcacagattggaattgcatcaaggtcagatacatgaaaaatgacttcaccatttctctggcccacctcgcgcaatcttgatacatacatgggctgaaatttgtatcttgataactgcctcaaggtcgccaacttggatcccaacgccggtataggtggaaacttcacagacactagtcaagtcgacaagttcgagttaaccgaggaagagtatacgaagagaccaggtcagtatttgtctggatcggttttttttttgacttagtcttgacgtcttgcttcattttcaactgaccggctacaactgacacattgaatacaaatacaacaagatactcttcaaaactatctcaaaacaaacaagcttggccccaaatatgcttccacgtcggaaccggcaactcctactcctgttccatcaatacctattcagattcatcctggggaccggtgcgaggtcgtcacggctggagcagagatgaaacagcgaggaactattcgttttgtgggagagactcagtttggaacgggcaaaaatgcaggtgcatggattggagtagaggtggatgagccagttggaaagaacgacggttcggtggctggagtcagatatttcgattctaaacccggatatggcctttttgtaagtgtagtatccttttgtgcatttatccttatagtcaatgttcacaaccgattactgatcaattgcgcttcaactcctgcctcacttggttggtaggtacgaccggacaaggtcactgttggggactttcctgaagaatcccttttcgatgaagatgatgaggagatgtagatgcccttcgttgctttaagtgagcgtggtgaacgacctaaatgatgctttgacaatatagattctcggcgttttcaaattattcaaatatagcttaagataatctgtgttatgttgcgtatgttggtagtccttccgctcactttcctcatatggcatttcagtcaatctcatccatcagactatatttcactcagctattcattttgcctatctcttctgaatccatcctaacagcttttcaagaggaaaatgagtgacgatctttccgagggttcgtgttctttttgcttcagttccggcttcccgagcgttctactggatagtattcgctttaagcaggagagatcataaactctacatgatgagggtatctctcgtcagctctatgatatgaatccagggtcacacatgtcgaagtgttgtacatactttcagtagtaacatacaaacagattggaccctaactgtcctttccttttgatggctttacttctgaccccccgtagagctcctcgctttggcggacacacccgctgtatctagaaaacgaacatcctcaaggtcgtcttcaaagccgtcaaaacgacgaaaaccgtatgtgctgcttcacattcaatcgtattctccgtttctagtggtgttggacatggaaacacggggagtaaagacatgtctaacctgaagaggagtgagaagaaagatggtcttgcaatcggtaacatatttggcttgactgatgcctgatttctcaactgcgaaataggacaatggaggattccgacgatgaggaggaacaagttgccgagttggagagtgaggatgacgaggatggagcttctgcgttgtctaatccatatcctttagatggaatgtataaggacgaagccgatcgagcaaggtatgttcgactttgcttcactctttctcttcaagagtttcgatcaatggagtggcggacctgaacgatatgttttatgaaccttccttttctttccatctgaatcatctgtacaggattcaatcaatgcctgagctagaaagagaagagatcatcgcaactcgattgcaagaaaagcaggcttcgatcgataaacgacaactggatgccattatcgcgtcccgaaacgcgaaggaggatacgggtgtcgctcaagcagccaaacgtgagttttccttgtttgtctgtccatggtttaggggaccatcgtcttatccattccttgctaaatggagactgatgcgcacgtcatgatttgtcttattctctccttgtataggtcaacatacttccaccgggacatctcaggccaaaacttccaaattggaggtcctgaagaagaagcgattagaaaaagaacgacggatgactgagaaggtatgtttgtatcctgcttcttcatcactgcctcatcaagataaatccttgagaagccagactgaattgcctcaatggacatttatacgtagggtaaaggcaattattcaccaacgagaagaggcacatctggagagtcgagcgacgaagaggagggcggaatctctcgcttctcagaagatgaaatggaggagaaggctaagaaagctagggagatcattgggttagaagacttggaaagagttcgactgagtagacgacacttagcagatatgacttcatcgcctcactttgaggaatacgtcattggtatgtttgtggtcctgcctatttgcttttcttttttatctcttaagcattttgaaggagagaaccctgacggatgggtcgcgtatttaacatactaggaagctacgttcggtacatgatcggactcggtcccgacaaacgaaatacatacaggatatgtcagattgtcggtaagtaccgtcatcttctgtttcctgtttaaacccagttcggaagatatacttgagagcgcaagtctgacaaatgctgtttgtgttttacacgtaggtatcgaacgtggcaaattctatgaattcgaaaagatgagggacgaccgaaagctcacgctcaagcatggaaagtccgaacgaggcttcacgatggaacaagtgtcggaatctcatttcacattggtaagtttattccttgttgagctacaagaaggaagaaaaacgtgcgtcctgaggattaatatgacctcgatcaacaatttgtgtgatataggacgagttcagacgatggtccgagacaatgaaggcagacaagctccctctaccttcgagatcttcacttcaaaagaagaagaaagattgggaagaaattcgatcgagaaagttgacggatgtacgctttcagtttcttgacctttttatttcggtttccttggtagctttggttctctatgctgacagaacggcgtccttcttttcggtttcgttaggccgatatcaccgccatggtcaacaagaagaagaactcccaaggccgactgaagttgaaccaagcaaatttgaatttgaatcgacgcagagcagaacacacgatggcgatcaagcgacaagactacgaggcggccgaagaaatcgctctcgctattgccgctctccaagaggaggtcgcctccttgacgacgaacggtgattctttctctgcaggtggttacaacggtactgcttccggtggagagggtggagggctcatgggaaaggaggaagatctgatggccaaactgaatgagaagaacagaaagagtcaacaggatgcgatcaggaaggcagacgcggacagaagagaacaaagacgggctgccgccttgttgaagagtggaaacaaatcgttgttgtctcagtttagttcctctatttcttttcgaaacctctcgctccctatatctaaggtcaagaaggatttttattcacccgtttgctatgtttctcataggtcaaactctggaacgagcaccccgacagtcaggactttg

SEQ ID NO: 1539 - DNA, 1265 bp, Xanthophyllomyces dendrorhous
ccccgacagtcaggactttggacccaaaagacaagtgggggatcaaggagattgttctcacgcttgaactcgatctcggagaaggtttttgatcaggcttttttatgtttggttttttccaagaagagagaaagtcatgctattcattttcctttctgtttcctttctgtaaaagggggtgagggagagtttgtacagttattcatgatcttgtccttaacctcagaatgtctggaattacctgttatccttcatgagtatgtaagaacaagacgaggtgtaaggatttccattggcattaaggtatatacgagtattaaaaaaccagccggtttaagcagagtgataatgcattagggatgtcttcaataaggaaaggtagtctgagtagagacaagaaagaaggggcattcaaagagctgtgagattgatggggaggagaaagaagaatgccatgagaacattgcgaaaattgaatctagggcgtagcggtggtagtgttattggtagtagccggtgcgcccaagggtacactcataggagcgactggaccaggttgggccgttccattcgccttctttaaatccagttcctttcgttcggcatcatcgaaatcatcgtcgttcgcaccaccgaaggattgaggacagcaccctgcttgtttctttgtggtgttttctccggttttacctagaaaggtcgcgtcgagaaagaggtcaggtacaacatgcaagcaggatttagggaggttggttaatgagaagggcacatacagatgttgcaccagttttgtagagatacaatgaagcatgttcctgtgaatccatcaaccgataccgaatcttactctcagtctagatttcctcggggaatcctgccactatgtctgctctcgacttgagagaagagggaatgaacggaccgatggctccacagcaaacagccacgcatccttgatcatcagccatgtttttggtcttgagagtatagtttggaagtgtgagttcgttagaagagtccgggaataagagcttgtagttgaagttgaggttggtggacgaggtcgttattatatttgaggattaatgatggcggtgtaagttacgaggtttcaatcaatcaacgttttcgttcaaccggcactgcctgttggccccgatcgctcttccaaaacagttgaacgcctctcggagcatcttgattattctcttcggggctttagaaccgaaccgaatcgatcactcgccatcattatatatatatcc

SEQ ID NO: 1540 - DNA, 13254 bp, Xanthophyllomyces dendrorhous
tcattatatatatatcctttcttttgagataacctgtacacctgatgtacacagacacatatactctttgtcgctttctctcggtttgcaaggctgtaacgagggtacatgacgtcacgcaagcaaggaaagaatagtactcaatacggatacatcaccatgcatattcttctatttagccggctttatgtttccctaaagacaaggagagagatgcacagagaggtggaaacggcattttgagagagaaagaaaaaggaaagagatcgcaggtatatcctatgcttggacacgaagagatgcaaacacaacctatctaatcacaaacatgcgtatcctgttttcaaacagaccacaagtgcgcaaacccgaaacagcctcatcagtttcatcgccccctttgctacatatcatgagaagagtaactaagaaaagaaataaacgatctcacctccgtcaaccaagacatcggaaccggtcatgaacataaagttatcactgcacatcgccaccacggattttccgatgtcctgagcggtcgccatcctatttcccgtcgaaggcccaaatcaaacgagaagaaacaaccagggaaacaaacaatataaagatgtttgaacatcagttatgtgtgttgtttgaatccgtcgttcgtgaaagggggcaggataaaggatcatgcacgtacctgccgagtggggttcggtagacccattcatccacccaagtcttgtcgacagttgcaagctgaaacagagaggaagagaggagaagaaggaacagatatgcaagaagacggaaagtttagtttcagtagaagaaattgataaaccacaaatggaaaacttgaagttttgatagggacaagattcataccatgtccgtagcaacatatctgagcaacagacaagacaaaataagtgtccgggcgagagagagaagtcgatgaaaatcagttataagattcagtagttcattgagcaagtatatcaagggacattaagtctcttacccgggagagatgcagttgattcggaaccctaacggcgcccattcgatagccaaggactggagagaactccatccatcaaagtaagatgtgttagttctcctttgcttcgatctgaccgtcggttcaggaccagcgcaccttagagaaagccgtcacggcagcctctgaaaaagggaataagaacaagatataggttgggaaagaccaggaaggtaagtgcataaactaccaccaagataaacctgatcgagaaatttgacgtactagaagcattataagcggcttgcctatagagtatcatttccatcgagaaggaatatcaagagaggcaaagcggttcgttcattcagagagaagagaacacacatacgagagaaaaccgatcgaaaaaagatcactcacttttgaggggacatggcaacatggccactaacactagaaacaaccaaaccgacctttccttccaggcttcctttcgtcttttcctctccggcaggaagccaggtgttgacacattcccgcatcagataatacggtccgaacgtgttgactcctattgttgtccccgacaaagcgatgatcacccgggttaaccaaacaatttctcgtctgtctctccccaaagattacaaagaagcaagaatcagctgctaaaaagaacggaactcgccaaagatgttcaacatctcgtcgtctgtcatgttttctgcctccttccatagcgcaattcctgcgtttgcgactacgatgtccaaacttccttccagtccggattgaaggattgcaggcagaagagcctgataggatttcgattctgaaccgttcagttgaaaagctttgaattgacgatctgggaactctgattgaagatcttgaagcagagcatccacctccgatttcggagtcgaaccatatgtcaatgcgatgtttgctccagctaaagttgcgttcatccagccaaagcggccccatcgagatcgaagatgatagtgaaaatcggtgactgaggacgatataagactgagaagacaaacctgtggccatctccttgacgatggcaagccctattcctcggtttccacctatagaatgataaccatcaatagattttcagcctactgtgagttctactttcctctgaaactttccaaccttgattccgagagaataccaggcaagacgaggcaaagacgagggctgtaggacgaaccggtaattaaagcaatttttccagaataatcgatagtagcaggcatgtcagtcaagtctcgaagatgtagagaaagatgggttgaagaatgagtgggtgcaagatggtgtgaatgagagaaagtataaaacagacaaaaactcaagagatggacgaaacagatctccggagataactcgtccggaaaggcaagatctccggcccggcgttcgccggaagcgactaggctttgttatacatcttcttcctttagagtttttcctttggtcttttccatgcgatatgttcaggactcatagatcgacaagagataaagaggcaagaagaaggaagggtgagagaaagagaaagtagaagagagttaaggcgaggtggaaggtggaaggtggtgtagtagtggagaggaggggagggtgattggagttgagctgagctgaactatgtagattggagttggattggactggattggagagtggatagaagggaaaaggagcagattccgaaagagcccaagaaggacgaaagcatagagagatgaagaggtaataaagaacaggaaggatagaagacactggagcaaagccaaaggttccgaggtttgtacgattttttttggtagagaaagtcattgtttatgataatttttttgggttttgtatggaattatgtcaaggaacgaatagagtaagaatggactcgaagacagatagaatttttcgaaagagaagaaacacatagcagcgaaagaaagtaaaaaggagcagagggacaagaaaagaaaagaatataaacaaaagacgacagacccgacaggtcactcaatcatcgtcttcatcatcaccgaaagcttcccgcatccctcgagcgccttcctcctcttctctagcggtcatctcccgggcggactgctcgaatcgttcgatcattcccgtccactcaccagaggcaagttcggggaatcgaccaatggcggctcgggcaaaggccaacaatctctcgttttctccttccaacacttccaccttgttctctaacgtcttgacatgctcaagctttcggatcctcgatcgcctggcagcgagcgtgttctgtcgtcgtttgaactcgatcgagtttgccaggttttccgggagtggctcgtcctcaccgggtatcgacatcaaggaaagcacgggggtggaagaggtagaggcggaggaagcgtcaggagtcgcatcagtcgagaccctctttttcttattaccgcttttgccagcttgtcgtgcttcaaaggcagcaggaattcttcttttgctcgtcgcactcggtccggcgtaggttctctcttggataggtgcgtccaagtcgagaagctggtcggcctgtatgccttttcggtgtccagtaggggcagatgatcggcgaggcgcaggtcgaggagcagcagaaatagtacgggaggggaaaggcgaagagttctgtcggacaaggccaagaggaggggtctgggagggagcgtgagtagagggaagagggggcgagcaggcctcaggagagatcgtcaaggacggtggaagaacggaaggaagggacaaggacggagagggatgaggggtagaagtagcgacagtagcgacaacaggggctgcaggagcggcaggggtgacggaagcaacagcgttcgaggtggatgactttgaagttgggaacagggggagatcaccaaacagggaaggtccgtcaaagatgaaatcaaagttatcatcattgaaggagctgtagagatcaacaagtttgaaaagatgttagcggggtagtcagtttcaagacgtcaacaaacggaaagtacgtacagcgcgacgtcatcgataccagcctgtgcacccgaatctccaaacaaactagcactcgcccactcgggggaagcagtaaagttggaaagaggggaatagtcaaggttgggcgtaggcgagccgggagcgagagggatctgatcaaagagattgccaagaatgtcgagagagacggaagggtcgaaaggagcggtggaggctggtgtttgttacagaggaaggaaaaggaaagaggaagtggaagacaaaggggatcagaacaaaaccatggacagacacgaaaaggtcgaaagatatacacacctgaacctccgaccatatcttgaaagccagactcgttcagaaggggactggtctgaccggtctgacaactctgttcgccttgctgatgggccggctgagaaaaggcgccaaagccaaaggccttgttttgtagaagagccatatcgtcaaaagtgtgatgtgggggtttgttagaaagataggagaaagaagagaagttgtcgggggaatcgacggtgatgacgggcacggtagcaggggctatggaccggttgggaaggggaggaagttcggattgatgcgtgcgttgtgggcgcaggacagtgtggacggggttggttgaggaatcttgtgtggacaagacggcgggtgctgttttcgtttgttctggtttttttcgaattggtataggcggaagacgggtagggagacctaaggagatgttgttggcattttgtcagtaaggaagtgaggtcgaaaaagaagatgtatagatagacagccgaaagaactcaccatttttgtggaggatggaaactaggttagtttggtggccgaagccgggtggtagaggtgttacgggcctattgatagagaagaataggcggaacgagatcgaggcaaggcaaagacaaccaaaccgaccaaggaaagcaaagcaaaagacaagaaggttaacaaacaagatcagataagaatgttctgggtggatttgaagaattgagatctgcgggcgcctcggttctaatttctctctagtcgaatttaatgcacgcgcagtgattcctcggaattacttccgatacaagggtttgaccgaatatgcgcagcagattaccggagttcggtggtagggaagagaaggcgaatccccgaagcaagaccggatggaatatggacgatggaagaacacttacgcatgttgggtggggagacaaaagtcaaaacctgtactggatgtacgggaaaagtagcttgagggggggacactaaaggatgagagagaaacgcatgaaaagattagtcagaaagaaaatccgcgtggtacgggagtaatagattacgaaagtgataggaatagaaaggaaaaaagtggccacgaccaattcttcctgtcaactttttttctatcctctcttctctccttctcaaaaacgcttttgttcggagctagaaaagaaagagagaagaaagaagaaagaaagggaaaaaaaagaaggaagaggacgcgagaaggaagagaagaaaacacctactggttatttaaactgagtgaaattgggggcggttctcggggaaagaactggttgcttaggcgaagaaggacattataaccgtatttctgttcgtgttgttgtgtatcagatgggatttggagaactggtctctgggttcagcagggcaaagataggtgccctgagggagtgtgttgaggatttggaagagaaagaggaggaaagataaacttgacggaaacaaactgaaggtgatggacgaaagagaaagaggaagggagagatgagaggaagaaaagacgagggcgagaaaaaagaggaaatcaacgaaaaagggacagtatcaggacaggaaagaggggaaaacgccagagattgccaatcagaaacggataactctactgcgcgctgaaaactatgcagatccagcctcggccttggctgtctttaccccgaggaagggctgatgaagggcaaacatggttacattcgggcttcacttgggaacaatctggggcagacagctatgcaacttgggatcactcacagtctcgttcacgtgtttcccttgaggtcatcgggacaccaaaaaaatgccccgaccctacccatgatatggacaaatcggggtcagctgtgcaaaaacttatgtaaatagattatcttttatttcatctttcgtttattttatttcatttcgtccttactcgacttaccgcctggtccgcggaccgcctggtccgcggaccgcctgtgggtatatgtgtgatgtgtcctccggtctctcgtgtccgtagagttcttttcttcttctctcatctctttctctctgcccaccatctacattaaatcctcccttcctactttccaatcatgtctgctagcacactcccaaagcttaccgcccggacggtgaggaacgcttgcaagcttctgaagagccctccgaccatcagggtcgtcgcttgtcctttcaggtcagtcctttcgattttcgtgtcatgacatctttcagtccagttctcacaaagccatgttcccttttttttctctccatcttgcctcgttgcttgtcaatcgttcatcactcaattgattatttggctcatattcagtggtggtcaggttcgttgtctcttcgtccttttacacttgataacatatttgaagcccaaatgtttgcgttcgaccctctctgatcacttttttttgtttggttttaaacccttcagcccaggccaggaacagatatcgctccttcgaccctcctctcggctgggttgatccctcaactcgaggctctccactggaaagtcaacttccagaagccgttgcctgaatcttttctcgcgttgaacccaaaggatgatccgccgattggcaggatgcagaacccgcgcagtgtcagcaaggtctgcaaagaggtcagcaaacaagtcagcgaggcttgcaaggctggtgaattgccattgactcttggtggagaccacagtctggtaagcgtttcttggtttccgttctctgttacatgactttgtctcttttggctgatgcttcttgatgtgtgacactatataggcaatgggaacgattgctggaactatgaggtgcgcaactttgtgctcatccagttcatctctgtatgtcttagcttgggccactaatatggatattggttctctcgacgttcttattctcgccgtccgaacagcaagtaccctaacgcctgtgtcgtctgggtatgttctctctccttcctctgctttctccttattttttctttttctatccctcaccaagcttactgcatatacctctcaggttgacgcacacgccgacattaacactcctaactcgacagagtccggtaaccttcacggatgccctgtttccttcctgtgtgtatctctatttctctcttgcgtggtcctcgaaagcaaaaaaagtctctttcgctcacaacagagaacccccgtccgcctctgtatagacttggtttgaagggagcaaaggatctcgctcccttctctgaatggctttcgccgtgcttggacgcaaagtccattgtctacattggccgtctgtcccttccactcttccctgctttctcaataaacacctctggttgacatccttcatgattatctctcctacgtagtccgagatgttgatcctgccgagaaggctatcctccgagagaacaacatcaaggcattcagtatgcacgatgtcgataagcacggaattggcaaagttgtcgagatggcattggaagctgtgaaccccaacggagaccgaccgatccacttgacctacgacgtcgacgccttggatgtttgttcaatctattgtctcgctgtgtctcttttcatttcagtaggacctggctgattccttgttcgtccatctatgacagcccgcggtggctccttcgaccggaaccccggtccgaggaggtctttccttcagagaaggccactacattgtcgaggccattgccgagaccggtatgctcgtcgcgtcagtcttttccgctctctctttcccctcttgtcgcctgtcaaggaggttgacttggactaatgcctcatcctgcttgattctttgttacagtttggatatcatggttcgtcgttgggtcttgtctcgaagacggcttcgattttgaacgtacacgctgacttttcctcctgtctgtcttccttctttcccatgatcctacgatcttatacaacaggaggtgaacccttctttgcgagatgagctttcggtccagcagacggtagccgtcggatgctcccttgctcgatctgctcttggtgcgctctttttcagcctttttgttttttttttttgtttcatctgattctactttcgctgatgcacttgcgcgtatggcctgtactgatacgctctttcgactttgttttacaggcgagaccttgctctagaggaacaaaaagaactgaaaccatacgggtctcagcttgtggaagcagaaggaatagaaagaagaatgataataagaagcaaagagataaaaacgatgaaggtggagaaaagatatgaggtacgacgggatcactggagatagatctcgtgtcgtcttggttgatacccaggatatatatatgaacatttcatcttctctgtttcactctcgtttgtctctacttggattctttgtgcatcatcgtcaccatgaagcgagattgagaatcggtctggccgtctgaatgatgtctttatttggttgagccattcaagattgatctttgcatgaatttatatactaatcgttttaatttttatatcggcttgagtcaaagtccccctactcgttgatctttgcgaggatgtcagagtccttgaagaggaagtactcctgtagttttcgcggccaaaggaggagaaaatagaaggctcgttagtttgttttacattcatggtttccatcgttgcaactgactacatcacacacgcgcaccagccgattctccggaaaaagagaagaggcaaacacagagacaaggaaaagaaaaagagaaagaaagagaaaaacgagaaagaacgaacctcctcgccgagcttaatggagtttcctccccatccaggaaggagcactcgatcaccggcctggacggcgcagggctggacgacgccctcctgtgttgttgcacaagcgcagaaggtgcgagatagatagcagggcatgtatgtgtgtcagtatgataacgaaagaaaagaacggatatctgtagatcgtgagaggaggatatagcgagtggggaaaaaggaggaacgaacggcgttgggagctccgggtccgacggcaatgacggtagcctccggcaacgggttggccgtcacggacgagggcaaaaagattcccgacgcggttttctattttaaggaaagagtgtcgttaccggaaatggaaacatgacattattatcagcaagaaacacgtcgaaacaaggcttaagaagagaaggaggggaaggaaaggaaggaggaaaaaaattgggaacgtacggtctccggcttgaatcgctggacgaggacccgatcgaagagagggacgagggacttgatgtttttgaatgtagcagactgtgtatttataaaatgacagatagtggttagccaaggatctaacacgaatacagattgctcttaaaaagacatgagaacataccatgatgagtgatcaactggactgatggtagatggaggttagggaaagaaagaacagactaggaaataagaaaaagcgaactacaaaaaagttgcgattttcaatacggttgtttttttggaaatttctagaaaatccttttttctttttctttttcttttccgcacatcgtctttctcttcatcaccacccatccatccatccacccaacgattcactcacagatgaacagactttcagctatcaccagggctcttcctaggtcctccaagccggttctctccagagcttatgcttcccacaaggagatcaagttctctaacgatggccgagccgctatgctccgaggagtcgacatcctcgccaacgccgtcagcgtcactttgggccccaaaggtgggttcttggggttccctcttctttggtttctgcttcttgttttggttgtcgatgtacgattctggtcgcacttctgatgcgtcttgatctttatcttttgtcgagacaggccgaaatgtgatcatcgagcagccttacggtgctcccaagatcaccaagggtaagctcgcttttcagctttcgatcggactctcagcttgttcgcttatgcttcccatcatctgctttccttagatggtgtcactgtcgccaaggctatcgtcctccaggacaagttcgagaacctcggtgctcggtgagtaaagtccttctttcttgctttctcttctcgcgtcttttttcgaaacagattctgtagagacggacgtccgcaagtatatctatgagcaagtttctgatcggcttgtctttcttcactttgcggtatcgcctctgcgttcaaccgacagactcgtccaggacgtcgctagcaagaccaacgaggtcgccggagacggaaccaccaccgccaccgtgctcgcccgggcaatctatgccgaggatgtcaagaccgttgctgccggtaagtctaatttcggttttacgcccaagggaaaagacagaaggaaaagccacccacaaaagcttacactgactgtttggccgaacttctgttgttgttgttgttttccgtattaatcgtaggttgcaaccctatggatctccgacgaggttcccagcgagctgtcgagcgggttcttgaggtcttggaggccaacaagcgagtcattactaccagcgctgagatcgcccaggtgagtttttttttttttgtgtaaacaaaatgctcggattttcggcgaaaaactaagatcttaactctgtggttgctcttctccttccctccccatatcaaggtcgccaccatctctgccaacggagatacccacatcgggaacttgatcgccaacgcgatggagaaggtcggtagggaaggagtcatcaccgtcaaggagggaaagaccatcgacgacacggtaagttgattccggctctgctgcaaaacgcgtttgatccagacgaaacgaaatggaagatgtgaaactaacgcgcgcgcgcgcgcgctcgctctctcgcgttttcttttgccatttgctttcttttcttctcttttcttttctttttctttgatggaaacgggttaatctttgaaaggtcgagatctccgagggcatgcgattcgatcgaggatacatctcaccttactttatcaccgacctcaaggctcagaaggtcgagttcgagaagccgttgatccttctgtctgagaagaagatctctgttctccaggacctgctccctacgctcgagtacgccgcccaggcgaaacgaccgttgttgatcatcgcggaggacgtcgatcaggaggctctggccgcgttggtgctcaacaagctccggggtcagctcctggtggccgctgtgaaggcgcccgggttcggtgacaaccgaaagtcgatcctcggtgatctcgccatcctgacgggtggggtggtgttcaacgacgagatcgacgtcaagctcgagcgcgcccagccggaccatctcggttcggccggctcggtcacgatcaccaaggacgacaccttgctcctccacggatcgggtgacaaggcgaacgtcgacgcccgaaccgagcagctcaggaacctgatcgccgatgggtcgacctcggattacgaccgaagcaagctccaggagcggctcgccaagttgtcgggcggggtggccgtcatccgggtcggtggctcgtccgaggtcgaggtgggtgagaagaaggacaggtacgacgacgcgttgaacgccactcgggcggccgtcgaggagggtatcctcccgggtggagggacggcgttgctcaaggcgtcgctcgcgttggacgacgtcaagtttgacaactttgatcagtccctcgggatctcgatgatccgaaaggcgatcgtccgaccgtgcaagcagatcgtcgataacgccggtgaggagggttccgtcgtggtcggccggctgttggaaaagtacggccaggagttccagatgggttacgatgcctcggtgggagagtacgtcgacatgatcgagaagggtattctcgatcctctcaaggtcgtccgaaccgccttggttgatgccagcgggtgggtgtcttttcttttattttcgtctgcccttgttttctccccttttggaccgaatcggaactaacggacgtggccttgtcttctctctctctctctctctctctgtctacatttgacactcaagagtcgcaagtctgctgacgacatccgaagcgtgcatcgtcgacgcaccggaggagaagaccggaccttcccctgccggagggatgggcggtatgggaggaatgggaggcatgggtggtggattctaagaagaagaagaagaagacgaagaagaagaagaagacgaagaagaagaagaaaaacgcttttcacgttgtctcgtgtgtgtgtgtgtgtgtgtgcacacgcgcatgtgaaaaaggtggaggtggcaagagaaggaagagaaaaacaaaacaaaaaaacaaagctcaactcatcaaatgtttcttacagatctcatcattctcgccgtcgattcgagaacgtccagagctggcagtgcaaaggagagtctcccgttggcaagtgacaagaaaagaaacgagcaaagcgacaaagacaacgttcaccttttgcgccttccttccttcctttttttttctttttcttttttcctctttccccctcatggttgaaagcactgcttcgcgtgtgtctgtggttcgctcagagacaagatgagaaagcccgatcggaacgggacgcacagtgaattgtcaacataagtatctgttctccgttcacctagagcgagaatatggtatcgaataatcgaataccgaatacaaacaacaacaagagggaagagagagaagagagggaagagaaagagagaaagagagaaagagagaaagagagaaagagagaaagagagaaagagagaaagagagaaagagaaaaggggggggggggaggatatta

SEQ ID NO: 1541 - DNA, 998 bp, Xanthophyllomyces dendrorhous
aattaaaaaaaaaattgaaggaaaaaaaaaaggaaaaggaaaaggaaaagtattgaggaaaaatttgggaaattgagaaaaatgagaaaatgagagagttgactgatgtatccgagagtgggacagaccgggaaggcgtgaatggattctatagagaagaaatgaagaggctaggccgatggagtgaaatttcaatgagaaaagatgaaagtgaagagtgaaaggtaaaagatgaaataagatagagataaataaagtgtgaggaaaatataacaagcgagggatcaggatcggatcagagttgaatcggaagacgtcacgagaagataaggagacacaagagaatggcaaagacaaagaaagtctaatgataaatagtgtttcaaagggatgaactttgggcagtgagaaggatgatgagagcacatggaacggagaggacagacaacttggaaaagggaggagagagagagagagagaagaaagagaaaatatgcttgaaagaaagaaaccgaaagggaggggcgggcgagccgacgaaacgggaacgggatcggaaacagaaacataccaacccaccgactaaaaagcaaagggaaaacactatcaactcaaactgctccgtaggcgtattcgccttgatcgtggttggtatgctcgccttcatagccccagatgacctgtgtgaattgatctggttcctgtcctcctcctcctcctcctcctgccggctgctgctgctgttgctgctgccgaggagaaggatggaaggatgaatcggcccaaccggcaccgttggctttggccaggtcgaacgacggtggtcctccagggtagacatgatggtctcttctgaaggaggcgtttgttaacctggacgaggtcggttccccggtggacggcctgcctaacgggtgtccttggaagccgtcagaaccggccgatgtggaggggccgctgatgggctggtggaaccctgttcctgatgatccctgggg

SEQ ID NO: 1542 - DNA, 2034 bp, Xanthophyllomyces dendrorhous
ctgatgatccctggggggcggacgaagggggtgggggatagtacgaattggtggacgagctgtgatagctggtgaacggccggttcgaatgattgtccatcggctgacggatgttgtgagagggttgggtgctgggttcgaacgcgcgttggtcgtacgtgctgtttgcctggtggggatgagggtggaacggatagaacggttgtggctggggcggtgggggaggtggcaaggaagctgaagctgaagaagacaaaagaccggatgcgtatgaggatctaccttctgatggagggatcgcgtacgtctgacgagcgccgccggcctgaatccgaggagaaacgattaacgattcggaatcatacggtggttggtcctggtacggacgtctagacgagcttggtcgattattggggtatccgtctgaggaggacgacgctagcgtaagagaagcagaggcttgggcggagccaggagcaggggcagaagtaggagcaggagcaggggcagggagagcgggagcagaaagagcagtgggaggagcaggatgaggatacgaagggtttgtaaacgcggcagccgaggcgctcatcgggatgggtatcgagtctgagtttgtgtttgtgtttgtgtttgtttccggagagacatacgacccgggctggaggtgtgtggccatatacctggcccgggagccaggtcgataggagtccagactggtaccggatatggggaacgagtcggatgtggctgtcggggctgggtttccgtacgggtggtagtttctggacgctctggaggacgagccccaggagccatagtcagaaccgggaactccatgggcgtgcgaataccgacggatctctccccctggcggtactggtggtgctgagcctcctgccgagccggctaccgagtatgtctgatggacgtctgactgctggatcggcagaggtcgtacagcgctggtggacgaggtggggaagccggtgtcgaccatggggaaggagccggaggtggagtctgcgctgcctggtggctctccgctgggataaccgttggggatggggtgtgggtgtgggtgtgggtgtgggtgtgattgtggagatttatcgtacggggcttgatacgacgggaaatacggggagggtgagatgatgaacggggcttcggcgccggccgggtagaacggctctgtaggtgttgccggtgagattgtgtggtactggttctgggactgcttctgggtcgtcagttggtttggtggcaacgcgcggatggtcatcgttcttgttttcgactttgctctcgatctttggtcttgtttcgatctcgagccggtgatgaaaggcgaggaggatgaaaccatggggagggcggctggtaggggtgtgtgcctgaggggaggagataacggttgtttttctggttcacccctttgtggtggtgtggtgttgtgttgaaggggggagaggggggagggagagagagagagagagagagagaaaggaggggaaaagagaaagggaacaatataggcgggtgaggtgcggccgacaagttggaagcaagcttgataagcacagacaagataggaagacacaggagtagagataaagaacaggacgtaccaatacctgagcacgccggaggcatcctcttcgatctttggagggtctctgaagaacgtgtcccggagcttttgagggcacacccaaggaaggaagaaaggcggtcaagagaaaggaaagagggaacacggaagatggtggggacgacggtgtgaatcctttttttcaagggaggaaagaaacatctgacaaacgggagattcgatcgacatacgtattctggattgatctcgagcgaggcgagctctggtagactggaaggtgtgcgcaaccggccgttcattgcgtcttcgagggtgtagtatgataccaggtgttgggcgaccccgttgatgctggccgacattgtctgggagagggcggggggaggttgtgtttgcgagaaagaaggatggggtagggg

SEQ ID NO: 1543 - DNA, 537 bp, Xanthophyllomyces dendrorhous
gaaggatggggtaggggtaggggtaaaggtaaaggtagaacggagaagagcgcaaaaggagagcagagtgagtcggaggaacggggacatgcccaagtggtgcgaaggaggaaggagaggaggagaaagaagaagaaaaaaaaggacaaggacaaggaaacgagtacgaactctctttacgagaccaccctctttgaaacggacggaggcggtgagagagccgacgagctggcgttctcttgcctgttctaacgagcgggtcatgccggagggaccgtcgtggcgaccaagctggtgggtgtctgctccggcggtgctcggtctggaatcatctgggctgacttcgttcggactaaagtcgttagggtcatctatccgggaggaaaggatctggtttccttgggcgtccacggtgtttgccgagtaggacgtcaacgcggccatgtctttttctgttcgtttctcgacctctctgtagacctgtggggggggatagagtgaaggggacgaggtcagcagctttttcttcttcttctt

SEQ ID NO: 1544 - DNA, 553 bp, Xanthophyllomyces dendrorhous
aggagagaaaagaagaggaaaaaagagctatggattggaaagagatgttttctgtttatctatatatgttggactgactaagaagttgcttaggatccgggatggagaccagaccaagccgtcggtccatcgtttcatcccgctttcgccttcgtcaaagacctggagggggggggaagcaaagatgggaggtaaaagaaaaagaaagggaagaagaaagagaaagatacggattgagtaacatggtctggcagaaatgagagatggtcgacgagcactcacaaaaacggctccggattgaatcatgcctcgttctttctcagacagtcgcctggttactctcgggatgaggccttgtttggctgcctggaagatgacgagagcatcgagtgtggttctttttagggggggaagagaatggatgtatgtgtgagatgcgggttgatttgaacgagcgaagaacgggggggggggcaaagaaagatgatgggcaagatagagagatggagggttttcggacagacacggccggacttactcgacgatacccctg

SEQ ID NO: 1545 - DNA, 571 bp, Xanthophyllomyces dendrorhous
cggttttaggggggaggggcggggggcgaagatagagagataataaagagagagaataaagagagaacgaatgaaagaatgagaagatcggggttggacgtgccaagggatgaactgatgggtgtacctccgtgttggaaccgaaccgggcaaaagacgtgggcaaaagacgtgggcgatacagatactgatcgggctgggtgagagcgtgtgtgtgtgtgtgagggtgcgttgacgacgaccacaacgacgacgacgacgaagaacacgaacgggatggaaagttgaatcaaacgtcgaacggacaagaaaggatgagggaagcaaggcggagggatgaaggaatgacgatgaacgttctgcgttcttgaactctcttttcttttcgtctctctttctctttcttcttggtggctttgcttgctagctgtcttgtcttcttgttccccctcgttggatgtgtgtgggtgatgttatttgatgttcttttggccgatgcaatccgggtgggagaacatgggagtcagtgtgttagcccgccgggtcaggtaaatctcggacgcgccagagg

SEQ ID NO: 1546 - DNA, 1268 bp, Xanthophyllomyces dendrorhous
gtgcctggtgcctggctcgtccaacgtggcggcgacttccaggcaccagacctcggggcctaggcacacaggcacacccacacactcagaacaatacaaaaacgccacgtcttccttcttcttcctcgtgcgttggccgcgccagaccaaccttctaatgaaagcacgtgagtccagaaattcggtcaacttcccgacgatcttccgctttccgccttccgccctccgcctgttgccggcggagagcgtatcgaggtgattgcatgtctttcaattaaatcattatcgtcgtcatcatccgctcgcaccgcacacaccgcccacacccacgcccacgcggctctcgtttccaccgagagaacccacataggcacatgtcgatcgattggtaatcggccgccgaggtcttgaaccttaatccccgttcgacctcttccgcctcctcaatgaaccctctccgagacttggcgaaccgtcaggtcccagccgaagcattccagggcaatcagatccctgctgcgctctccaccgcaggcgataaggccctcctggtcaccggatggaccttttgtgtgcgtcgccagctgcgcgtatggatgtactttatgctcgtgccttcggacgtaaccatgggcataaccatgatcaccacgttaaccctccctcttaaccctaaccgacctccaaggcctttcccccccacacgtcatcatctctcgtcgcctccttctttttcctcaccgcccgttcgacaacatccggctcgcctcaacctcacgctgtatccatcatctaaccatcctctgcccactctctactctaatctctccagccaccctcaagatgtccgtgttctctgggaacccaacacagcccaccaccgcggagcagagacagttcgaactaaaccagatgattctcatcagagaggctgccatcgatggtaacctcggtttcttgtttggcctccttctctttccatccatgctcaccccttggctttgtccctcatctccacaggaatccagatcttctcggtagcatctccagtgatctatctgctcaactcgacgcgcacaaagatgttttccgtaaacggtctcctcagagcgtgtcagtccgtttttgttctttttttatatctttttttttttttaattttaattttaatttttaccttgctttgtatttcatccaaccatcgttggtttctcgtgctcatccatcctggttgttcctattctatcgtcttctcttctctcttgatc

SEQ ID NO: 1547 - DNA, 1020 bp, Xanthophyllomyces dendrorhous
tccctcctccctcctcccccctctccgttcatgtttcgtcacactccagccgctataggagtcgcagccgtcggtccgtccgtaggagcctgtcttgccgccttgcaactgaactttgtaaagacaaaggaagaagtcaactctagagtgctcgccctcaagtccgacgtcagtgcctttagccttgtcatctcgacaccaccttctctcttcgccctttgactgacaaacatctctcggataaaacatccaccaacagtttggaaaaactcagatggacgactacactctcatcggcggcgtcgtaggttcactcttcaccaccgtacgttccctctttttgcctttgctctagtgtgtatcctgcggatgaagcgtctgaaaaaacgtatacatctgtctatctctctctgtctctctttctttctatcacccacatccacacccaaaggcctttgcgttgaaaagggcgagattaccctgggcactcgtcggtggtggtggactgggtatcgccggtggactcgtcgcgtcagtatctcttccgtagcccttttctcctccccctctctctctcatatgtgccacccaatcatctcaccctgattctcactctcactctcacgcccacactctcaccctcgaccatccaccaaaatagacactacatcacagaattccaaaagacaagtaccgccccgacagtgtccccgtcggcgtcctctccatcctcctcctcctctcctgtcacgactccgagagtgtgaactgtctttcctggctctttctgccttttctccggaacaaactataagtatgatcgaataaacatatatatacatacgagacctccaacccgatggtccgggagaggaaaattggatttcgtcaaaacggctggagaggaggaggaggagatagagagaatggaagaaaggaaagaaagaagaaacctagatcgggtattcagatcgcaaaggacatggaaagtaaaaaaaaaaaagaagaagaagaagaaga

SEQ ID NO: 1548 - DNA, 54611 bp, Xanthophyllomyces dendrorhous
tcctcctcctcttcttcttcttcttcttcttcttcttcttcttcttcttcttcttcttcttcttcttcttcctcctcttcttcctccaaaagattgtgtaaaggctgtccgtgaacgtacgagctgataccccgaaaatcaagatacacccacacaaagacgaaaaacaaaacaaaacaaaacatgaggtgatcagatcatcgttcattctcattctcagacactctctcactcgactgggctgagcctaaacccacctgacaggaacgaacagatccctcagcactcggatgattcgctcatccccgttcgaccaggatcttgcgccatccgtcgttcgtctctctcccgatggttcctcccggggcctcgtcgggcggaccacctcgcccagatacatagacacccccacggccaagggcatcacctcggccacaacaggcctctgaagcggaacgacctcctggcgcccgccacctccggacgcctggccagaacgcaccaagagtggcgcgcccaatggggccagatcgttcctggcctcgtccagatcgcaagcagggtcggtcgtcaggcggtgactctccgcccggacgtcgggtcgcggaaagattcggagtggttcgacaccagctttcgttcgctcatcctcgcctctacgaccacgaccaccaccatcaccaccatcaccaccactctcacccacccggaggagttctttttgcgcggatcccgttcccgatcggaccatgccggtcgtatcaatcgaccgtccggtcggaccgaccgatacgctctctccagactcggtcgtcactcggaccacaggcgtaagagaataaacggatccaacaagcttcggtccaggttccgggggttcactaaggtcacgcacgatcggtcgcgcaatacccgtacaagattcggccggggatctgaccgggtttgttgtgtcttttgtttctaatttttttttgggtcgtcaaccattttaatcatgaggtattaatcgtcattttttttgaattcaattcaatcccatcccggagcatcagtcaaatggtcagccttcgttacttttcccacaaagaaaaacaaggaaaatcaagacgggatagatagcaaaaagagagagagagactttttttttcggacgaacctctgaactcttgcatatatcggtcgattctatctctcacgaccgcttctctagtcatcgccgccgccctcgtctttctcggagcgtcatcatccttctcgtccttctcgtcctttccaggatttcctgtaacgccctgattcgacttcacgagacccttcctgatgttgacaagactcggttccgatctcgagccgtgaacccctctcggtcttattcccggctccggcctcaactccgaccgatcgattgcggtagaagaatgcgaccggggaagattcgtccggtcgtccagatgggtagagtacgatctgtgaaacaccaggtgttgtcgagtcgaccgatcctgccagactgccgggtcactcttctcatctcgtcctagttctcgatttggttctggttctggttctggttctcgttctcgttctcgttctcgctctcgctcccgacgaatccgaaccggatccttgcctgcccttttctgtttcgatcgtctagggttgaacaagttaaagttgatctgcttcctcggaggtggagcgacaagctgacgttgatactcgattgggacctacaccaacggcgaacaagaaagtgttttccaccggtcacacatcgtttagtcatcacgatcaccatcctctcgacgacccaacgcaagaacaaccagagatgcgctcacgatctcctcaaacacgacatacaacgtgtccggtttggtcgggccctcctttcggctgatcgtcttgtactgaacctgattatccagataacatgccgagtaatgaataaggcttttcgtcagatcttgttccctggatgaacacctaccaaaaaaaaagaaaagaaaaagaagaataggcgaaaaggaaagaaagaaagaaagaaagaaagaaagaaagaaagaaagaaagaggaaatctattcacgatggcccagttgcactccctcgccgttgggtccacccggttcatccagcctgcgctaaacaaaagatctgcccaggcatcgacaaacgcttcttccatcgtcaccggttcacacacccgtggtcttcaaggcaaaataaaaattaaaaaaagaaagaaggaggaaagaccctcggtcagtggataccaaactctagaacctaagcctaaatccgactgaccggacatcatagtcaaacgcaggaaggttcttttgcgagctcttcaaacgttggtagacctgctctcgatctaagatttcaaaaagagtaaaagcatatgtatcagcccatcaatcacaactcccaaccgagttgacgcaagagaaagagatgccgaaaaagagaaagagtctgcctcgtacgttctggccagttggtgatctctttctggatgggcagaaacaggttcagcggatcggacagcgtgattccagagtctgggaatccagtgttagaaaaatcgttccacgtgatcgatgctcttttctcagccattttcgcctacattctcgatatgacaagccaaggagagagagagatcgagatcagttgagcgctgttcaggaagagaaagacaaaaaaaaagaaaaggaaagaaaaggaagacgaagagaggaaacaaaagagaaagccagagattgctcacagctctagaactctccgtcagatcaaattgcagctttccgctgaccggatcctccggtttattcagatcaagcgatcgttcatggttctccccgataaagtcaaacccatcttgagcaaagaacccccacttcttctctgccaacgtctcccacccagctcctccttcgtccttgtcccatccgtcgtcgtcgtcatcatcatccgcctcgccagccgcaagcgcgcagagagacccatgggatccaacccggtacgacggaagcgtagtgttcgggatgttcaacctttttctgtagtccgaagcaaagcggggacctctgttggaagcgaccgagcctgcttttgtctttacaggggccaccacgtctctcacccacgcaccacagacctcgtacccgtccgacgctctctccaactcgccaacccaggactctgccgtacggaagagctctaccgaatatgctcggacatctttccggaccagctctgaacgcacagatcgtccgtcctttcgaggatcaccagaaagccagacttggtcggaaacgatcgtcgccggatagttcttcgcccagctctgcagtcggggaggcagaggcaagttcttctggagggaagcaaaggattgggatcggatgaacgagagcaggagatgctcggtggcgagcgcggacttgacaaaatgtttctgagtgtcaacgagtgtcaaggtgaccggaagaccaaagaccagaggcctgagcgggtcgtagtaaacaacagagttcatcagcttggtaaacctatagatcgagcaaaagacattcaacctacccaaatagtcctccgataacgggaggtgtctgattgatagaaggaagggattgagtggttcgcactgctgctttgaaacgttcgacaagcgaagatgtactcacgcatccactcaaatgactatgtgccacaagcttggagaataaagtaagaagatcgacaaaaattggttgaacgagcgttccgagcttggcggcaaacgcaaaaatatgggtctgaggatgatcggcggctggaaaatgaatgtgcaaccaacagaaatgcacatcagcgggcagtgctcgataatgaaactgccgaaagagcttgacaccacaagaaaagaagaaggaaagaaagaaagaaggagaagcacacttacctctctcgctcttcctccactcggcatattggtccaaatcggccaaccccctcttttcctcatttcgttctcgaatctgtaagactctagcgagggcccatcggaggacccaggcgagttctcgctcacccgaaagcgaaatctcccgggcccaagtatcctcctgaggagtaggccgcggaatggtccagtcaaaagcggactgcacagaggcaacatacgtccggacaagggatttgattttctgacacgacagattcaccgcaagcgaggaaaataagagaggtgtttcaagaccttgtgtgattgcggtaggaggttgacgagcaagggctaacaatcagcctacactcttttggcgagggagggaaacagtgaatggtaagcaacacaaaagacggacctctcttagaaagttctgcgcagatggtctgcacgagaatacctagatcttccaggcccagtatctaagaaggcgaaacaagcaaagaaaaaatagagcaacaacttcgaggataagcctagattcccagagcaacgaaaccgacggaggaacccgaacgcaccacatcatttcgctcgctcataagaccccacttgatggttttccggccggtatcaaccaagggaatcgacgtgctggcaaatctccattctagttccgacgcttcatccaggtccgttggtctagcatcaaaagttgatggttttttagtttccgaccccggaggagataacggaagggctgttgagtttggtccgccggtgagacgacgacgagaaggtggagaaggtgtcgccggtatcgtttgtctgcctcttgtcttcctggagaggagaagagcttgatccgactcacttgagttgaagcttccagcttgagaagacttcccgctcaaactggatttctcatcagatgagttaccaccagcaccaccagcaccaccgacaacccctcgacggcctttgtaggacctcgactgttttcttctatttggagagagcgtgaacaaggacagcatcggatcagatattggcaagatgtatgcaagatatatatatatatatatgtatatatgtatatggatatgggaatgtggtacaacgatcaagtcaaagagcacaacgccctctctcaaagacaagcatgcaaacaaagagcaagactcttataaaagggatctggaggaggaaagaaatccatggcgactcaagataacataaccaggacggatcaagcataaagtcgagaacgtgcccctttttttccacccaggacccccttttttcccattaatggtttcatcttcctttcagccatctttcatcagtcttgttaacgtccatcatggcaattgaattcaaacaaccacacccacactcacactcacatatacgagacaagacattggatagaaccaataaatgattagacatgaaaagacaaaagataaaacagatacgataaactaagatagaaaattcaagattcagaatctatgacccaagcgtcgcgtagagttcgctgatatacacttcctccctctccctccttcaaggcctatatggtgtgaccatcataggcagctgtgctccaaagctttcttctcccttgatcctcggacggacaatcaagctgccagcatcaaaatataaggttatcagcgcatgagccaacggcccaaagatgacatgtaaataagcggaactgacaacgaaagcttctttataaagtttggccgagggtcgcaatgcgcaaacacgaacgatcgtaagagcacaaataaaacagctttgatcctgagttttcccgaaaacgcacacagaaaggacgatcagcatgacattcgactcatccttatcacagtctttgcaaaatgtctagaaactgactctacaagcgcaaatcgatagccactgttcatcccaaaagccgaccagtcaacaatcacatcttcaaaaaaaaaccccgaaaacatctagaacgtacacgcaagatctagggccactgataaaggtagacatatgggtccacacacccggcacttctttcgcggcatcactaaagttctcacccatccacctttcgggtctgaaatcatggtcgagcgtttgaacaatctccacagtcagctgtttgcattcaattgatgttggcagatgaagaagcacacaaacggattctaaaatcgagacaaacctgaagatctgaccatcaccaccccagatgtcgtccaaagtgttcaggttcaagattgctacagataaaaaggcagagaaacattcggcagaaatatcagatccgcccctcggtccgaatcaagggaaccagacttacgaataaatatactcgtccctttcgcgatcggcacctcggtcatcatctttccgttcctcgtgttcttgatcggttccgacagagggagcacatcatccttagatgccactcggagtgtcgatggaataggcgcgtagagccgaagagtctttcggcacacctagtttgagggacaaagagaaggatagatggtcgcctgagatcaaaacagggaacgaaacgcaagacatgtaacggctgcgtgatcatcgatcgggacttacagcatcaagataaggtaatgcgttaagctcatccctttttttttagccacgcgcgtgcgatgtgttgtcttcagcatcgtgtcatttccaacggagctgcaaggaaaataaagacccaaacacttacatcgagggctcatcgttctcaacctggactagctctgctctcagcttgtcttgaatctcagtgttctcgcacatcgcgtacaagcaccatgcgagtgatgtcgccgatgtctcctgtcccgcaagcatctgtcccaaagcaggagagaatgaagaatgattcagtgaggagttcatactctgggtagagtggaaggagacgaacgaaagtagagatctggccgatgacttctttatcatgcaatctctgacttgggggcagatctcgtgccatgtttgaccggactaaggaaaaagaaagaaaaaacccgatcagagagtgaaatccgacatcctttcgatgagctccagaacctcttcaaacaggcacaaagagaagttcgcagggcttactgagcgaactcaagatatccttgcccgaaaaatctttctttccaggctgaacctcggttttttcattttcatctccagcggcctgttctgttcggagggactcgagaacggcctccttcttcttggcaaccaagtctccaccaattcgttccatggtagcaagggcaataccagccgaccgagattgcgcggtaggcttagagaggaattataagtttgagaaaccatgagccacgtgcatctaacttgagttcacaagccgagactgaacaaaacgtacgataaacttcaagaaagggaaaaagttctgaaggacaagcaacaaggtaacatccgaaccgtgaacaaacatcttttggaacgcatccgccagttcattatattcagtcttcagagcattgaaatgatagtcgaagcctagttgatcaagatcgacgggcagtgtcagtacaaacatacgctcacgatcagttgaggaagaccaaaaagaagcgatacagaccagctcttccgataatgtccaatgtagctctaccaatccattccaagacatctattcgggtaggcttgtcatcctcgatcatggataagaacttgtctttgagctgatgaagaaggagaaaccgttgacatttcaaggagttcgttaggcacgattagcgggatataagatcggcacaaaagataccctaagatcaagagatgtacttcataggcatgttcaataaagacaggtgtcatatctcggatataatttcgagaaaatgaagtaacgacgatcttcctctgttgacaaaaatggagattcgaaaccgcggtcgatcagtatagggtctttcctatctaagacaaccatggactaggatagactactaacctgtctttgatgaactccacctagagccattcatcataggcatcagtcaaggtcgttctttgtacaaagatttctcacaaatcctaaaaaggagaagaagacaaaccttcagcggacaaaagacctggaaggatggcaacgcgaacagtatgattgaattcaactttgatgaccaccattggatgaaagaaaggaaaagaaaaaacagacataccagtacccagaatctcttccagaaggactctgaccctggctggtttgggatagtcatatccgttgttgagtacactgaggagcgttcgggatagtccgataggaaacagttgacaacaggacgaagaagatattagaattcaggtaaaagaaataatgaatggagactatgacagactgactagctaaccgcccgaggatcagcagtgtagaaccgttgcatctgaagaaacaaagatgccgtctttgagttttgggcagtatcaatgccaaacgagacagaagcactcacgcccatgaaaccattatatcgcagggtctttccgtatttgagcacaagagcctcatgtccaactccaggttcattgctttgcagacgaatcggaagaacaaatccgaactatgatcaacttccgacaggaaagagcaaggcgtaacacgtcgaaacagaaaaaaaagacagacttcataaggcctttcatgtttccccaaatgtagctctcgatctttggcccgggtaggttcgagtaggacgtcaaggaaggccggatatagaactggaagataaatagagagataaagagaaccggaatagatataaggattgatacccatgagggaatcagagaggctaacagagaaggcatctgtagattgtgtgatgcacacgatctgatgagagaaacagagtatgtcggaaggagaaggataagagaaggtgaaacaatttgtagaagaaagcaacctatgaggcaaaaaggaaatgcgttagattattacatagtttatcttgtattatctcatcactcccggtctctttctctgcagaccgatttaaacattccctctaatcgattcgactctatctgtttgacatatatgaacatattgttgtacagttccgagcatgatcatatcctggcctacagaggagaatcatctcgtcaaccagcttcggcatcacctctcccaccgtattgacgcgtctctgtctcgtctcgatcggtgacgcgtgaaaagggtgtgacgcgtacgacgcgtgtgtcttgcttcttcttcacgagaactccagcaagcttcctaaatctcaatacacgatcaaactcgttctcccctatcgcaacctttcaagccaaacacgattaagctggacctcaaaaatgccgtcaaggccaaagacggtttgtggaaatcctctattcttagaatgggttgaaggtaagctcccttcctttggctggaaggacctcttctccagcaggtgtgtctaaaacagtagtcagctaccttcttcttgttttgttcctgttcttaccaaaataaaaagagatgaggggcgaggcggaagagaagggaatgaagtcggcgagcacttacgccaaggctgctaattcacttagactctgtccgatcaagttcattcacccggcccaatgtgcccagttagtaggcgttggacctacgatcatcgacaggttagtatgatctcacaatgattgttgttcggattattccttgttaacatgctaaaaaaaagcaaatattcaatctctcaacttgctggtgttctgtggacaggctttcaaaaaaattagcagcacactgtaagcaaacggggatatcggagccacctttaccaggtcagtactcttcatctcccaacaggaccaccatcatcagatttcaacctgtacacgaagtcttgttcctcatgctttctaaattctccatacagagggacttcctaagacccgcaagaaagcagtacccttgtcgcaagcccgaagcccacttccagaagacaatcatattgaatttggtttcccaccgtcccaacccatcgcctctggctctggttctcaatcccaattccttccaccatctaagcgtaaagctatgacctccaacatagacggtagcgatgaagacaaggaatcatcatctgagaatggcgaacctgcattccttcgtaaaaaggattcccttcggccatccgcgctcaaagccaaaaaagctaagaagaccgctacaacaaagatgtacgtgcctgcccaaggcactggaccatatgccatccttttagctcttgtgtctcatacgaccgagcaagatcaagacgttccagtaacaaagcaagatatcattgacatcgctacgaggcatagttggtgtctcaagagcttcgtcgtgcctgaacccggaaaacatcataccgcttggaatgggttcgtcttcattcaatcaaatgtgtaatggaacaggcaatcttgcgatgcaggccgaacttctcttttatgtatttctgtcggctgaaaaatggttgttctttggcacggtctaggataaagacgttaatgaaccatgagctgatctacgccagaggtcagccagctaggtggtccctcacagaattaggatagtacgtgctatcagcttctgatttcaatcaaagaagaactttctaactgacagggttgtgttctgaaccactgttgtgaatagtgaactagcttgtcaattgcgcgcatcattggaaggtttcgcaaattcacgagaccgaccggatagagttccttatcacgaacatcagcgtcaagcggacccactcacaagaacagaaccgcctcttcggaatgttatacctccgttcgatacactcagtggatcagtacaacgctctagtgataaatctcggttcgatggggtctctagaactccagtgacgaaccaccagtctacaagcgcaaatgagaagtttggatttcatttccttggtcagtgctctctcgataaaccgtcatcaagattcacgtatcatttcatctaaatatgttgctatacatctgtatccttcttcggcggtagatcgaggaagtaataggattcgtgagattgataaggcccgtatcaaagtcgatgacagtggcgagcagcttgttcggatcgagtttctctcctcccaacaccaactgagttttgtcaaagcaagcgtcgtcgatgctgaggatgcaccctcaggacgagatcctacaaatcggccaactgttttcgggtgggtacctgtcgcggacgtccctagaattgccattgggtttccagatcaacaccttttgaatggcgctgcatcatcattaccggctactaatcgaacgttagggctagggttgccgaatgtcctccatcaaccacaaattatccctcctcaaccatcgaacccggatgtaattccgctttcagtaacaagaagtcagaattctagattacttcgatcgacctccgcctctgcttccatacctgagtcagccaaagctgattcaactttcaaccggagtgtttcctcggggcatcagacccgactattggattcatcgttcaaaactcaggtgcttgatatctccatctcaagcgttggccatcaaactttgggaccacaaaaatcttcgaatttatcaggacccgcgccattgcccatatctggacttgggcgttcattgatagctagatccaactcgatacagcatcgcctagaagtcccgattcctctgtcgtctgtgtttcacgagtctgatgagaaccgaaactactcaactactcctctaccgacgacaacaactacacaaacaggagtaggaatgacatctgacgagccgaggggtggtgtgattgccgagaacgagatgccgatagattttaagacaatgaaacccatcacatgggaagctggctcgtacgacatcctcctccttctcgatacacgagaagtccaatcgaggtccgagagagacgcgttcttagacaagattaagctgacaggcgtggatgttcaaggaagagcgttacctgtgggtgacatggtgtggatagcgaagagaagggatgggtttggaacggggttggaagaagaggtggttttagattttgtggtagaaaggaagaggttggatgatttgatcatgagtatcaaggacggaaggtttcacgaacaaaaggtaaggccggcgtttgtttctcaagagtgcgtttgtgatcaggtcgacctgatgagagagtgtggtgtcctgtgcatttaaaccgaacagcatcgactaaggaactctggaatcggccaagtgatttatctcatcgaagattacaatgtcgcctatcaagaacaggtttgggcacctcagatcgcaacggcagtctcgtctactcaagtcgttgaagggttcttcgtgaaaaggacccagagtttagatgccacagttgaatatctgaggtgtatgcatgatacaatcaaaacccttcacgaggtaagttgtctttaccttttcttcttcatatctggaacgcatcactaactccacaaaatcggttctcttcctttctcgatagggcgcaaatttgacgatcatccctgatagaaatatttctcgatcaacctacctgtccctccagtcctatctccgaaatcactccgcctcgacgcctcatcttatatcctacagcgcctatgttgatttaaactctaaatcaaactcattgacactgcacgaactttggtgtaggatgttgttaaccatacaagggatgagtgcagaaaaagtgggcgccgtcgtcgaggtttatcgaactcctatgagtctatggagagcttttcagacggcagaaagggaagaggctaagcttaccgaagcgactacggtttcaggaatcagtctcgaaccagggaaggggaaacgacaacaggacagggtgcctatggcgaagaacttgttggcggacacaatccagggcgtaggaagacggtcgattggaagagcgttaagcgcaaaggtttacgaactttttcggatggaacattattaaaaaaaattatcgataccgattaggccactcagtttcaagaacaagaaggatacacgtcattagattcggaagagagagagagtgagagcacacgaccattctatctcggacagtgcgatgtataagataacaaaaagaagagaaacgagctgcctccttcccaattattgcttgcttgcaatcttagaatccaaacaccaattctcccaactttcctatgattcctcctcctccctgagacccctgagtcccggtcgcagaacctgacacagtcgtcatcgccgaccctcctcccgaagatcgggctacagcaggggaagagggagtctggtttaatcttctgaacgccgaattggaaggagccaactgaatcggtcttccgttcgctgaagtcgaagccgagctcgagctctgttttggagtggatggcatgccgggtttaggagaagaggacagttgcaagtgagacggactggtcgaaagagatggcgtggctggatgagatgggctgaggagaccttgtctggagctagatgggtgatgaggatcctgtcaaagacatgtataaagccaaacaagcaagaaatacaagttaatgaatgatgagaatacatatcccaattcatgtttctaggacgcagacatcggaacgctgtagaactcaccgcccacttgaccccgatcatccaaactcctccgaggacctccccattatgtttaatcgccctctctgcctcggcttccgtcttgaatgtcacgctaatccagtttccaccattaggatcgggaagagccgagacaatctctccgaattgggagaaatgctgaaggagtgggtcgaggagggatgatggaggtccaaagatggttactgtagtgagaagcaaagaagaggaagacgaagaagggcctggtggggggatagaggtagcggtggagagggtgttttgctgtaatggctgggagaacgaggagtaaaagttttgactagattcgaacaaaaaaggacggtcggaggtgaattgtcagatgagatgatgagagaaaagctagtgatatgagtccgaaccactcacttttgacgaggagatgacgagtactgttgaggacatgatcacgaacaagaagacagatgaacaagcaagggtaaggatataccattccactatttcccttgttctcaaacaggaagtcaacggattacatgctaacgtacctcgatatctccagaatccatatctccgtcctcaagcgaagcggtagggggcgcatagtcttgggacggagcgacggtcactcgaaggggctgcgagttgactactctaggcgaattgtatggcgatgttctaagaaacatacagcgtgagtttgcatttcagaacgaggagaagaatatatgtacgatgtcgatagcagaatcgtaccgatcaaacagtcctccagaaccaaatcgggtggacggagggctagggaggccggaatttgtacgaaaagaccctgaatggttgagtgactgtccgttgttgttgctgccattgttgagccacgaggacgacgaatttaatgttgggtttgctctgttgggagtctctggactttgtgctcccggaggtgtctgcatatcagatgagaagaagggaaagaaatgaggaaagtaagtaaattcatcatcaagacaaaatgcaagaacgaaagagagaacaaacccccttcatgctggatgtcaaatagccaggtaaatggttaggtgcaacctctggttcgtccatcttatcgtccagcaaggaatggtttccgtaagaaaaagccgaggatacagagttagcctgaccgttgacggacgaatcgatcgcccaccaggaagacggagccttggacattgcttttgataggtgagggatgaaggtgaacgaaagaaaggttgacagaagaaaaaaagaatagaagaaattgaaaattgattacaagtacaactacaaattcctattgaaatttcccaatgaactcaccttctcacggtggccccgctgacttgctccggcatctcgttcattattcatcgttcatctcatccggtgttcaccatcaacattgacctccattcttgagccacttcggaaacttatagtgacatcttgcttcctttctttcactgcacgacaccagctattcatcgataagctataaacgacaacatacatgcccttggcatctcccaattctggtcagtttgcaaacaagtccgtacccgatctcaagcaccttgcgagggtcgacaaccagcccgacttgagatcgttttctccgaaagtactcgtctcgtccgcccttaccttactcacacaggcaaagcttgcacaagacaaccaggactgggagacgttctttgtatattctagaaaggctgctaagtaggttcttgtttatgcttccaaagcttaggatgcctactgcgatgctgaaacatagaatcttctggtctctccttctttctcgttacctttccatgttgtatcgcccaaagtatcgccctacagcttgtcgaactaaattcggtctcatctaaccattcatcggcccagggaacagagaactcaaaaactctcctcccactacttcgacttacggtcagtatgctctgtcctctctgtcgcctcccgagcttctgtagctcaccgccttacttgcttgccgctggtctctttcacctcatgttatccgccacgactcatcgtccgtcattgatttctctgcctctcaatagacttcggacgaattcaagagaaacgtcagtgaagcagaacacatcctcactgctcgagatcaggcacgtaagcgctcttcggtgtcttcgtcatcggctaccatgcatcccgatccgacatccctatcatccccttcctcaccccctagcgctgctccgatgagcataaaacaacgaatggcagctcttgcaggcgcaggactcgataccggtagtgggacgccggtatcagccgctaaacgtgctcctctcgtgaagtcatccgggctagatgggttaaacgggtacaagacttcttccggtcaggtttcaccaggtatagaaaagttcagcggatcgagtccattcaatgggacttcaccctctggagtatcttctatgtttcctggaaaaggtgtcactccttcccactcgtcttcgcagccttctgtgaatccgctctccccgtccgaatcccaagtggcgccttctcaaccaataaatgccacaaaccattcgtctcactcgccttccgcttcccttccgccacctaggcatcagtcacctccacctctgtctccaacgcaacaatatcaacctcgcttgtctcagccccctccgaaacctttcaagccctctacgctgtcggcgaatgtatcccctatcatcgcttccgctccattcatagaagcagcacaacaagagagagaagatagagacacagagatcaatttctcccaaattctagagccaaatacaccatttgatgccacaacattcgaacatcaattcccaagtatcatcgagtttgagactggcacaaagtttgtcgagcctccagtcgttccctctaacggaccttccagacggtcttccgtggctgttcccatcatgaatggtaatttgtcgtcgtcgccaccctcaggtttgactaacaaatttaatccatcatcagaaaatggcgacaatatctcaaacgggtttccaatcttgcctgatgcccccacatcgttgcccgtcaaaggatctcggccattaccgtcacctcctcagaatgcggcttcactctcctccgggctccatcatgctcctacttcaactagttcatctccggtgagtagtaccagcatcagtggaggagtagtcggctcttcgaataatccctcctcggctatcgacttgcatggcctagaacttggccagccgccctcgttgtctgttacgtcttcggggtccggctcgtcctctgtcaacttggcttcactcggtcacacatccacaatctcttcatcggctgaaaatccttcagcatccatgtctgtatcgtcatcctcctcgtccacagggactggagccggtaggctttcaaaaccagaatttccgcttgccaacacaatcttcgcttctgcccttcgtcaatatcttactcaaacatcagcccgcatcctcttgttggatgttcggccttacgcagaattcagacagggccatataccccatcctctctcgctacaagaatcccctttgccagagatcgtcaacgtcgatcctcaatggttaaactcatcgacatcgctttcgtccactcaacttggagggcatctccctccggactcggcgtttcaccaacgagcatcctttgatctcgtcgtcatatacaaccaggctggtggacggaaagaagtaaaagaaggaacggtcggccggttgggagagatgatctatgagcgagaattcggtggtcagacattgaagagagcgccagtagtgctgatgggtggatgggaagggtgggaaagtgaatgtagactgccacccagtgggtttggaggattaggagtaatgaaaccgttgattcctaggtgcgtcttcttattctttgctttgctttcccttgctcctctcctcccttctcatcttgggattgcatcatgattggtccggtggtcttgaccaaacatctattgcattcgtagtataccgactagacaaggatctggctcactagatccgattcctcctgtgtcggttcctcaaagaatgggttcaaacgcttcgacttcaactcctctctccgtttcatctcctcctctaaatctgagccgaaactatcagccgatggtgagtgcagtttggatttttttacttcttctgatcatgacgcaacgcgaaattactgttgggctagtgctgatatgcgaatatgcttcaactttcatctacaagacgacatcttcccaagcgtcttaccaacctccctccacctttacgccaccctctacaatctacgagccgttttcgaaagattacacttatccttctctcccccgtccctcatcgtcaagtgccaatactgctagctcctcgttgacatacccggcaccagtgttaacatcgcccccgccactagcatcgccttcgactgcctctcctaattcaagaagacggacagattatatagaccaggcttcccaggcgtattcaggtgctccttatccctatcaacctcctatttcctcatcttctccttccgcgggaccaagctctctttcaggacctactctaagctcgatcacctcccatcattcagctaggccgagcattgactatccaaacttgaagacaggtctgggtctagggattcaacagccaccgatggcagcagcgccttcgctagagagacagtctagcagaggagcagtcgttcctgtgagaaggtcaagctcgataagtttattggacggacagacctacgggcaaacaggactcggtcaggggagaacggatgagcgagaggtcgtctattggggaaatgaatttgtgggaatgagcgggttgaagaatttgggaaacacttgttatcaaaattcaacattgcaatgtttaagtgctactgtacctttctctacgttcttcagaggtctgtatatctgttttcttacatcacattgctcgctgggtgactgatcctgcttctcctttgctctgttcatagatggtcgctggaaacgagcggtgaacacatcaaatgtattgggcacgaaaggaaatctggctcaggcgtactgctcgttgatttcgactctttggtcaagagagtttcattttgttcaaccgctatcttttagaaaatcgatcgtcaagttctcaccgatctttgacggtaccgaacaacacgactctcaagaattcctcgccttcctactcgacggtcttcacgaagatctcaaccgagtccttgtccgacccgaacctgtccctatgacgtctgagcgagaggcagagttgaatgcccttccgcctcaagtagcgggcgaaaaagaatgggtgatctatcagaaaagaaatgactcggtagtggttgatctgttccagggacagtacaggtcgaggatggaatgtctgacatgccatcaggttcgttgcgtctttctttttgtcctcctatctcctcggttctttatcttcttcaatcgcgagactcatgggaactagaaatacatttttcgttttaactagacatcgacaacgtacgacgcgttcatgtacctctctttgccagttccgaccagtcgattgaaaaccagagtgtcacttgaccagtgtctagatacattcgttcgagaggaagtgatggagaaaggaaacgcttggaattgcccgaaatgcaagaaaccgagaacggctagcaagagcctgtctctctctcgactcccgcctgtgctactcatccacctcaaacgattttcgtccaagaatggcgtgttttgggataaggctgagacagtcgtcggttcgttttcttgtcttcctcagattctttacccctttgtttccgactaacaatcttgtaactcgaattatttttggtgaatcaagactttccaatcaaatacctcgaccttacgaaatacatgcccgctccgttgtcggacaaaccggatccaaatctacaggcaaagtataggagggacgcacgaactcagactcctccatacgtttatgaactttgtgcgtctaagtttatcgtctttgaatgataggttcagtctattaacttgtagatccggtttctgctgatagatgctgtatcaaaccatactggaagcctgagcagtggtcattgtacgtatgacagtctcgactcagtcactggacgagaagaaatactgaccgataatcgatgggcaactaaatagatacggcgtatgtaaagagttcacaacagaattggaaatactgcgacgatagaacggtgaccgatgtggatgagaaaaacgtgatggttcgtttaatgtattttctatggtcttctttgtttggatgtctagcttacgctgtatgataaccttctcaatcttatctcatatcagacgaagaacgcatatatcctgttagtagatcttcgtttgtactttgcgaaagccgactacacatcaacatggtttactaaccgctcttatttctgtttaacgatctctctatagattctatcgccgagtaccagcgactcggagtttatgatgaatgaaacctatgaactgagagatcaagaagagataatcgtggttttggaatacaatagacttaatcaaagttacatatatgaattacgtaaaatatatagcctgcaaaaatgcataaccaacctctccaaatgcattcacacacctcgcatttttgtcttttttttccctcgcccctcactttttttcctccttccttctgttggtgttcagcttatcctcaagagaagtgagcacaccgtcctgagatccttgtttatttagtagttcatgtgaagctgacatacattctacgtctgtgcatgtatcatcaagtcaaaatggctgtcaagaccaccgttccctccgccgaggttagtatgcggcataggctacaatttttccttcactcttcagccccactttctccctttcctccctccgtcttatcccttcgaccataacttttctcccgataaatcgatggcttgaaagaagggacgtagaagcgggaataatctaggagtagaatcagtagcaaagttggattcaaagagactcaggagatgaaatttgaaagttggtattgagaaaggagggaaggactagatgcgacaagggctttttcttttctctttcttttctttctttggaatgccgaaagaatatcaccgttctgacttctctttcctcccggaaccggattattgatattatagcaagttgccgtccccgagtctcttctcaagaagcagcgatctgctgagaagacccgagaggagaagcttgctgctgccgctgaggcccgaaaggtacgttttgattgcaactctacctttttcaacaccgtacgctttgtccacctccatccggcattttctcaagggcaaccaagtctcgttctatactcccaaatgttgtcaacacttttccatcacacctgtcccgccgacaaatttggccttctcgactctccatatctgtttccttagaaagaggaagagtgttctgttgttaaatgatgcatacgtctatccatgacgctaattgacgactagtcttgcacgacgatgatgtcctcaagttaaccatctttcgggactgaattacgacaagctcttcttcctctccgtcctcgttctctcgaacacatctgcgtttgactttgcgatttttccatctggcccagaggctgacatagatcgtctttctgtttggtcgtttgtgtgtgaacgaatttctttgtcaatgatgttgaacttggataatctacggaactttctctccttagaccaagcgagctcaacgacaggtcatcttcaagcgagccgagcagtacactaaggagtacgctaccgccgagaaggaggagatccgactccgacgagaggctcgagcttccggtgacttctacgtccctgctcagcccaagatctactttgtgatccgaatccgagggtcagtttagatcttgtatacagtcaaaaggaagacaaaattgacattggtcctgtattttattaatcgttactcaaactacagtatcaacgagatcgctcccaagccccgaaagatcctccagctcctccgattgctgcagatcaacaacgccgtcttcgtcaaggtcaccaaggccaccgcccagatgctcaagcttgtcgagccctacgttacctacggagagcccaacgtctcggccatccgatcgcttatctacaagcgaggatacggtaaggtccagaagcagcgaatccccctttcggagaactccaccattgagaagtctctcggagagaagggaatcatctgcatcgaggatcttgttcacgagatcgctactgccggacctaacttcaaggccgcttccaacttcctctggcccttcaagctctcttcccctactggtggatggcgagctcgaaagttcaccggttacgtcgagggcggtgacgagggactcagggagaacgccatcaacgctctcatcaagcagatgaactaagcattttaaaaactacctttcccttaactttttaacgcttagtttattttcttttaacctctcatgtgaatgttgtggtgggcttgatgacatgaagaaaaaaacgcacgagacaattgtttctttgtactgaatacggatcttggggttcaaagagcaaacggatagttttggattaaaaaacggatagagaatctcaaactgagagggtaaacactcatgatcagatagttccgatagaatcacatacatcaatgaaattttgccactcagcagtccgaatcagcgttcttttcgaacggctgttcagatgaaagaagaaatttagaccacgaaacgtagggttacagtctaaggtatgtgtacgtttgtgtacacttatttctcttgacaaaaccaagtctcaacgagacaaacggaagcagaggatgcagaagaagctgacaagaaagtgacatggatgaccaaggatagacgcaaagacaaaaaggtttgaagaacaattaagagaaaagaacaaaaaaaaagagatcacatgagagccgctgatgcagatatatgttggaacaaagttcaatatgcaatatggcgaagagaaaggacaacaaagatgagtccgaaattctggctctgataagggacaatgagaagtcaaggccagaacgaaattatgcgcgagatcgtaagaaaaagaaatgccagccgaatgaagatgtaagtacgttttaagaagaaagatatgatgagggaagttgtctagcctagttccttctgaatccaacgggaaaaagcaatgaaagaacacaaaggtgagaggagagaagtgtgatcgatagagacacgaaaaaaaagatgcaagatgttcgaagtccgaaaaatatagcaagcttctttttagcgtgtcacatccggagggaaggacaactgttgctctatattttactcccatgcttcagcgacctcttcagtaacttctccggttcccgcagggcaggagaatgtgccgttgatgtagtaatgaggagcgtaggactggttcagagccggttgaacgatcaagttttgaagatgggtcttctgattgttggcgtccgtgatctcgaagaagctttgtgaagcaggggtgggggtaagaatagaggccttggtcagattgacgctgaaacaagcgagagattgactaaggagaaagaaaagttatagatggagacgaacagagagctgacgagggacgactgattgacgatccagtagaaactgttgacgccagtgatgttttcgtagcttgcgatcaacgttgtgttctggtagtacccaccatcagcgatcaccaacgagtagggttcctgtagaggtgacaaataggagtgggagtgccatcacgattatgaaacatgagtttcaaggttcaacgaagagcgaaaacggagaagtagctcaacaaaaaaaaactgaccactccaggtccggtccaggagatgttggccactccacactctgtcaggttggaaacctcgagcgtttgctgagtgattggcgcgcctgctctaggaatgacggaggccgacgcgaacgcggtcaggatgacagcaggaatgaagttcttgaaagcgagcatgttgaaggatacttgaaggtacttgagagtgggaccggcttttcgtcgatagatggatggatggatgggtggaagtcagaagtcaaaaagaagaaacgaaaaaaggctggtacaaataatatgaaactcggatggtgagctgccaagatcaaagcagctaaaaaaggataatagttgcgctaggaacagaacacgaaaacaagacagccacaaaaacaggaacagtgacagacctgaagggaagggctgcctcctgacggggccgatcaaacgagcgcagcagcgacttccatcatacctagttacgtcatcgacttctcgctcgtccgctctcatacatgggtttccatcaaatccaaaccacgaagttcttttggaacgaatccaatctagagctttcctgtaggccgttgagaactaatctataaagctcatgaatactgcccaaatgaatctcgaggagcctccactggaacgcgatctggctatggtggtagccattgcggctcgagtggccgctcctaaacaaaatggacccgatccatgggccacatcggtctgcgatcatgttcgtgtttctcctttgttacaccactttgtagctatgtttgttgaagagatcgtgaccagtcttatccgtctgctcttctcctcgtcttcctcaaaaacagctacaactgaatccggcagtcttaccggacagtccatctatttcagacatagaagccatgcgcccgattgtcactccttcaacccatgcacgagtcttgcgcgcccttgtgtactcctccattttttctttacatagaaacaaggacacagattccaaagggttctctctacttaccaagggatctcctccgcctccgatcgagtatacctcaatctcacgagcggccatttaccgaaccgccgatgtgctcaatattccctcgacaggaatcatccccgaggagacagttgtcgctgctgaacttttcaagatgctgcaagcaatatcatccgataaggctcaaagcgagctagaggagcatcaacgagtcgaaaaggctagaaaagaacgcgaagaaggttggggaggtaaatggggacgatgggcagccacaggcgcaggcgttgtcattggttctgttgctctaggtatcaccggtggagttgcagcccctgccatccttgctctcttgcctaccatcggactcctcactcctgccactgcgcctgttgttctcggcaccttctttggactcactggaggcggtctcgccggcagaagagttcgaaacaggtggagtggagtaaagcagtttgaatttgtacagattgacgacaaaatcgatcctcttggtaggccaaaaccaaatcactacagggaacaggaggccaatcgagtggaagttccatacgcggttcgaaaaaagacgagtccgaatagtgggacaaagccacctctgttggaacccaagctagaggctttatcagtctcggaagaggtggacgaggtaaataaggcgagagaagagaaagaggaaagaaacacgacgattgaaataccgtcaaaagctccttctctttcagtggttattgttgtaccaggtctgctgacagaggatgaacttgaaggtgttcgaacatggagatcaatctctgaaacatctaagaaagggcccatttctgtcatccaggcagcgtcttcgtcaccttcgtcagagaaaacctctatggacggaatggttcatccggtccccgatgatgtagaaaccaaaggacaaccgaatcaggttcttgaggagatcgaattaagaaaaattgcgttcgattacgaagacgaaaaggtgcttatgtttcgaggaagggacattttcttggctaagattgagacggagatcatgttgagtaccggaaaggagatcaatcaatggatcacgactaaggtaggctagacttcctacatcgcacagctcgcttgcttgttagaactgttgctcatttcgcttctatcatatatttcatcagcttatcagcaaagctggccgagaaatcatcaaacggacgtttgtgaacgcttgttagtcacagctatttcctttaaattagacaaagtacattggctgatacgtttgatctggcttgcttagatctatctgctgtggcattacctttgactgtttgtgagtagtggatcttactttgcacgattcctcgccttgggtgatctgatgctcacttgctgtccactatcttccttttcctttctctattccgcaagacggctgggctggcactgcattggataattcgtggatgcgagccgtatgtgaagcttcaactcaaatgatactgtactagctgaggacagatatgaacctcccgtaactctctttgtttgcataggtcgacaagtccaagaaagccggccaggtcctagcggatgttctaatttcaaaagtccaaggctctcgaccagtcgttcttgttggaacctcgctaggcgcactcaccgttttttactgtctgcttgctctcgcttcctctgattctcctgaggcgctttcaatcgtggattcggcctatttgatctctctaccctccagcccatctgaggttcaatggaagaaagcaagatcggttgtgggtaggagagttgtgaacggctggtccggaagagacattgttctgtccggagttgtcagattacatgaggttgtaggaaaggtgggtgagggaagggtcgatggcgcgtctgttgctgggttgtgtaaggtcgaaattgaagggattgagaatgttgatttgagcgctgtagtcgatggtgagttctgggcacagaatgtgtgtgctcaggttgattttactaattcggtctttttctccatcctctttttgaaccttttgctataggtcatttctcgatcaaccggccacggacgttggcggagattttgcgccttattgatactgatgcttgagaacgagataatgtcgtacatatgatcccatgtagtctttgcctctcttctttctctctttcacatttacaacctcagttggaacacaattgtcagtgtgagtataggacggagatttgacggacaagccgagaaatgggagtttatgtctgattcatttacgtaagcaacaaacacctgccattttgtattttgttcctctctggtcttcaccccttcgaccgcatcgatcatcaacccacctttgctcgcccatcatcctttcctttctaaagcaaccgagcgaccacaggaaggcatccgatagggagaaccgacatcgtatgcccttttccaagaaacgatctcttcccgtaaattcgacaactgttgggtcgccttcgtccccttcctccgctgctgccgccatccccgccatgtcccccttgtcttcccataataatgccagctcgatgctatctacttctcctacctccaggttctctcttcgttcaaagtcactcgcacccactgtctcgaaagatactttaactgctcatggttctctgctgagagtagttaacagacggtcgaacgactcaatgtccggattctctccccccgtcgtcgggttgacgtcgtcagccccgttcgctcagggaaaacaacagacgccgactttgacatcgtcgtcgtcactccctatcggaggaacagttttgagcccaggagatccgaaatacgatcctctgaaaactcccatcaccagctatccagtggatcagctcggcgtgccctcatttaaacacgaggagtttggttggtgtgccaatcaggattaccgacatgtctcccaggtaagcccgttatctcttatataaatactgcttttttcgtcgttctttcattgtttttctgaacgttgccgagagcaacggagaactgagggagggtagacgatgttcgcttcccgtaccctacgcgtttcttcccttaatccttcctttatgcatctcctcgatcaatccgatggaacgctaatcgcattttctcctgcatattctaaagtacacgaactcggaacctattcatcaagaacccgttgaacctccgtactacgtctttctcaccacctatgtcaggtaagttcatacttactgaatctcacatcaacttctggctagttgagatataagattcgtctgatacagtgttactttcgattccttgtcagttatttgctcctcatctttgtaggacatatgagggactttttcggaaaacgaatgtatccttcgttctttcgagagcttatgccgcatgatgtgagtatttcgtttttcatacttgttatctcctgcgagataatcaacaaggtacttacgactcttgccatcgtcccctcatcctcataacagggatacgctgctctgaactcggattttgattcgttctacacccgtcgcttgaaaactcgaatcgaggactgcttctcacacccggttacgggtgtgcccggtcgatccattcagacattcgaccgatcatcaaacgattcaaacctgaccttccagtacccaggcacgaagacacgatgcctaaatatctcgtcttacaactatctcggatttgcccaggctacgggcggatgcgccgatgcggtcgaggaggccatcaaacgttacggagtcaccgccgctggggctcggctggatgcgtccacgttggatcttcacatccaagcagaatcgcttgtcgccaagtttgttggtaaagaggacgcgatggtggtctccatgggtttcgccacaaattcgactacaatccctgccttggtcagcaagggatgtctcgttatctcggatgagtttaatcattcctccatccgattcggagtcaggctctcgggggccagcgttaggcaattcaagcataacgacatgaaggatctcgagaatttgcttagagaggtcatcagtcagggccagcccaggacgcatagaccatggaaaaagatcatggtgattgtggagggtctctattcaatggaaggtaccctagttgatctaccaaggttgattcagctgaaggaaaagtacaaggttcgtgtttttcatctacatgtcggtcctttctcatttcgctatcgccttgtgtctcatccttcgactgtttttatcgaaaacacacagttttatctctacgtcgatgaagcacattctattggagctcttggaccaaacgggcgaggtgtatgcgattatttcagtatcgacccccgaaacatcgacatcttgatgggaacccttaccaaatctttcggagccgccggtggctacatcgctgccgacaaatcgttgatcagccgccttcgacttcgatcacatgcaatgtgttatgccgaggcaatgtcacccgccgtgatcacccagatcatcgcttccataggatctatcatgggtattgctcctcccctggcacttcctgcacccgataacagtaacgttcaaacagaaggacactcaaccaccgttcaaaccggggtgatctatgatgcgccagtctatggacccgcgccagcttcaggtcttccttcttggatgaacttgccgccaaacctcatgaatggaacagagggaagggaacgattaagaaggctggccttcaacgcgaggtatctctctggaggtctcaagaagcttggattgttggttcttgttcccttgtgtgatagttgatgatcgagatcacacgaacttaacatttctttttttccttttgttcaattctcacagcatcgtttatggtagcagggattcaccaattgtccccatgttaacgtttaatcctgccaagatgccgcttttctcccgaatgatgtttgatcggttaggcggccctgataccacaccaatagtgttagttctgtgttttctgcttatcgctcctcatgctgctcgtactgacgtctctgtccatttttttttcagcgttgtcgttgttggttaccctgctacaccgctcgtgacgagcagagttcgattctgtgttagcgctgctcacactaaagacgatattgatattattctacgagcatgtgatgagattggcgacgttcttgatctcaagcagacttcgccggaaggcggaaggtggaagttggaggatgtactggcgaacgcgaaggagatctcttcggccccatgagttctggttgagttccacttgtgaagaggagtaaaatggaacagggagggaggaaaggaattcctcttgttttatatttcatccgatttatctatattcagtttgattcgatcaatacgtaattcaccggcggacatttcgctttttttctgcttcttctctgcttcgtcatgtcacctgccccttcttttccttcttcttccttacgcctcgctcttctttatcttgcttcctcgcgaggcgtgttctacgtaccttcaaatggttcggttccatttcgcgtacacctttacaggtcggccgcatggcgacacgttggcctcattctatcccaaactgtttttgacttttttccctttctttacaagatgacgtctcaacgccgatctatcaccttctctaatactcaaattgacttgcccgtccatccgttatagagtacccttttcttcttctactttatctgttttctcttcatatagtaatttgcccaattcagatcttataatgatcatctggcaggaacaataaagaagattcatccatgctctgcttcgcgacaagtctctaaatctctccgtcttcgagatcatctggattagacggaacggtgatcttcgccctctgctcagaagcgatttccgacaaataaaccaaaggaaaaagacaaaaccagggaatacagattcaatagatcagttacgaactaaagatgagggaacgaagaaaagcaaaagaacgaaccttcgaggctcggtcatcaacatccctatccttatccttctccctgtccctcgtcgaagacctgtcctttcttctatctgacgtatgggtagctgtggacggaaccccatcaaagtaatccataggagcatctcttgatcgatggctttccaaatctggtcttcgacgatctctatccctatattcacgggaatgatcgacggatcggtctttccgagagttcaagtcctcttctgcttgttctcggatcttttccttggttgattaaattcagtttgtgatgataagaaaatatagagagcaagaatcagtaacgttgatcgtggtaaggtcatttgtaggagagcggaatatctaccttttgccgtttgacgaatttagagtaggtgtacttcctatcttcctcatctgtcagctcgttaaatagcttaattgtctgtaatcgaggaatcgcctattgagatagtgtttcaaaaatcacaaatcacgaattttaaacatgtcaacgagataaactcttggatggagagatgctacagaagtaagaatacatacgtcttcgtaggtagcctcgagatcaagaggtggctcgatttttttcatttcgtaccgaagatcatccatcagatgtcttctttttcgttctgcccgtcttgcctcctccgccgctctgtacgcaagcttatcgtgaatctgtattataccaacaagagagaaaaggtagggtcaacaccctataccaatgctcgaaagaatacgggaacattgaactgactagctcgaaaaccaatcggtcttcatcttcttccatcctagggatatccaaatctgttgatttcgctttctccaacgcttgttcgaaggcttcgaatgaggtttctagatcaaacacaaacccagatcttgcaaacacatctcttacatctccagagagatgttcgagccgttgatcgagatcgtcaactacatcttggaacatttcaagtggcgttgaacctggcttgccaaggagggcgaggtatcgctcatcctctgcgaaccgggggagagtctttttccactttgattttgcagtgagtatttttttggctacgagttcgagaagaaggttctgttttgatgttcaagtgtgttctgtcaattttgttctaccattctcgaaaacacgcacagaatatcgcaagaacaaaccttgaaactctccctggcctttctcgcctcccgaagtctttccgattttttcttcctaatctcaatgtcgtgctccagctctaactccttcatcctttcttcgaacaatacaagaatctctagtggttccacagaacgcaagtacgcgtctgatctccattcgttggagccaagaactagttcctcagcttcgcgccatcgactcgagaccgtcaagtcaagcgatttgaagagacttgtcagtttagcaatgttttgtcgtcgagtttctctaaggtcggcctgttaggggagataaagatgaacagaggaaataagaagaagggagtcagggttcaacacatctcaagtcggatcaagaagagataaggacaggccgactgactgattctctgttcctcagctcagagatgaactcgtcaaaaagcgacttgcgctcctcctcctgagtttgcttccagaccgaagaatcctgaagaagcctatcgacagttcggaaggtagagtatggtttgacagacggtgtttctgacaagagttttttgtactgaggtcgaagccgttctagtcgggcttccttttcttctgtcttccgtgctttcgtctcggcgatgaactagtcaagaggagaggcatgtcagaattttcctccgtgttgtgtcaggaataaaaaaaggaaaggatgaaatgaagacaagagatagaccttagtgaaaaccgccttcttctcggccaagcttcccaaactcttgtagagcgggtcagtgatgatggctctcatggtgacatcccaggtggaaccgatgtccacgcctgcctttttcaaaaggtatctgaacgcttcttcggcttcctcctgagtgggccaacctccatcggggattacatacttgtcggctaccggagcccgaggagcaggaatcgaatcagctggagacatacccacagaaggcttaatgggaacagcagcggccgaaggtgatggggatggcatttgaactgctggaggaggaaagttcatcaccttgactggtggtggaggaggcggagcgagcgaagcagacacccgttctagcaggagaagtagctcttctggcattgtccactgtttcagtcattgagttcacgcgtaagaatcaatcgagaagctctagagaagagaggcgggcaagaaagttccagatatattgccacttaccacagattctttcgtcactttattcacccaatacttccgaccttttgctacatactccttccacgcggtctgagccatcgcccgctcgaacggagtcttgagggcgtccggcttttcccagacagagactttgtttacggtgtcataccaactataggaaggcaaagtatgttagtgaagagaaataagaccaatccagcaaaggttgacaacaaacgagagtcgcgacgaagatcaggcatgccaacttactacatcctgccctctgcattggtgtgttcggtctaaacgccgtgcacacgacagtcaattacagaaacaagatgataagatgcatgcactgatcagccgaagttcatgaaacatgacagcaagcgacaaacgaagagagcttacataggaaggaacagcggcccctccgggtgttacggcaccagccggacttgcctccgaggcaacaccgacagcagctggcgtggctggtgtagccggggtagtcggaactggagagggggatgcgtccatctgatgatgaatatgttggatgaacgaggctagacagacgattcgaatttatctaactggccggtgatggttgatagttagaaaaagtaggtttgtctgttcgtgcgttctctcgtgcactctttgttgctgcaactccgtactcgagctgatgaccatctaacatcgggaaagatcgcatcttgttaccaatgatctactgatagtattctgattcgtatccttcgtttataatagatgagaacctagaagatttattctcaatctcgcttgaccggcatcactattggtacaagtgtaatccagatacactgatacgcatttgaagtatgtttcgctcctccaagtcactcaacacatcaagtttattgtttggagaatcatgaacggtagctgcttctgcgctcaaagagtattatccacaacagcgtgaatgattggaggattgacttgttgaaacatctcgcatatttggcagatttatttgatggcacgtcgaatcattgaacatctcctctttttctcctctaaaagcatttgttgtatctgtagtgttttgtctattcattgtttgttcacatgcttcacgagacgatatgataattactatttcttgatatgttcagttgcctgtccgttgagttatgtatgtatgaatacatagatagacgagtttgggagaagagatgcatttctaagtgaagaacaagtcgacatcctccatcttgttcacaagaccatcagtcgctcgataccctttcctcttgatcataacttctgaacttaagtgttttatatgatgcgctgctgttggtgtcatgtatgcgagttggtctttcctggtggagaggcgaccagctatctttacaaagtccatactgtccgatataactaatcgatggtattattagaactggcatcatgatctatcatattttctctgtccgagtccctcccttctgtcgcgaatgttgctcactagatgtatcgtgccatctcattggtctatagtgacttaagcatcgtattcagagtgtcgatttgctaggctagtgaaagcccgcctacgtcatcctccactcatcagatggctaagaggtcaagaattcatcgatgtggaggaatcactcagaatgcagagaatgattgagaaccacccaactgacgcgcaacagcaacggcgccgagaacgtcttctgaccgaggggactgaccagcaggaagcttaacgttcggttgaattaacatcaaagcccgttctgtttgagaagggaatcggtctttccacgttgctcgggttaaacaggaggtatcctgaccatgctctttcgactcgtccgttcgtccgtccgtccgttctgatcggctgcatgtccaatggctttaccggcttcgcttgcagctattctcggccatgtggactctcttcgttgagactataaagatcacagactcctagcaaatctatacatccatcttgtacccatctcaataccatctgatatcactccatacacttaaaccactttgtcgaagtcgctatgaaagtgtgtattcgctcgatgacattacatttaatcaatcaacatcggagctgacactgatcatgacactgatcatgacactgctcgtcttaatccaaccaggttctcgctatcttgtatgttggaggaaaggcagccgaagaagaatcccggctccttggcacagtagagaatagcgtaaggcctggtcttcacagtttctcttccatcggctaaccttacgcctgtgtcatgtctacctctcgcttcttttgaccatcctttctcaaaccttcttagcttggaatcaaagattggctcgagagccaaggtcacaccttagtcgtcactgacgacaaggaaggcgcctcgtctgtctttcagaaggaactcaaggatgtaagtgattcttctgattatacatgatgggaaacgtgaagctttatctgattgattctccatccagaccgatatcctgatctcgactcctttccatcccgcgtacctcacggctgatctactctcaaaagagaaatctcctaacctcaaactctgtgtcactgcgggagtaggatccgatcacgtcgacctcaacgaatgtaacaagcgcaagatcactgtcgctgagtgtgtatcctccgtttagttcaattgcttcgcctcggaaccgaatacccagaattgatgtctaatgtatcttgaatacagagtgtctggttcgaacgtcgtcagtgtcgccgagcatgtcattatgaccatccttctcttggtcagaaatttcatacgtgagtagttctttacgatcgatccgtctcctgaataccgtctaatattctatctctgtacctaattcccagccgctcatgagcaaaccgtgcgaggaaactggaatgtagccgaggttgcaaggaacgccttcgatctcgaaggaaaggtctgtaccatcaatcgtttacaatttcccgtgcaatattctcgaatagattttcaagtagcaattctcctatacctcgttgtgcgccaggtctgcggtgtaatcggagccggtcgtattggataccgaggtatggtcttccgaagaatagagagagcttgtaggcttgatctgaacatgtcatctcatcaatcttgttgcgcttatgattttcagttctccaacgactcgtccccttcaactgcaaagaacttctctactatgattatactccaattcctgaccgtgagagataaaattccaggcaatctttctcgtgtgctctcgccgtctcactaacttttattaactcttgacgtgaatccaaaagagtatgccaacgaattcaaacaccgacgggtagatgatttcaacgagttcctttctcagtgcgacgttatcagtgttgtcagtcttttgcaatcctttttctgtatatgtagatagcgcggcatcgaaaacaagacagaaggaactgaagtactcagcacttgattttggcgtattggatccataacagaattgccctctacacgaaaagacgaggaacctgatcaacaaagacactctgaaacactttaagaaaggcaagtattcttcactttctcttcgactgttcgtgaacttgcttgaacgcgctcttcacacctgctcataaaatctgcgcttcctgtattccgctgaataaaggcgcctggcttgtcaacacggcacgaggcgcaatctgcaatgctgaggacgtaagagatgctctggagagcggacaacttgccggctatggcggtgatggttggtggtttcatctgatacgctcccataattcttttgtaggcttgagcagaacattgaccggtcacgctcggtcttaattagtgtggaatgttcaacctgctcccaaggaccatccttggaggaccatgacgaaccctcttggaggagggcaagtattaaccacccgatttacctttgtcttgcctctgtcgctgacttctctgttctcgtcatatcaatacgtacagaaatggaatggttccccatatgtctggaacaactctcgatgctcagaagtacgtgactagtctggcagcgcatgatatatattgaaggaataatgcttattttacaacctgaaacattccggggtttttgcttgtgatattctatagacgatacgcagacggaacgaaactgatcatcgaacaattccttgctggaaaacccattgacaagcagaacttgatcgtcgccgatggacaagtttgttcttttcttttcctctgtagatttgggtttatcctagtctatccagtctaatcctcttccattgtcatgttttctacctatctcttgtgggtgaatagtacgcgacgctagcctacggacagcgaaaagataacaaataaggttttacctcgtttccacggcctgtattcttttttattttactcttcactctgtacttcttagtgtgtcaatacatccatccgttcgttcgttcgttgaatcatctgcactactagtcattctgccttgcagccctcgttgcccttaggtccatatacattttccctcatgcgtcccactgtttctcttgagatatttgacaacacaagctacttatttggtggctggctttccgaaagtcgacctcgagataaggagcaaagagatgaaggggatcatgtactattgatatggcatttgacacaaattggcccttcctcctcctctatccaaagcggctgaattcatataaaccaagtaagggatgagagaacagtcagtttctcgggataaaccagtcaaaaattggaaagtgataagagaaacatacagaatacagagatggacatcgactacattgcgatggtgatccaccatgtcctgactgacggccttcgtccccattcgtgtcaccattcatatttgcgttcatgatcccattcccattcccattcaaacttgaactctcggttccgttcgtgaatccacatccattctcaatctcatccgtccctttctcttctattttgattgttctttcatctggccccacaaattctgactctgtatcaataggtcgatatgtcaaagacccggacccgagccgatcgatgaataagctttccaaaacttctgctttttgtaataatgggaatgttcctgaaggaatcggcctcttgtaagtcgaagtgaagacttcgagcgccgtctatttgaaagaagagaagaaagagaaatcatacacaagatttcgaaacaatcagtactcgtccatgacagccataagggaaggcagcggatagcgtataaataatggaaaaattattcactttgttttgtgtttcatctagatcgtgaagtgggtaaatgattcgtccatcgaggttgtgatctttacaccaaataccagggtgcatcctaaatccataaacggggagacgtgtgtggtcagtctttatgtaacccgactaaacagaaaaaggaaggatatgaaaagatgatcgtatttgtataagaaatccactaacattcctttctcagccctgaaagatattacattgacatccctgcgactcgattttacctgataccatcgggtcatagtcagtcgttgatgaatatgaaattgcgttttcgtctcctcaaaaatagtatagcagagctcgaacgtaaggtcaaacctaccaaggtgatctcgaaaccgaaagtgaagccagctttgaaagcacatgacacgtgaaagtgactggtgttgcagtccatacattcaattacagctccttgacctgattttccacatagtgtgcaccgctttacatgtacaatacaccacgagaagaagtgaatagattagcagtgcatacttcagagacttagagatccgaaaaaaaacagtatgagacaacaggaaacacgcaccgctgcccaagattcataggcaacatgttcgactccttctattttactaagatgtttcggatcgttatatcgtacaggatgaaacacactacaaagtagatgagcccaatttccgtttatcgtagatttgagcgcgtgtaattggcttggttccggataaactgctttggcctttcctttgccaatagaaggtttaaaggggtttggctcagaggggcaaaagatgcaggtataatcctacggcggggtaaacattttggagacacaaaaagttaggggagttcatcaagaccatgtagtgagagatcatataaaccgggatctgaccgagtaacttactaatcgagcatgatggtgattggcatcgaaacaaagctcgcatacttgagtattaggagatgaagaagttactcggaaagacccataacaacctatagcattcaatagaaagaccccacagcatcgttagaaaagaaagtcaagagaaaaaacaacgcatcatcgacacactgaccttcgtgagctgcgaaatgacatatactgcaaaaacttaatgtgctactgggttcatctcgatggcagcatgcacattttgttggtgggggaggtggaggtggtgggggtagtggcgtagatgcaacaggagcaagcgcccgtttttttgtttgaggtgatgtgaggactgaaggtggtggtgtagagttttgagtaacctacgaagaagtcccgcaaagagaacatatggatagaaaaaacattagaaacaggtgaatcttgactatggtcaaacaaatatcttcaaaagtatcttaccctaactctctttcgagggcctgtaggtaccgccggtggcgattctcgtaagagcttatctgatttcacgacttcctctggcctaagaggtctatttgggacctggccatacttcagaaaataggccttgcacgactcgcagtagactcccgacagggctgctctgagcattgtccaccaacgagaggaaagctttgttgaacaagatgaacatgacgttttgggtgtgacgtctttatataaaagatccgattcttcgagtaggtgactgttggcgccgaagagtgacggctggggaggtagtttacgtagcgaaggagaagacgcgcgttgttcgaagtatgctcgcagagctccttctttgaagatctgatagtaccgaacggtttcagcaggagatcggccaatccttgttgacgcttcatgagcatctagtcctcctttttcagaaagtgaattgtctaaaagctctatctctttaggagagaactacgttcgaagaaaatatccttcagacatgaatataccgcaaggatgctagtaagcaacgaacacggggactcacagagatgatatccagttcttgaggtgtacaattgattaattggtcgtatgcttcctgaggagaatatgacatataaagatgaacagctctggtcaaaacgcccagatagtaggagggcactggtagtctagctaatcgaactcgagccatgaaacagttcacttttgaaattcgtagaacagaatcaagagaaaatgagacagttaacacgtttgcctcggacaaaaggtgaagaaagtttgtaagtaaatagtttcttacgttcgtcgacaaattcaggaggtttactttgcagctccactgtatcatctccgcctcgttcatagacatctggtgattgaaagatcacgatcaatactcatgtaatcacaaccgatgacgatacgcaataaaacttgagccaaagaacaagactcactctcaggacgcggttctgtcgaggagttagcctcaggtataaattgagcttgataacggggacccaggcgagaaacaacttgagggaatatgggatcatcggggtcttcgaaagtttgtaatgaagtgacgtacgttgagtttctagatatatcgaagtgcacatgagagaaaaaagcagacatacctaatgtatcttcggctaccgtattttgactatcatttaccataaaaatcggaaagtcaacatccaaatacatatgtctccgaatgctatacattcgaacagaaaagagatcgacttgcccaaagtatcgataaggaaatccacgaaagtacttcacaactttactccccgctatcttcttcgaatttttcgagattgtcactggttgtattgcctttttctttattccaaccttccagccgtccacttcgtcttcgtccagcagtgtacacggtgcacaggcccagctattacatgcgaaacaagtcaattggctttcctattttacaaaccaagagagatctcaagataaaaagatacttacccaaatcctttcgctggtttcgagattattggcggagtaagacaatccatatggtataatttgaggcaccgactacgaaagagaaacagaatacatgattagcatgctatgatactcgtaaaaccaagttttcattttggttacaaagatgatactcactagcaagttactgtccgtcgtggatctgcccatctatcacaaaccgagcaaacctgatagggctccgaccattcgacaaggctctccttttcacataggatgtatgagtagcgtgaagccaaagtgctcaatatatggcttggcactatttcaaacgaggcacgttgaagacggtaatcagtgatctcgcaaactgacatcttctatatagcctcgagaaactcttacaattgcgaatctgagaaacaagcatgacctcaaactcttgtctatgaaagtgatccaactttcagtctttgtggtgaaagcgacgcgcgcgccaagtagatggggatagtggaaggctcacttgatgtattggtcaaaaaaccggaagtaatagaaatgatctggtttttgtttccctatcggccattgttgttcccaattttgtacaacgtcagttaacttcttattcttgaaatgatgaaggagtcgcgtgtcttcttcattcacgtgagaatgcaggatagaagttggatgaactcacatgcgctgagattttcgatttggtctttatgcaagactgtaattccgtcattcatggtcaaacccacgtccacattaacccatcaactatcaggcgattgaagagaatagaaggacacgagataaagaactggaatgttttacaaaccaacgcattttcctattatatcagaggtcgacctaacggatgaatttatccccgcgaataaaagacgcgggtctaactgccttgcggtaaactatcagaaataaacgtatattccgagattaagagacaaatgatctacaccgtcagaaactgaaattggagagacaaaacaagaactccagtccagagaggatttacatcactgttcaattgtttccgaagaatcacccataaaatcgagagaggagattcaattaaatgaatatgtgaaggcgtttataagatcatcgatgggtagaatcaggttgagacgtacccaggtctagagacgacaggttgtgtaattaattcaatgcattaatacagatcatgttaatctccatcacatctggttcaggggacttctcccgcgagaagaaagaggaaatgaggaagagaaaaagtcgaacctgaaatagtaggctaacttgacatccagctcttccttctttcgactaacgattgaggaacttgatccggaattgcctagagaaggcggcaatgttgtaggtccagcgaaacccatcactctggccacgatcgatggttgaccgacgaatggagcagatatgtagacgtgatctgtaatgattgattattcccgaataaaatgtacgtttgtatacgatgatcgggattcagtaaaaaccaagacaaacagacagaggagatcaatttcaacagtcccatcgaattctccagagtgacttgcaaacaaagagatgagcgggacatgatacagagacaagaatatcataccatttacatgtacggtttctcctgtttctagtcgaacagaagaaactatagtcgaaccccctacggaaccagagctaaacccagaaccagacttcattcctttaccttcccaaccgaatgatcttatctagtattctctttcctctgaggaagactttctcagttcagtgcttctgcagatgattatgttcacacaaggttgatcagatgatctattgattggaactagttttcttgtttgaaagaatcttgagaaatgggattgtcagggggatattctatcctcaagatatagcccagtcgccgaggtaggcggaggagtcagatcagtcattcactcaagcaggaaggaaaggaggaaaagtaactcagatacgaacaaaagaaacaccctgtaaaggatcaagtcaggttttgcttcgccttcttcttcgattctcaaagagaggaaggttgagagtgggggaatggaggagaacggtcagacaacatcacgcgcatgggcaatgtctactccccagcgagcggctcagcgcggcatttgctgatttttcgcacaaatcactgatttctagacttgttcctttctggatccatcaatttgctcttcatataagttgcttccaattcaatttagtcaggacattcaagagatgggagtcaatggtgaattttcttcatcaagatcacctccgaagctctcaaaagatgtaagacgcaaggtgtatgccacaacggtatctatgtcggatcacgcgaacgaagattgtacagagattgccagcctgtaaaacccaaagagattgtaaccaaaagagggaggaaaaaggaacaaaagagggaagaaacggaggaaacacatcggaaacgagagtgaagaaggaaaacaagccaaaaagcaaggtgttatatttatttattttgaatcttcgccgacctctttcataacttttgaaacttttaatatcccgttcaagcagaagggacctgcttgtactgtcgacgccacatgctgtcaatctctcccaagtagtacgatccaggccagagatcgtcaagcgaaccgatgggcgaatatgacacggcgttgtgagtctcttctcggacctgtgtcgaagcgccgagcgaatttcaaaccaaaagagaccgattcaagaaggttgttagcggttgacaaagaccacggtccacaaaaaaagtcattatccaacgtaccttcagagctttgacaaagtcatcacaggggacaatcttcatgttgctcaatcggttgttgagatcaagcttctcagagatgaaagcggttgagctcttgaccttaagagcatagaaagaagcagcagctccagatccgtaggcgtagagagcaatgcgcttgccgacctgttcaagagaaagccagcattaaagaaaagagttcagttcaattgataaggaagagatgattgggatagagatcaagacttacgagctcgtcaccaggaacattagagaacaaacttgcgagagcaccgaagagagaggcggtgtacaagtttccgagctgtcggacggtggtcattccaggctcaacctgcttgttgaaagaagacttggaggcagcaatcagagatttctcgacattcttgtctgaaagacttttcttcatgtccaaagtagcaagctcggctggcacctcagcaaaaaccgggtcgttggggttgtttcggaagtcattgtacaactagataaggtgattcaagagatgcataaataatgagtaccagaaacctaaaagtttttatctcaagctaagagttacaaaaagactgcttacaagtcgggcgtggcctttgacaacctgctttccgtaaggactgttccaacaagataatatgatgacacgaattaactccgttgatcggttgaatttaaggagaatacagaagatgacgcttacctgtggaacaaaaggtaatcgaacgacgcagcactgacaccggcaacctcggtgtgtccgttggtgacaccgttagtcttgggtcctccaaatcgcttggcatactttgttcggtaagcttcataggccttgtcaatggcgttgacgtaggaagtgacggagagaggtccatcgacaatgggctatttggaggagaaggtttcagagttaattcaatggacaatatttgatcaaaaacaaatataggaggtgcgcagacgaacgtattcactataaagcaacaaacgattcgaaggatacgagcaccccgaattagtgtaagactctcccaagcgcaaacttcaaaatttgaacatacgaagaaagattaggcttgtagaagtcccaagcgttggtcatgaagtttccgtggacggctagattgatgagaatgacggataagggttgtttcagccgctggcgtggaagaaaatgacggattggaactcacgctcgaagacgacgggagcgtcgggtccgatgaggatggcgcaagcaccagcacctccggcaggtcgggcagcaccctcggcgtagatggcaatgtctccgcagaagacaatggcatttcttccgtcccaagaggatgactcgatccagttgacggcattgaacagggccgcggtagaaccgtagcaggcattcttggagtcgataccctcaatatctgtgttgccgtgggactcgaacaagtccataaggactgtcttgacagatttggacttgtcaatgatggactcagttccgacatcaattcgaccgattgacttgggatcaacgttgtactttgatagaagaccggaaacagctaacaatcaaatggaattgcaaaacggagaaaggtgtcagtgagatgcgcttgggcctttttcctgtcgattgctgaaacggaagagactgaccgttcaaggcgaacgagttgatgtcctcagtgtcgtcggtgaaggccatgaagttgttgccgagaccgatggtgtactttccggaaggaaccccatcaaaagcctcgagatccttgtgagcgatggcctgatcgagagaaatcgcggtcagtgttgtatttcgcgtcgggagatattagtagaaaatgaacaagatcaaagaagaatggacggaagcaaaagagatgaaacagtcgcccatatgagggcgagggatcgaacatgggaatagagagagaatgcagaagagagaatagttacgcactcgtcgaggaaagtagatctacagaaggagtagcgcattggaaagaaagatgacatgaatcgagaagggttgttttgtttgatgaagaaaaaaaaaggaagaaccggtcagtcgactaaagatgattaaagattgaacacaaacagaattgaacaacatacctccataccgagaattccaacatctttgggtcgctgttcggtagtagaagtgtacataactggatatctagattgagattgtgtatggttttgtgggtgtggtaagaattcggagagaacacggtagacgttttattcttttctcttctggcttctttttttgtgtctaaaatgggacgatcaaagtaagaaaacaagacgggtaaataactaaatggttacaaagtcgtccgatcgtaagacttcgtttatctgccgcaattcaagtggagtcacgtgtggtgttacatagccctgggagtgggctcgttccttgtccatccgcgtactcaaggtcaatcatctatcaatacctcgtccttacgtttcagacgaaaccctcttggaggacacgatggaaggtgatttgtccagtggattatacgaaaatttcttttttgtcatagtcctcattcgctgatgatctttcgctacttcttcacctttcaaagcttcctcactcgcctatatcgatacggtgtactctgccgactcagtagagttctcacatagacatccagatatctttgctgttgggacctatcagttagagaaacctgtggaacagactgctgtcaaggaaagcaacgggtcaggagacgagagtgacgatggtgagccaacgcgtacacctgccgcaaagaggaaaggccgatgcttggtctacagaactgacggccaaggtatgtaagttcgagttttctcgctcagcttgataaacttgcgctgtcgacttgacagtctgtctactttttattcttttctgtccgcatcagggaggagcttcaaagaatcgaaggacctgccatcttggacatgaaatggttggttcgtctttttgaaagcaaacagagaaatctcgttcggtttgactagcatatcagtctgcatatgtatctcactcgcaatgacctatgtttgagcttaggaaacctacttctgatccatcggaaccttccattctcgggatcgccgatgcagaaggtcgactggtcacccatagatgggacgatactctcgttcgcccctttcctttcttgccttcttcaatctggacaaagtttgacattatccttcacatacccccggaaataatctagaataaacttgtggaggttcaaactcttcaggtgaccgacccaaaaactctcgttctctctttagactggtccaatagggtaaacccgtacgtttctccctctctccctgtctagctaaatgaatggacttcgttcttgacgatataacactcataaacacacatatacaaccacgttgttagtgcctcttcggcttccctaatcacttcgctctcttcgatggaactttctcatctgaaatacacttcaaccggagaactagaggtggaaagaacgtggaaagcgcacgattttgaaccctgggttgcttcctgggacggctggaaccaaaacattctgtactctggtatgcatggcatcatctgccccacgccctcttctttattcgaagaaaattctatccaagctcatgtcaaacaccactgtgcgctctcattgttttaaggcggagatgattgtaagcttaaagcttgggatgtcaggtcggccgaggacgaccaaccaatctggaccaacaagaggtgagttgtcgtctggaagttcgtttgtctttatcgaagactgatattttgtaatcttcactctcaattcatagattcgatgcgggcgtgacatgcatccagacttctcctcataaacccaacctaattgctgtcggatcgtaagcgggtgattctcctgttttcgatcaaatttcgcaggaatactcgatttgacatcaatctttcaacttttctccataatccttggtttatgaaaacatgaagctacaacgaaactgtcacgttacttgatcctcgatacccactccgaccacttgtcgatccaatccccataggaggaggtgcctggcgaatcaaatggcacccgtctcaatccagacagaacgaccttctcgttgcatgcatgcacgatggcttcaaagtcatcagactcgacggttcaactgtcgagagaactgatcagaacgacggagaggcagaatggaaacttcaaagcttggagcttctgacgaggtttgacggtcatgagagtttggcgtatggagtagactggagtagcgcagctgttgaagagggaaaggaaggatcgttagtgggtagcgcgtcgttctacgaccatgcgttgcatctatggagagcatgatctgccttgatattctacctttgtctcttgcctcgcaggtacgcatcagaggttgctacatctaattgaacatatttatgtacgaagacgaaaccaacgaaagaaattagacgagaggtaatggaaagacaagaatcaaccgcgcggcctgcctctgccacttccgctccgactggagctatttgaaccaaatcctgaagatccattagccgaaggacctgtcggttgtctatgtatgctactcgatcctccattcccttcttttgccgcattatggtttttgcttccatccccagaacctcgtgaaggctttgtccccgaatctgtggtccccgtagcgaatatcctctccctagcctttctatattcttcctctctttcagtcaaagacctacccgctccagcaggcggcgtggttcctctactcccaccaggggagttattggttgagttcgtaggtctcttaagaagtgtgattttgggtgttggactcgactgtgaaacagtgccaggtggaatgctgaaattggtgtttgggttgaggtacatgccatattgaggcgtataaggaggattgaaaacaggagaagggccagtggatcgacgggcgaatgtcgagttggacccgtcgtgcagagacgggaaattatgggaatacataagtggagctggagtatttctataaagaacgagtaagagaaaggaaaccaaagagagcggcaaaattaggagagaggcatctgaagaagtagaacaagtcgtgaataggaggacaagaagtcacatacgcagcttcccagatctgacggttttgatcccatccacaagccgttgtccttgctgctgaaggtcctgatggagttctggtccattcatcgaattcgttctgagcattgttctcatctactagaatggtcgttggtaccatacgagacggaggaagaggaacctcagtccggttgggtacaaatacatttgatctggggttcagttctgtctaggacatttattttccacagccaacaaacacacccatgcaaacataaggattgacagaaccaaagcaaacaaagaaatgggtcggccaagtgcttctccaacgatatggttgggtaaccaaaaatcagaatacaaagaaaagtgacaacgtacttgggtctcccaatcttcgacgtcgacagaactgcctgttgggactataggcatagacatggaggacaagacactgcagggagttttaatagagccagtgtcaatggaagagaaagaaaagagccaccagagatcagaaggatgaggttgtctgtataactgttgcacaacaggctgttgtagaaaacatagagaaaacatagagaaaacaggatgtcggaacaataagccggctatcatacatagacaaaatatttgatatgtggtataagataaaaaggcaactttttaggtgttactcctatctgtcctcatcaacctcaactgaacattacctcgcttactgtgtctcatgaaatttaatttagtctacactctgataccagaggttctgagttctagttggcgcacatagaagacacaacttcgctcggtttgctcttccctctcaatgccaaatgatgctagttacaactacaacacacaacgcttgatcgttgaatgagtacatgacggttgaataatcatgctatataaatactgaattatgcgtcttctgatgcgcccccagacgttttcctgagacccttcatcttcctcgttctaaaaagatcatccgaaatcagactcgaaaactttgtgggtgaagatcgacaggaacgggagaaagaaaacgtactgtagctttccaagatcctgacttcccatgtggagtcgtccaaccttgtctcccatctcgtcggtctcgatgttctttctcttctttcccaaccccttctcgacgtccttcttgtccaacttgggctttttcattgcttgcttccacatatcctcatccgcctcttgacgtcttctgatcttgaaatcaaagtttggccccataggcgagagttccattcgagggattctagttccagagtgaagtagtcggatggtagaagttcggaaatggatgatgggcaaagtagaagcttctgatactgaaacagacgacgaagtggtagagggcaaaggcgggagaggaccggcagtaatggagataacatgctcgagaccagcaagatggacgtgttcgagagcatgaccgttgaagaaatcaaggaggagagacttgaactgaatcatggcaggatgggtttcgaatagaggagacgcaaaatgaaacaaaggtcggtgaccaggagtggatttgggggtctgggcaggttcgaattgccacgaaaacaaaagttattagttttaccattctattcagaatatgctgtagaaatcagctatctgtactgatcaaaatctaaaactaaccttgaactcagccatgccctgagccatttcgattcccagctccatcatgtccaataccttgccgtcaaacatcctggcaaacaccaaatcatgcggcctctttttagaatgcagaccaacacagtagagtgaggcgtcgttcttcgatgaccaaaactcgagggactcggtggactcaaaagggtgaatatcattcttcttggaaaagtttatgctgtccggtcgcttgagcatggcctaattcaacgacaggcaaaggtttacgcaagagacgatagttagaacatgcaaaacagagtgatgaccatacgtcaacttgtatagaacatcattcactcacgagctctttgagagcaactccgactctttcactgatctgatttcctctgacgaagattgcagtcttagggttctcgaccaccttggcctctcgttcctctaaagctcgcttcgctcgggcgttcttgggtttgctacacatggcatatgagggaacaaagaataagcaagaagtgacaactgatcaaaaacaactcttcaagaaaccatgacttcaattccaccacttacacagttcggatcatctcttgggagtatgtctgttttatgaaagactacagtagaaaacgcggttgtggaagacggtcctagtggtttgcgtttctcaatttctggcaatattgtcggacttgccacaaatttttgaccccagatgaaaccaaacagttgggcaaatatgggccttcgctcagagccgatgacaaacaaatcgcaatattacctgctcaattcgctccttttttattgcattcaataaagatcgatatgtatgaaatgagctcctcttttcagctcttgtagatcaccacccactttcaatgtccaagaaagaggtccctaaagatactcacagcagtttcaaggctcctggaacgatactgcgagtatggaatggattgaaacgcggaggaggatttcttattgatcaatggttcgtgtctggcactttcgtgtttgttgtggtcggtttggatgattgatatccgttccatccaaactcaaatcaggtttctccttggtatagtcattgtgatgcgagtcgctcaccatatacatgttctagccgcctcttctcgcttgattctaacgcatgcgactcattgaactcaactacaatctagattgctcgctcacttctttccaaatgcaggtcgaaacggcggcccgtatgtatagacgaaacactccgagtccaaagctcatgaaacgctgacccttctcaatcaactaccaactcatttctatcaggataagagctgtatgtctagactggcttgcgtttgagaaaaacaattgtctttctgtgtactaaggtcctgtctcccacaataggaatatactatcaagtacctcttggttgccatcatcttcttcatatctggactctctttaccgcttgcacaccgttcgttcaagtttttcatttcgctcatagccgaagtcagatctcactaacaccccaatctttcaacttttcaacagtctataaacgagctcttgattggcgtctccatgttgtcactcatattacttgcttcttcatctttcctgccctggtttttggtatcgtcaatgctgttcgagcatcggaccctaatttcgagaggttcgacagatgggctcttgtgggaatggtgcttatgggttgcttacctactaccgttagcaggttcgttcttattcttcatatatcacatatctcggatgcgagtgagcaatattaacagttctcaatttatatcaatcagtaatgtcgttatgactggacaggctgaaggagatcaatcggcagcgaccatagaagtcttgataggaaatctgataggtaatttagaggttattttgttcttctctcggtcaacagacatactcatacttctacttttgtctcaaggaacctttctttcacccgcgctcttaaaaatgttcttatcaacatctgaaacatgggcattcggatcgccaactccgtctggatcgggaggagtaggcgaaatttatcgacaggtctctgagcagttggggctcactgtgttcatcccactatttgttggagaggtgattcagtggttgtggccgacatttatcaggaagtggagactcaaggtaaagctagcgaaactaagtagtctttgcttgattggaatcatctggtgagccttagtctcttcaacgtatcatctctttccgagtactcaagcacaatctctcaggtcaacattttgcaacgccttctactcgggctcattcgaggctctctctggatccactgtgagagacgtcccttctttcttcttcacatctagtcatattcttacagtctcacactttcattatcttcatcaggtcaccctagtggttcttctgaacatcattctttacatcttcttcagttgcatgctatttacgatagcccgaattatacctatgccttcatttcttcaggatgatcgtctctcgcaacctccagcccacctattagagggtgaggacaagacgaatcatacgtccaccgggtggtgggaggagaaaaagttgatggatgcagagacgacaattgctcttctattttgtggcgcggctaaaggttcgtcatggaggtgatctggacaccacatcacgatctgagagccaatcttgctttgtttgttatccaaatcaaccaggtatcgttctgggaggtcctgtatcccaaattctctacggaggactttcgacctttgatagaggaaaaattaccatccctgtatgtctggttgcttcatctttctggttgaatcagaagctcatcgatctcatttcggtttcgtttgttctttatggtaacagctgtatgtttatattctttttttttcagctatcctagacttgtcataacatatcactaattgcttttcaacttcatatagtgtactctaccagggctcccaggttgttgttgcacagggcacagttgctatcctcaaagcctggcatcgacgagtaaatgctaagagccaaagtcttatcaaaaatgagccggacgctgaattgtcgaccgagcacatcgacgacaagaccgagagggcttccgattcaagcgatctgtatgaaccttatgtggataaatcgaatattgtggaagctaagattcgctcgaacacttgaaagagctttgctaggattctgctttgtctttaatcgcaatattgcacatttataattctatcccttttcccatacagctatatcctacataaagtttagaataattttcaatctatctataatgatgtttggtttataattatacttcgttatgcgcgtacctgattccttcccttcttcgatgttgaatgaccctgactgtcatcaaatgatatatatgaattcaacaa

SEQ ID NO: 1549 - DNA, 3814 bp, Xanthophyllomyces dendrorhous
atatatatgaattcaacaatatcatatatctcatttatcacttagttaaattcaagtctgagtgggctcagcccaggaaatctctcgccgcctgttcaccttctaactttcttcgatccatatccctcttcgttccatccagcttcgtcatgttcttttgtgctagtgagtgacactttagctaatagaaatacacgccgaatgcgtttaggctttgtttcgtttttttcctcatcaactctcgttttttttggcggttcgtcttcagtctcgggaacgcctcctatcaacccagtgatctcgaataagtcgggccatctgtatgagaaaagtctcattgaaaagtacataggttagtctttttcttttatgttatttgatcgccttcaactctcttctacataattagcgtagccgaaaaaaaacattcagaatctgacgagaagaatgaaccgcttcctttccggtggcttaaatgttttttttttcgcgacacgtacttgtagatgagaacggccgagaccccatttctggggagtccctgagcaaagaagatctcgtcgaagtgaaagctagtgagtttgttctttttgtatctctctaagtaatatggatgtaggaatggtatattttcttccacctgccagaatacgccgtgaactaatgaaagtaaaaacgaatgaatatgtgcgatcgtaattcatcgttcgttcaccataggtcccaacgttcccgccccccgtccttccgctgccacctctatcccttcccttcttcattccctccagtcggaatgggatgctttgatgcttgagtctctagccttaaaaacccagtatcaatcgacaagacaagaattggctcacgctctttaccgagaggatgccagtttgcgtgtcgtcgctcgacttgtgaaggagcgggaccaggctcgagagtgggtttctcttcactttcttacgtgtgatcctctgtgaagaactcatctgacatgacccaattaatattatagggccctcgggtctgtgcaagccacactgggtatcgctcctcccgctgctggagatgtggatatggacactgctgaggcttcttcgccaaatgagctttctgctgatgctaaagccaaggttgaggctactcacaagtcgtaagtttctttggatcggattattgacagtacctggttggaattttggctgacgcgtcgtctatttgattcaaccactagcctctcgtcgacccgtaaaaagcgcaagatcccatctggttacatcgcagctgatgttctttcgacctacactgagactgccacagttccttcccttcactcgacgaagcctcctggaatttctgctcttgatatctctgctgatggaaatctggccctcactggtggaaacgacaaagtcgttcaaatctatgatcgagtttcgaacaaagttgctgctaccctcaaaggtcacaccaagaaggtcacccaggttttgttccgagaggaagaaggtgcttctaagattgccgtctcctctggagctgatggaaaagttaaattttggtcggagggtggggagggcaactggtcgttgagtaactcactcgccgcccatactaaggacatcactgggcttgctctccatccttccaagggatttgttgcctccgcctcgatggatgccacctgggctttgcatgacatcgagaagggttccactgtccagacctttgaggctttatccgctgatgagggttcttattcgtattcctcattcgccgtccatcctgatggtcttcttcatggaggagccaccatcgatggcgctgttcgaatctgggatgttcgtgataagtcatcgcttgcagcaacgatctcaaacgagtccggggttgccatcccagcactctcgttctcggagaacggttaccatcttgccgtcgccaatgctgcatcatcctcaattggaatctttgatcttcgaaagctctcgcttcttcattccatcgacctcccaaccgctggagctcccggaggaggcaaaatctcgtcccttcgatttgatccatctgggcagttcttggcttgcgctggaactgatcttcgggtgttcaagaacaagacctgggaggagactttgctgtacgaccagaacgcaggcgagttaactgatgttagattcggaccatttggaaaggagattgtgcttagtggtgccgacaggactattcgagtccttggagttgctgctcaagagtaaaggatagggacaaaaattgctcacgcaaggttctatggcatgtggaggaaggatggtgaaagatttgggaatgcgttgtaggaagaagccaattcgtttatatatcaatcgttttctatttcctgttcgttatctgcgcttgtcatcaagtgtcatgactggttgttggccgactggctaaccatactgggactaacgagatttggagcgatcgccttcttggcaacactagatatctgaaccacgtataacataagaatcgtgactttgtgttatcacattgttttgatcgccatcttgagtaaagttagcagaagaatttcgagcttcaagaatattcatgtattgtgtcactttgatttggcgtctgcttattgcagatagtcttgttcatttcatcccatatttcctctattccatatcatcttcgaatcccttccgaagatataaagaaaattgtctgactgggagaacaacgttgtatttgtattttgtttgatccagagttgtgagctcaggtcattgcaaaagccatcaagaagaaaacgttgacgagaatatctcaaaagggttgttttgaaaggaaacaaacaaactccgagtcgtcgtctcatagccaccatgatgttcaatctcgtgccctggtgtgtattggtatctcgtttcgagaactctctcggcacattgtcaagccccagctacgcgaccgtaaatgaacaagttataatagtatattaaccctagcattgctgaatatctaccgaaataagtgggtgaaaatagactcttcgttttggcattcgttttcaactaagtccccactgatttcccaaaattacatacacaccatccaggtgtctcaataagatgcactgagaaaccaggaaaaaaaaaggacaggaaacccagctagaaatctgtatctcttcagcgggagagtcttgggagtccgcgcaaagagaaatctgagagtgttgccgtagggggagataataactcacaactgaaattatgtcaagactactgaatttccaacaaaatacaaataagatcagaaatctatgtttcaacgaaagttgcacctccatactgtgcagtcttaaagctcttttcgtcctgggcaaccaggacatcaataatatcgaatacaatacagagaagattagcattgcccctgcataaggatgacacgattcgatcagagtggagaccttcgggtcaaattatttttttactcatgtatctacatattctgaattccacatgggcatataatctcaggaaagcaagaggttgctatatatgtatcagaacgtaataacttatgacagatggaggtaggcaacacagtccgcttcctcagtccttgaccgatcgcacttggagcttcatatggaacccttcctccttcttgcccttcaccctcggtctttgtaccatgtttgcccgatgctcatagtcgatcgccgggacgacgctctcgaacgtcaactggcggaggatgacaaacagaaacgccttgatctcagcaagagcaaaccggtagccgcttcgaggac

SEQ ID NO: 1550 - DNA, 1273 bp, Xanthophyllomyces dendrorhous
gtgggtgagtgagcgtcttgatcagtcggtccagaccgacggctagctccgaccagcatcccgctacgtcctcacatcacgatcagatagacacagagaccatacagactaggctcgctcgtctccaccttgagcagttcatccctcagcttgttttgtatctctggccgagtcgacaacgagtggagcatccaggtcagagcagtcgaagatgtcctaagatgcaagagaagtaaagagatccaccagcgagtgtaccggtatgggcgtgtaggtgtgagcgtatgtacttgaccatgagaacgagatatcacaagacaccagcataggacgtactcaaacccagctaggaggagcgtagagatctgcgcgagcacttcctcatcacccagtcggttctgctcagccagatcggtagccatgttcgcccgtactacaggtgccagcgacagaaaggaaagccgagcagaaagaagacacaaggaagacacaaggaagacacagagaagagacagagaagaggtcagctcgctcggaaggaggcacataacacctcacgaacatcacacaaacaccccatgcggacagacctagagagctcaagatgtccttcccctggacgtctgctttcccaaggcccttcccgccatcgacaccaaccgagagatcgagaacggctttcttcttccgagcgaggatgtcctgtgtcgaccgtcagacagacgtccagagatagacatgtgtgtatgaacagcacacataaacagcacacatgagatcgatagaacacaccaagactcagacagagacagcaaagagacagacccttccataacggttcacagtcatcatcgctcgttctcggatggcctgacgctcggttctctacatcaaagccagtcacatggaacaccggtcagcatcgtgcacatacagtggacggacacccatcacgacagatccagccccgggagagcttggctcagccagattcagctaaacacagtcagacagagcccggcagagatgcctctgagatgggacaaaacgtacgatgtagtttagcacaggaaacagatcctgaaggacgcctagtgtcgactgtccagacaggccgtcaaacatcgtcttgtaagcgatagaaagctcgttcgactctttctcgatcgagtcaaagtcgtagtcgaaccctagacagacggtgcatcatgggatcggcagcacatcgtgagacagccatcgtcggggtcagtgtcctgtccggcgtcgtctc

SEQ ID NO: 1551 - DNA, 18676 bp, Xanthophyllomyces dendrorhous
ttcaccacatccagccatcgtccgtcgtcagacagtggacagcaggcagtggacagtaaacagtggacagcagtcagcaaccagaagtcgacagtcagcaaccagccactagcagtcggaccaccgcctcagcagtcacagagagagcgcactggttgaacaccttcggatcagcagagtacagcctaggctggccgagcatacccctgtacacaaacgtcggtccatagaccgcctccagatggctatgtgcgacgcctacttctagcctgttcaccacaacagacatcacaacagacaccacaacacgtcagcacaacacgtcagcacaacacgtcagcacacatcaatagctatcgccgcccggtatcaggccatatggtatgggcagcaagtgattggctgatcgccaagctcacttgatgatgtccttcgcgttcccatagagatagctctctagcctcggacctgtttgctcatgacaagacgacaagtcggagagcatccgacaagagacaaggcaggcaggcagtcagtctcgagcggtcacagtcagcgctatctcggccacagacgacaggtcgaacctggtaagttgtacagaggcgatcttcgaggagccagatggaaccagtcgacgaacacggccaagccgatgagacccaaagcgagtccagccgaccgtccgggatgatcgataacgatctgaagcacgctgaaagacatgtcggtgttgatattcgggttcaagaagaagcagaaagatattgtatccaagtactcaacaatcacgatcgttatgctttttgttcggccatgcatttgctgatcagtatcaatctgatcacgcttatttcatgcacacgtgaaagccattgtattaagaagcactgcaccgtcatgttgcctctcgagtaggaaatttgaatatgaacgccatcttgtttccataaactatccccggagttccctatgatctgagagaaggagaatagagggttttgaaacgcacttggtaaatgacgttttaacttacttgacacatatatcacgtgaccatcgcctcctttaccgcctctatcgttctttcctccagatgtatctgatctctacttccaaccgttagaagagaagaccataagcagatagaccatccgtcatgttttcgttcagattcctcgctcagactggagcgcgtcttgccggtctggctcaacatagagtcctcgttacttccagcctctaccgtccttctgttcaaagctccattggttaccgaatgttcaacaaggctgttgaccaaggagacatgtcggacgcagcttgggagctcaagcgaatcgacgataagaatgagaaggcggctaggcaggaggtagcagttactttgttcgagaaagatgagttgtcaccagaagagatcgtcaaacacctcaagttcgtgtattcaatattccgatcaatttttggacaattagattggcgagagacgataagatgttcacctttgactgacgagatagatctttggctgtatcgatataggtcagaaaggaaactgtctatagccaccgttaggtccgttattgatctcttttagggagaaaagacagagcgagaaacagaagacaacgtgttctctgtctcgttcaaattcttaaagacgtcacccttctcaacctactctcctgaaccatctttgtatctctttgtacatttgaaacgcaaacctttgactcttcagaaagtatctgatacaacacgcgatggtcaacgaagacttttatcatcttctggaggatcccgacgtatggtgagagctgctctacgttcctcgatactcgactcggtctgccgaatgttgtttgtatgctgacattccaggttcggtcacgtttgataccgtgtagggaacgattctcaggtgccaagggtgcatatcgtaagcatttcttgttttgacccagtttttctctacatcagtcaaagtaaatgaaaacaaagaaattctactgacccaatattttgtctataaatgcttcctgtgatcagaatcgactccgaacatcaaagtagcaatatcacttcacaaaagatttgagcagatggacatcggtacttccctcagataccccttcaatcaatctatagcttttgctgtcatggttttctgagatcaaggttccttatgtcctttcttgactcgatgtgtacagatcgagaagatcatttggtgaggaggtattccaataaaggaggaggaatccgaccatatcatgccggacccaagaaggtacgattctgcaatctctttcttaagaatcttccaaatatcacatcagtgcccatattgaatggagaaagtcagttgatggatcaatctgatgaatgtatttgccttttccaatggtgagaattgttatagtacaaataccctcggaacggatacaagcgaagaacttgataagctcagggtctcattgtgcccgtataacttacaccttaataatttggccatctatagtttgatatgatctccatatatcagaattagttcgaagacagacaacctcctctttcacaatatatatcaagttggtgtcttctgatgatttgaactattctcttcctgatgtgctatatttaaataccttagcactgacttcaggcgaaattaaagatgaaagataggaggaaaggtaaaagaaagttcattttcattcgcaagaaactcgaggaaacgagaagagcagtaatgttaggcgtagtaggatgttccagacaagattgacgacaacgccgatatttgatcgtcattgaaccgttttttgtcctccgcttcccactacatcaggaaaaccacacaaggaaaaggtcagaagtctgactctcgatgaagagaaaacaccagaaacaagaatcaaacgtacagtgtcttggtgactagccttgaaagaagaagcgaccttgagaacagtcgttttgatcgggattggatcggtagcatgctgtattgaagtcaaaccataagtcaccaataagtatgtctaaatcattatccacaaagagcgttgtatcactcacaggagctagagactcggcaatcaaatctggaatgtatgaaggcacagaataagggaaggcttcgacgatggcaccgattcccaagatggctgagtgcatgattgtcaaagaggtcatataagtgggatcgacttctccattgggaagccgtcgcttaggaatctgagtttcccgaatggtcttttggaatttaacctgtggatttcgagggagaacgatatcagtctatgttttggttagttgtgaagaagggaaacgttcctaccttcaaatgcacaatactctctcgtcgagctgaacatatatatataaacataatggaagatgaggcccgactttgaataaatgatgaatatcaaggcttgacttacaacatcgcaatactgaagatagtacagaagcagcaacttcacgtacatccaggttttcgtcaactaagcattccgtcaagacctagtaaaaggaaaaggttagacttcttcatgcattcgggttgatagctaaatggcgtcactcacatccatgattgaaacagcggtagtttcctgaacgatcggcaaacctcggaaataaacagttgcaaggacactgttacgtgatattgggaatgttggagaaaataaataagtcagcaagatgatgcaaaattgagatttgattaaaactagcaatgtggcttacggcaaaacgtgcagtctgatatgccatgactagaaatagttcgcgaacggatatgatacagaaagtcggaaacagacaattttatcgatcagcagcatgacaaatggcaaggttcggtgaacatttacggactttatgacttcgcaaggttttcaggaggacgaagagaagtggctcgacggtttcaagcggggctaccatcaaaacgcgaccatattggtcagtacaatacagactcaacagaaggttgcagttgatcgttttgcgacagactcacgtgatacgccagcgatgagcgcaagaacacccgcggacgacttttgcaattccatcgagtcctttaactctcgcatctatttcggaggcgtgttttagataatgcatacatccaagaaagagaacagtttggaccacaaacctggaaaatttcaggaaggataggaagcacggccgtaaatgtagcagctgcgttgacatcgatcaaacctcgcttcaagctaggatagagaacggatatccaaatattgaagaacatcaatcggtgatagaaacttgtcatgtagatgagagtaaaaacaaaaacacttactatcgtagtagagagagggaggttttgtcatattctgaagaagatcccaatggctgtcacaagttcaagatgaggagcttttattcagtacctgtatttagattcgacgagcgagatgagcgcactccagatggtctaatctctctccaagtgtttagacgcgggacacagctctcaatatgcttcgcgtcagtggatcgatgcaggcttaagggatctgaaagaggatttttgcactcctcgacgaattttagaggttcaagagtgcacactcgccactatgataggttgcatatccaagaccaacaaccaaaatcagctcaagacttgatactacaaagaataaagtccttctcttaccctcaatttctccaatcgatgtaaattgtcggcaaggagttctcggatcttgagaatagattagaataaattacggtgatcagaaaggtgcaaaccaacatatagttaatttgaactattaacctctgcaaaatcgttgccaagggctccaaaatactcgtcaataaattcgcccgaccaagcatcgaatctccacgacaagcatcgcatcagacagttgatgaaattgagagatttcgtgacttgattgcgaaaggaatgcataagttataacaccaaacttgcaacattcttatgatacacttactctcgaaggcaaatccggccgaatagtctaaagacttggctttctgaatgacaaaatcaatcattggctgtacccgacgaggatctcgtttgaagaagttgaatctataacaggacggccattctgtcagatctgacatatcagactgcaaacaaaagataacgacttactcgaagaacatggtccagctgagtaaaagagaaaacaaaaagtcagtgatattagcaggattgaacgattcagatggtagactgttattcaccagctcaaagtatccggtttaatcttcataaagatgacaggtaaagcgctagtaaaagaacgatagacgagagtcagcaaacaacaagaacatgaatctaagaaagaatgtcaagaaaaagctcaacttaatacatactcagaaatccaatcccagaactgtcttctaggctgcgttggccaatgcttggaacctctgacgaaacccgagataacctccgccagagcacgttgatgatgtctatcggggacaggttcggcgaggattctatccaattcggtctggaccatggcaaacggctacaagggacagaaatagacgttagacatttcatcaatatagaaggccgtctaaatcacaacttactctatctatgtagatttgagataacgatttcagaaagttgatgctgtccccactcagatactttcggctatcctcttgtgaatatcgtgcaaccaactatcttgaaaccagttccttagctcatttccacagctgtaaaccaaaggatgatagcagactgaccttcgaccaccaggatgagtcctcgacgaaagaagatatggctgcaatggcctcagcagaagtaggatcccattggaaaggggattcagctccagcctgaacatagtaggtcaaaaccttgtcgaacgcaagccagccagacgtgggcttatcttgaagaagcgtcgtcgtgtcatctagagcgatcggcaccttgaattctgagagatatcgagagccaaattctttcgaaccagaatcaacgatcactgtccgcctgagaggattgacaggtttatcgataagaagttgttccggtgatgcttcgcagaaggtgcgaagttttatgaagtgcaagattttggtcatggacctgacaaaaacgaaacagatggaactggtttgagtcatcacgctttgatttgttctcaaaaattaaaggctttttaaacgcacaattgtgcataatgcctcaactgagggagatcatcgaccaagcaactcataaagaatgatgcaacgttgggattgattggccggtctcgtcggacaagagcacgaagataccgacaggcataggtttgatacctccaatgggtcgtcgggctgagaatcaaactggtcagatgaacgatctgatatccttgaatgtaagatattgcatacatacttttcagcaaactcaagcaaatctgacatcaacttgtcgagctgagcatctcgggtatcaatccgggcttgcaccagcttttgcaactccgagttgacgatagatccaagttgtgtgcctacactaagggcgtcaagaaccttgtctacttctggattaggcaatctacttcgaaggctcgatggttcggcagttcggacaatagtatcttcggtgattttggcgaccaagctttggatagatggctgcaaaggtaaaaagtctatgtcaagtgcgtttcaattttagatcgtgattacaaacgaaccttctcttgttcttgagtctgcatcacacggagaacgtattgaggaaaaatatcagggtcgaggataccaaatgatgctgtcacatacagattgaacaatcagattagattttggtacgttggtcggtcgttgatttgagtgagagatatttaccaaacgattttgagcctaaaggtgaccaaaggaaacaaccatgattagacgggtttgatcacatatcatagcacatcggtcgaaaatacggaacgaaccgatgatgtagagagcgcctttcatttgatcaggatctacacccttcaataatgagtttaacaaccgaggataggccaatgtcttggtgccgtcatatgccttattataaataaaatctcgataggtcagatttgaggtagtatcaagattgatgccaaagattacttacacgagcgacatgatccaaagctccctgagcgtgcttccgtacttgattgtgaatttataatatcctgacaggattagttgacgcaaaaatgagaagcgatctgctaagaaaatacttacggcgaacgtatggagacaaagcgaaatcaaccagtttcaagataagctcgtcatctctggcagatcttttccgagtccaaccacaggcccttgatctcgaagcatgatagagctcggctcgagcaacccagacccgccgaggcaacaatcgttgcttggagtggaatttgagagaagtttgttgcaaggccaaactcttcttcttaaattcccacatccgatcatcagagccacaagcgagcactgagatcataccgcaataagataacaaggcagcaagagatgagatgggcagactcacgagctcaaaagaacaagggaccaaacttactgtaggtagagatcatactgtacgagaaaatcaaagcggacaggtcaattctatccatgtcaaataatgaataaagaagtggcacttgacctacttgatagtggcaacgttcgcatcagtcgagtcatccccagcttgacttctcaagtaagtggtagctttcacgatgaattcaccgatctcatttcggaaagacgcaaatgctacatgcttgggatccgcaggatccgtcaagatgaaagcagctttcaaaggaggtaggttgactttaaattccttgggagcgatgctgtattatatgaaggagatgaatgtatcttcttagttaatcgaagttcgagatggagtatatccaagaacgacaagaacgatgagacgtaccccttgtcagttacttccatcccgccttgcttgctaaacggatcttcaaggtagtatgactgcagcccttctaaggcatgcctaaggaaggataaatctcgacagtacgtagctgaccagtccttagtaggaggtccagcagggatacccgagtccagagatcggacagtaggaacaagcaatttctggatcaacctctcggcaaactcgagttctccttgagagggaacatgccaatcgatcttgcattcactcgatttatagactttacctagatgtagaaattgacaaatagcaatcaataacagaacattcagcaacggcacatctctttaagtaaagactaaccccaataaagatgcgagttttgcttgaagtctgcgaagaaaaccaaagagagataagatgatgtctagctaacgtagagggtttaccaaaacacaccttcactctcccattcatccttgttgacaaaccgagagtcttcggtccaacaagttgtcatcctagaaagcaacctcatcaccatcctagctgtgatactccaggaccgctcgttcctagccgtcttggccgtgaactcaagaagctcagtgagcttatcttgatgtctcaagactgaagagtcagtgtagcttagcatcccgctcaacagagccatgtaggcatgaagagtgatatccccagatgaaggaagagaagccgatgttgtaggtgtcgaggacgctccgttctcgagttcaaatcggatcttcttagcgcacatagggaaaaatttgtcaaacgtgaggccaaaatcaactttggcaagggagctgacaagctgagcgacaacgttaactgtgttggctcgagctatgaattgttagatgataagagttagttcaaagtagatccatcaccctttaaaaccatggtgacttaccagtcgtgctcgcactatgaaaaagcccgagcatgagacaaatagatcatcagaatgtaatgtatgttccaactttcgatgtgaagaggagagaagaagaacatactagtcaaagatctgattcagagcttgagtgaaaagcggctgactcaaatgcgtaaataccacagagacactcttttggaccatctgattgactgtctcttctgatttcccaccggtttttaaactctttcctccttggtcaggcagattctcaaacaatgtgaggactctagctataaactccgtcaaccatccagacaacccagctgtcgaatatcgaagggcctgattttcttcgggaatgggtaatgcaggcggtctatccgaatccggatctacagcttctataggcagaggaatagagtttgaagtaatccaaggagcaggattcgcattctcagcaggctcatagtccgtaaggtcagacaaggagacaaattgaacaatgttggcgatgaaccacgtagttgatactgtcttcattgagtcgttaagatcgatacccgggagactaccatcgatcatgatacaggccccgcaaaacgatgtagatttgctgagcatacgaaaaaagacgaaaaaacaaggtttatcaaggaacgaggactacgcaccaaagctcaagaagaggcaccaggttctttcctccaagataatatagctctctagagactagaggctgagcacaagcagctaagcatgtcaacacagacggcgttcgatgggtctagtttgcataatagaggaatgttaggacaaaatgatcaaatttgctgaacaaatcaaatatgaggataaaactaacctcttctagtccagtcaaagacggataagctcgttctaacacggactgcaaaaccagatccggctccaacaatgacagatatctcaggcaggcatggctcaaagccatcgcggactcaaactgaatatcaaacgatgatcgaggtgaataatgccgggtgtcaatacaccttggaaagtttgatgagtgaaagagagtaattaccttagagaacatggaaagtagagcgacagttcggagcgataagcagaattcacgtttaatctctttggtaagtcttcgcgactacaagtcagtacaaaaaaggaggagaaactttagctctatgctgaggatattaggcgttcttttgtcagagagagaagggctcacaggaggagttttgcagctacgcttctcttcggccttccatctcttgacgaacacagccgatagagcccaaataaaagtagtaaggttgacgacagcacttccgccattctacagtttcgatcgtgaacgttgcgcaaagaagaaatcagtctcttgattactaagatttctctcgtctatgttagaaaaggaggcgaatgataaagtcctaccgatggatggaaaaagccctcagttgtgacaatgaactttgccagcgcatccatagccctacttcctcctatatacttcctctccgcaggccctccaggtaacctaccttctttgctagctcccccaagtaggttgctggcggccagtaacccaccagccttagtgagctttggggttgaaggagtagaatcgaatgataaaggtgtagctgagcctgattggggcagaacgggtgcatcgtgagacattgaattgacaatcaaatgagcgagagattctgatgacgtattggcgcaataaaaagagcagacagagttagtcgaaacgtgtatatacgacaaaaggacgtgtgattaaatagaaaaaatgagaagatacgtacggactctatcgcttggttttttgaacttctgcatagtttcgttgagcttcgaatcggtatactctcccgtcccatacttgagactctcttctcctccgataggaacacctggaaaagaattaagggaatcagtgatgattacatagccatgttgtcgccttctggacatgactcactcatggacttcaagcaaagagtcataatccctttccactcatcttcactaaaaatccccacatccttataaataccagtccattcgctctcattctcatcaatatccatcgaatggctacccttagtcgctccgttttctccaagtgcaacaatctccgtctcttcgccttcgagttcgtctgctcgaagcgcgagctcttcttcatcgccttcttcctcgtctgggttggttgtgtattggtatgtcggggagagaagcgcgggatccgagactgcgggattggagtgtagctcagaaagtcgagccaatagatcgagcatctggtcatcgaatgttgccgagttgaaagcttgggatagtttgaacactgcaaaaaatgaatagtgataagttctcttacatctccttgtacgataggaacatacaaataaaagcttactcataggcaaccacttttgtggatgcgtcataggcaagaaatggaccaagaaagcctgggttccgatgatagtctgaaggatttggacacaataacacttctaatgaattcatgcttccagaatagttcaagaaacgcgtgtctcacattgatgtcattcccatctaggccaggtaaaataacctctaacatagcgtcaacctcaccaggatggaagaatctctgacaactttcagtcaaagtcaacagcgctccagagatgttactggaaaaaaaggaagttgttgacaaaacagatcaatacaatttgattttcataatacaaaacagcgccaaaaaaaaacatgttttatcccaagaaactcacgtgataccagttttacgcccttttgggaacagctcgattttaagacgatcataaagaggcctccaagggagcacgacatctttacgtgagattctacttcgttttctatataacgtcgacgatatgtcaccacatcagtccgaattagagatggtttgcacgcgcataaaagggtttacatactctaccagagaaatgacaagtcctgagaaggcatcgactaaacgagcatccgtaccaggagccactgatgaaacaacgtatatcagtatgaatattgggttagcaatcgctatagaatgatattgcaggttcagaaacgaaggtaaaaggaaacccaccagcaagttcaaagtagagcttgaccaagttgactcggacttctctttttaaagggtacttgaagctaagccatcgaacaagctctttatgccatctagggaatgtgacatcccagtcttttgctcgaatggaatgcactagcttatcgatgatgatgttcaatcgatcatccatctcggtgagtgactcgaccggatatggtaacgatcgctggtaggttaacaacgcctctcgagggtccagaggagtggtggatgacatgactggaagatctgtagtgctaactgatttggactaagatcataaaggaacagctgacggattgttagtaggcaagattggagattttcaagagaccactcaccggatagtcctcgtcttcgtcttgatcgaaagcgtccgggttttcttcgtcactggagtcgaaatccttgtactcgtcttcgtccattcaatattgagaaaaataaaacaaagatagaaaatcaaaggaaaatatctgaaggatttgagttatgtgctgatcgaggggtgtgtgagagtcaagaaacgaaaccactcctagaaagatgactgtcgatgagatgagttgttcgaaagtgtcgagtggttgagcggtcaaagctcaatttgtcttgctggagatctcctgattatgacacacttttaaccctaaccagctcttgacatttcaagctcgacacctatctccaagcatcttgaacaatggcatttcaggactcaaagtcctcgtcagactatacctatcataggtaaattgctgaggcccaatgacgcaaacagcgcaaaccatcactaaacgctagatacggagatgaccatcgctctctcatagaagttctcaatcacaaaagatatggttcaccaaggtatgagacataccattcatcttctattgaaatttttatcacaatgttcttcacggacttttcaacttttaattgatctcaagttccccggaatttaaatgttatcttgctcccagctgtggtttcgttgatctcttgacatccggctgtgattgaatagatagtaggggagctgtgcttttggtggtgtcacgtgatttgatgcacgctccctttaaccatctataactacattacttctagcttctgtctcggccgtcctcaagagacgaacatccaccaagacattcatctcgatctctggaacactttctataccatgagcaataccatcatcctgtatgtaatttctacactgtaatcatcatgtctgatgcaagaatagaggcgtgtcttcaagtgatctattttactcacgcggagtttctgcagctaccctctttccaacttttcattcaggtacgtgattcccttccttcgagcaaggcgcatgttaatatttcatctgatattaatctgtgcttgctcgcgctatatctagctcaaaagaagctcaaccggaagaggatgcctcggtatcggcacgtcttcagcgactacaaaataattatgaagagtttggtatgagaaggaccatggaaggagtgttactcgtgcatgtgcgtattctcttgatttctcttctcgtcctgagcgatgtttgttccaaatatctttgtacaacaacataccagtaatagctgcccgttatctaactcaaattctgcatacatgctgatattcaatctaggatcacgggcatcctcatattctcatgcttcaaatcgctaatgcattcttcaaactgtttgtgactgattcggtgttcctgaatgaatgcgcaaatctatcggcttgtccacttatccctcctattctataaaattcgtaatcaacatggggaaaacagaccaggagactacctacagccgggtgaagacgaaactgaaggtcttaaggcaagattagacaagatgctgtcacctgactcgagcacacagttcgacacaggggtaagctcttgccttgatacctttcataaacataacttagctgaccaccagaaggctcatgatttatctataacagatcaaccaagactgggaggtagtggataccttggcaaattggtatagaccatcttttgaaacattcatggtaagtacatggataagatcatcatatctgcattcttctgtctcacaccagctgatcccgtcctccaataattttctcattcttttcattgtaaaaatgacgagagtagtatcctttcgtccccgcacacgtaacaaagccaaaagagtgcaaaaagcttgttttggtccagatgccagaaagaagtatgtccactgcaaaaacattccaagcttgtcaaaatgacatgcatatagtcaaacattcatgtatgatctctctttttttcttcctcctgaataagaactgttatcggtgccgaagaacatgaagctgttggcagttcctttgttcgagctgtatgacaatagcgcgaggtgcgaaccaacctatcatacatctgtatgatttcagattattaatctgttcgtttggtatccccagatatggaccacagctgtcagctattcctcatcttttgtctcggtgagttggttggatttgttcttctgtgcgttctaatcaatacaccaagtttcgatcactgaatttctctcgccacaggtacaatttcgtttatatgggacaagacgaataagcttcctcagatgattcctctcttatttttggcaacggttgtcatttcatctgcttttgatacgtatatattccggatatgacgcactttctatacacctccttttcttcttccttaagtaatgtgtaaccatatcttctccttctagccatcttacgaagtcatggagtctgtgtagcaatgtttgatttcagagcaaagtgattacctcaggttaaggtacggaaatatcaatgtatccttgacccacgcacaactttccgactaaggcgcatatattcaacaaaaagcttttctttccgttcttctggtttctaattatcagccgccgccctaagcgaagccaagattccctcttcttgctccaggctaaggacacccgatcgaccagccacagagtcatcctccaaaactagatcgtaagcgtccgctacgagaagaggatgtatcggaatattattcctaccgagaaggataacgatgttggagacgagcgatattgattgtaatgtcgccggtgggatgatctgtttgttgtgccagatttgatgaagaatagcgaaatcaagacaaacgaatgaacatcatcagtgatgactagccaagagagaaggaaggaaggatactgtcaaacatacatcatttttggaactgtatacaccttctgcatcaaatccactaccagacattcctccttccccatcgtcctccggtatcggtgcgtgcatagaaatccaaatatatccgttcaagccaagaatcagatcaactccacaaggaagtgtttgaaagtgagatttcaatcggggaaccagcgcaggtgggagggtgatcaacgttccgtttttgagctgtgatttattgcatacgtgttcaagatggtgttaatggcgacggcgcgtgagacaatatgcaaagacgcttagagtatatgtctaacttttccatatcgtaaggaccgagtgtgtagagacattgttccgtcacccatcagcgtttgaacctctgccactagtaactatatatgttgcggttaaaaaagaaaaaaaaagacaggaacaagttcagtaaacgtggttcgttggttaatctgtactctacgattacgttataagtgttgagcttacatctccttcttcaaaaaatctatgagaaacgccgtagataactcggtcagtatgttatttaggagcaaattcaagctgcaatcgatcgatcagaacttacaaacgcatttgaagttcgtccgactcgagtttccttcgctttaacaaatcggtttcagcatgttactcgatcaaattctcctgccagcgcatggtaaaacagataaagaaagagagtacaaaatatgttgaatgtgttgacgctcacctgaacaccgcctggcaaattgaccgagcttaacatcagtacagcatcctgtcgggaacctgtgtcgaccttccaccgtttagcagcaacctatttgcatgtcatgacgatcaagcgtagccgaggctcaataagattaagcgaatgtcccaccgctttgggacctttacgacaaaggacggtattggaaaaacgaacctctgtgattctcccaaccactaaatcaccgacttcagggatgaacctcgctcgaagcggtcgcacgctgaccagtttgttgactctctcaactttacccgtgacagaagaaacaaccttatcgcccgagacatacgttccatgaccactatacgtgttgcagcccaatgattcggcccgttcatccaaaattcgataggtatagagaagtaagttctcaaaatcttctcaagtaggtaccatcgatgccccggtaccaactgaatcgaggaaagaacaatggctgaagccacgagaagaacaaaacgaaccgcataaaaagtgacgagctagtgatggtcgatccaggagtagtgaaattactcgaaccctcctcaaggtcgagcccttcgtcctcatcgtcactcatagtaacgtccgggtggtgtcgaagggaagtcttcgtgcttgggtcatgatacgtcggtgcggcaggaacgattcgaaacatgatgtagtattatatgtatttgtgtgttcttgtgtactgtagggctaccctcagtcctttaatatatgaggaaagagaaggtaaagagaagaagacagatccaggtcaacggtcggtctttgaggtttggacgatttggacgatgtagttagtgtgggctgtaaagtattagatgatttgactcgaattttcaaatattatctcatcgtcagccaccattgacaacacattcctaattacgctcgtactcacgaccatatccacaatgaacacgcccatagctcctcccgcctctgatgtctcaacaaagacaggaactgtgaagattttgagtcctgcattgaaggagaccgagagtgttacttcttcgacgccagttgtacccaaaaagaaattaacaagagcacgtacattctcaatatgactactcctccgttcattcaggaatatacgacttatcgtgtgatggtcattgtttcatgtttaaatgcgatacaggaagagcaggagaaaattaagaaagaagaagccttggccaggttcgttgcattacttcagttatatcatatcctctgacctgtttaactgactgtcctggaccttatcttgtcgacgcatagaaagaaagctctggacgaccgactagttcgtatatcaccttcgtatcgagctgtccgtttacgtacgatggaaaaaaatgttctgatgcacctaccatcacaacttaatcacccttaattctgatgtagaaaaaccgatcaaagcgacggccggctccaacggatggtgattcatctgagcttccgaaacctgccaagaaagccaaagaactgagtacgccatccttcttatttgactttctcttcttcactattggtaaacctagcgcgaccaagctttcgtccttgttcgtattaatgcaactactgatcaccacgagtgatcttaactccgccttagccgcatatgagaaagaggttttggagatctccaaacgatctggtctttcagattcaggggccgggatgagatcccttgtgaagtgaacacagaaccactgtcgatcagttatgcgctctggtccttttctcgcgggcgtacgtctctgtttcattgatacttatcagccttgacagtttatgggaggaaccgtttcttaaacgtgtaaacgaatgccttcagacatggtgagagttacctcaaccgatggtggtcgatacatggcccttttggacttgggtgccctcagaccatgaaccaccaagatccccatgggtcatgggtttagtttttgccagcctcagtgccagcctcagcagtctcaacatcactagcgacagcgtcaaagcccggcattcttgctcccttgttcttttcctggtgaagggcaaggtgcaacatgttgcgtgacgcattgacatctctgttccaccaagtctgagagagagaacaccgtgaacaagcatagagaacaatcagtcatcgagacactatcataagatatataacagacacacggcacttactcgacagacgctccgacactctttcagcgcccacgctttgtgtcttccagagaactcgccatggcacttgaagcacgccctcgacgtccgatactctcacactttgcggacctggagcagcggagagaccctcagcttggcatgcagcgtcttcacaggactaggtgcatgcccatgagaagacgacgagaaggcgccgtcgccgaaggccaggaaggtgcgtggacgtcctgccgacagacggagtgccaccttgtgttacgcttgctcgcggctgatgtgtgcgccccagcgaagacgtctccaccttcgagcggcgaagaacgtcgcgagcga

SEQ ID NO: 1552 - DNA, 338 bp, Xanthophyllomyces dendrorhous
gaacgtcgcgagcgaagagtaggactgaaagtgcgagacgagagcagcgcggagaccatcgagactggcagatctgaacgaaggaagatatgaagaaagacaccgaagaaagaagccgaagcacgacaccgaggtgggcaaggcagtttgcaaggtcagtaaggctgtctatacagtcagcttgaacgtgagtgtgaacgtaagcggtactcaccacggagagtggtttacactttcggatggttcttcatccacagccgctgtttccgagcgtctcggtccacccctgcaaggtgcttccatgacttgagagagagcgaccactgcgtgccgtgctc

SEQ ID NO: 1553 - DNA, 16146 bp, Xanthophyllomyces dendrorhous
cctgggtccagccccacgacttcgtcctctggccgcacatcccacgggacatactctgctcggtgatggtccttgccttcgccctcccatctccatccgtagtcgtcgatgccagatgaagacgatatgggtctcagcattccggcagacactccgatgccgtccgtactgagcgaccgggcgaactgtcgccgatcggtctcgaccttggatatatggaatgaccgcctctaccaagtgtcagagtcatcccggaagaactcctaaatcaccctgcggatataccccacatccgcgtcctccaatttgagctgggcccagagatcatagagagccatggtgtctacaaagacaaaggacgaccggtggtacgagggcggcaggagcgagaacaggcggaggccatgcccccggcgacgagtagtccgtcttgcagccgcatcttaggggccatgttcctcgaagatggtcagtatccggtacagagggcggagataggaccaccacgaggccttgatggccttgcctgtcagaggcaaacctccgaagatgtcatctgtgaggaagtcgaacaacactcggagatgagcctccatcaccgtgcgctggtcaggaaggaggagtttgagtagccagggtggggccaccaggatgcggcagcttgtagtggctcctcctctgtattatcttctctttcttctccctcttctcctcctcgaggagggggaggggacagttgctcccagagttgatgggagagggcagtgcgctgaggacggatagataggtcagataggtcggctaggtcagtcattgctgcagcctttcttcagatatctcctcagatgacttatcttccttacctgactaatactgatccggctctggatcacttcttcgacgtttgtctccagccaccaagagacgagccgggaagcccgatggggcatgttcaggacgacatggttctggcaagccgtggtccacgactgagctttggtgtcgatcattttgcccatgtatctatgacaacaacaaatcagtcagtccctgttcacagccagctgcatcactgtcatcaccaaatagatcactcactttgagtctgtggactagtgctcagcagggaaagaggcgtcccggatgtggttgatcccttcgttcagtgttggcgctccttagtgcagatttcctccgcgcgtgttgaaaccaacagcctggagatagagccgtattgtattggggagatttggtatctcccctccatacgcgcagacctttgacatgtggatactgagaaggtgagacgcgtcgaatgttatctttcctagccgggcaacggccgactcgatcgggccagccagtggcccaaaggcgagtaaagagccaaaacctattttcaccgtccgtgacaccatagggaccgctgacttggcgcggatttccaccctctgacgagggatgtaaaatgggcagaggtgatcagatcgccttgagtgcccaacttgactgcaggctgagcatgtggcagtagtagtattggcagcagtagcggtattggcagcagtagcagtagtgttagctgcgaggcgagactttgcccaggcctgagccgtcctcctgcgcttcatgtcgaacacaagaggagcggcactcctcaaggcaactgatgagtgttctgatatgagaaagtgttctaatatgaagggatgttctgatttgaaagagtgctctgatcgtctcgagttcgtggtgtcttataagctattgggattgatgtctgcttgtttgcaggaaatctcctttgaccggttcgactggctgccggtcatgatgaacgacctggtgaatgctttaccgtccacagacaaagataaagataaagacaaagacatgaatagacaaagagatagagagataaaggaatcgcgagacatagagtctctctactgtgtctgtgaacttgaagactccctctctcgtggcggctgaaaatgcttgagagtgataaaacagcaaattggagttggcaggattcgaacatgcgctccctgaactacgtagagccgctcttcccactgagctacaactcagatgttaatgtgaaggatgctcacatccaacacggcccctcaagcttcacgttgacttagtgttgctacttttgggctccagccacattacctaatcacctgtaacccagcgggcatttttacacaggctgatcgtggtctggagtgtctttgcgcttatccgggctcataacctgataaaatagggagctcttggtgttggattctatggtcacttagacaacaattgattctatccagttcttctgaatgtagaccctcgcaactaattctcccaagcaaattctctggtcctgaatctctgaatcagaattagtttttgagagaaccagaatcagattcagagattcaggaccagagaatttgcttgggagaattagttgcgagggtctacattcagaagaactggatagaatcaattgttgtctaagtgaccatagaatccaacaccaagagctccctattttatcagagagaacgtcatcagggcgagatgtcgatcgcttgtgtgcctgctcgagttctgccctgaactcaactggctgtgcctgcgaaattccctttgtcggctgaacacctgtcgaccgctgttcctgtttctttcctgtcaacgctcgttcctgtcgatgctcatcttctgctcctggctcatctgtgcgctcgaaagctctcccatatgagatcgtccttcgtgccatgttacctttcctttgtcttcatctcatctataaatatctcagctactgagacaaacactattgagcaaaattcatagacttgaagaaactcatctcaaaccctcaactgctggtcgatgttgtacacaatgttccgaatcaccctgcatacaagaaagaatcatacaaattaatgatgagcattaatgaacaattcgaacgtgcgaaaaagatttgtttcaatagggatactgacgccaggacgaggattctagataacgagatttggtacatgaagggagaataggttatgacatcatctcatcggctccatgatcatcaagagctcaaataaaacattcacttaccccccaccaataccattggacacccttgaaagtagctgtgaacagcccatacacggcgagcgcattcaacgatgtagcagcatctagagctgccgataatgttaaagtgtatttctccgaccacctagggctacagaaaagcgcaagtgtataccacaaatgaagacaagttcttggatttgtccgtcaacttgtaagcggataatataaaaagagagacgaactgatgtcgagcaattcgaacatgaaataaccatgataccattgctcctgtcaggataatattcgccggcctaagattcccaccaaattcgaaggtaattagtcaatgtcatcatcagagctatcaggttgatcgggagagttgagtaaggcaatgcaactcacaattgaggcaacaaagttgcacctgagcaaatgattgggaaaacaattttatcgaatcctctgcttggatatttcttgtgtaggtaatacatcaacactggaaccgctactccgatgggaaagcctaggtacagcacccaatatttccccgaaaaaaatctatcggaatttaatcaaaagtcacagcgagatgccttgttagaatagtaaaacttaatcgcaaagaggaagccaacgtgagagtgcagagtagacctaccttctaggagcaacaagaccccaaataattgaagcagaataaaacacagccgcttgccgtccactccattggcccgtggcttgtttagattatcattaatgggacgtgaacatcagagatcgtcaaagtgactcaagtgtttcttttttacttacgatcgacatcggttccatccaagaacggtcgtttggcatcaatgacatgaaccaacgtgacactagataaatgacgaggttgggattcttaagaaattgtgttatatcgcatgtagggagaggcattcaaaataacatacgtactagttcaccaaggcaccaatgacctgagacataacaatgttccaaaaacacaacgctttaaacctgatgaaagagtatagattcttcataacagaaaattttacacacagtccctagtactcttcaagacataaaatagggccaaataaatccagaagttctcgatatctcgcagagaaagatatgatcacgtagcaaagaacttactgagttttgaacatatcccggtaagatacctttaagtacaatgcgatcctgacaccgaagaatcaatgagaccaagtgcggacatcctagaagctacggacaaaagaaacgcacttgaggtcacttgtcaaatttaaggcttgcgacatagccatataaccgaagcatttactatacaacaatgcaaaaactgggttaggatatatacctattggtatgttcaaacgactgataaaccggaactaacaaaaagacattccctaagaattatcaagatttgagaatgttaattgagcaagtccagcaagttgtgattatgagtgcggaagcaatatgacaaagaagaatgatagaccaaccaacgggctttccaggctgaagcagcccatgacagaattcagtaagcacattcagaccgatggtttggccgctgacagcagagacaattccgattggaactacgaaaatctacgagactcgtgtaacctcttcagaaaaaactatgttccatgtaggattattctagaggagtcgcaactaaccacagcaatcccgagagcaagtaaaagtaaccaaagcggagtctgataacacatatattggtgtgggttagccttgccgttagagtctaaagacggatttagggaaatcactgatacctggaagacagggtaagtgagaaccaaggtagcggatgctataaagttcaccacaatcatggcgatataccagctttgtgggactgaaggatatgcacgcactactccgggcaattatatttgttatgattacagataacagattatgataagaatcatttaggttgtctagattgaagctgaccagtgaaagagcggtatttgcttactgagtcgattatgaatgtcatctctgcctgcaccacttggagatcctcgtttactccaagcgtctgctatttcatgtccgtagaacagatagacatgggtaaggatgctcgaaagcgacgcaaaagaaaatgcataagacagcgcaaagtatggggtgagtaacagcggctgagaagtttcccagacagtggtattgagttctaaggagggggtcaggagtgaggtgacgttgaatctgaaggtaacggtggaggaatataaaacacatgaagccgatcagacgtcgatttgatgctcaagacttattctaacagaaaaaggatatggctctgaccttgtgaaactggatgtgaataacccggctgagaccggagaggagaaattttgagcgtccctggcagtcgttaaattgcaaggctgatctctcgtcagatttgatccattactgatgaaaagatacatagttccttaccaaaaattagtgaaccacatgattggaacaattatccaggccatccccatcagccccccgaagtaattgagaaggctgaaccaaggggtgtacagtggcgaagtagctcctatcgacgaccaatctagcgaaaaatctacagcaacaatacatgtcaaatacgaatgatttaggccgaaagcgcacgtcagcagcaactaaccaagaaggccaattccctcatagcccgacccaagcattcggaggacccgtgtcgttgggttggacaacaaacacagcatgggaagcgaattgagagtaggaaaaaggaaggcagggaggaactgatgacaaaaccaccaactattaggccgccgctgtatctaaaacaataattgcgagagaacaaccgttacctgatacatgaatgtacaacctaagacgaccatgaaaaagttcagtcgggaggttgtcaagttggattttgagtgaagggtgtgatacagagacacgagcacgagggaatttggccaataacatgatggggctagccgaacagaaggtatgatatataccgttagctaacgaaccgactgatgaagtatgtgttgaggaatactaaattgctcgacagccagcgtaacaagctcgaagatagaactgaaatcgcatgtcttacgttccacgagaatcttcatgagtaaaccgctgaggccaaatccaatgagttgggtcgtcaacagcagagtggtgccagcgacagctccaacttccgttttatagtaaagagacaagatggccaagatgtcagaagcgtacgcagcggaacctcccgatgctgctaatacgccaactgagaagagatgatagcttatcgtgattaatctgataaccctgatgattgtgaaaaggagaaacttgatacagacttagaagatgttcctttatgttgaaagggccagggttgagggaaaagcccataagctttttccgagggaggtaggcggccatgaattttcctagaggatgactggcttgtgcgataagcgcataaatgaacgcgacgtcagattaagccaatacgcataggttagaacgcaaatgtacctaagatcacgaagtatgaagagaaagaaggtggattgcttttgaaatctgttgtcgttcgaggtatgaattgtgtgagattacttgcctctctcagatctgtacactaaaccgagaaaatgtttcttacagaacaactgggatgaagcggctcctagaatacagaacaccgacccaagaataaggactctgattgtcaacgcaggcaacgaaggatcgtccgtcgaaggcacgacctgaagaggatttagtgaacatcagaaaggggcagagaagattagtcgagacgatatgtagaatatgagtcagatgtgggaaatactcactttgctaatgagatcttctatgctttcgtctacattttttgtttcgtatgaacgctcctctgtaggacgtgattcctcatctcctccagaatcgtccaacggaagcattctgatcgattctccaacattgtcgacatcatcatcgtcgacttcttcttttccctcctggtccgttgaacgtagctcatctagacttggacaagatcgcacacgttcgtacattgtatgatagccggtctatccctaggttgcatctgttgcgattgatgaaatcaactgagatggaatggattgaatatgatgtgtggctgaaacagcacgtgtcacagctgtatgtcagtgtctgtcagggatgtaacctgagttacactcttgtcaaagatacgggttaagtatcatgtgtccccaagggtgggttacccttacaggctgttctttacatcaacctccgatgctttttgtctgtttaacagcatgcgctagtttctaaggttcatgcttcattctcttgaattctcgtgatctcgagcctctctaggttcgtcatatgtatatctttagtggcagaccaaatgcgcgaggggtcctgatatataacgaggacactatcgcgccttcttggataagagtttttctcaagctgagattcttgtcgaaatctcttatcccaagtacattgttaatagtctggtctgtttcagtcatcctaatcgccacagagtctaagtgccatctcgtgaaccaagcgattacacttggttacattctcaaacaccgagccttataccttacacgtatgcctgacatatccctgacaccttctctagatggtgacaccgcacgtactgggtcatcacgtgcctatcttgaaaaggggcacgcatgctgaaactcgtcacattcgtttcaatcctattctctgcctattcatcatatccttaacaacatcgctagaaattctgaacatatctgatggctcaacaacatgctgaaatcaatcaggccacattgaagcctagaccagtcgtcaaaccaaccaattcagtcacttttcaaactcagctagtcagggccaggatagacccaaccctccgttcgtaagaactttctgtctccccagctagacgtcacattaagcctaacacatacatcctatcataaccctgaatctatctctagctgtatctgacgttgttcgtcagctgtgtctttctttcggagtcaccgatcctccgtcctactgggaacttcgcgccaatgaaaacggcgagctccttacagatgaatccctctttcgtttcgttagggacaacatatctctcggtttgcttccctctacgctctctcaggttcaggcactcagggagacaattctatccgttgacactccttcaccagcattgaagcttgcactctttcagcttcaaaaacgtgtcaaagatccaaaattcgccgagacctttgtcgatcagggtgggctaaaggatattgtcagttcaataggtcaattggaggggaacaccttggcatatgctctgggcgcaatagagggtcttttggagttcacgtgcaaaaatgaacaggggaatcctgtggtagacagccaagtcatattgtgccacggttttgttcagatggtaggctcttgtatcaatctcttaacaagctgttcaaagctaacatctttgacgatcagatcacgggagttgtatcttcaagatcttctcccataaatatcactcgatcagcgacctctatccttcgatatcttgttcctataaactttcaagtagtttatagctctactcaatctcaccctctgcttatggatagagtagttgagaggctgaaaagcgaagaaggaggagaggtcttgcataggtaggtgaaatactccaatctgttttgatcatctactattgagtttcattcatataagcgctgcttactcttttgcacctcaagtttgctcctcatcaactccttgataagtatttcctcggaagggactaaaacatctgagattttgacagatctagataaacatgagatccaatcaataattgaagtaagtgctcgcccataacaggtactcaaataatttaaaactggctctgactacaagtatttttaatctttaaggatctaatgaaccgaccatgcggcgatgagatgagaaaagcgctactgggatatcgatgtacgccatgtagtcatcttacgaaccttggccaaacagctcatcatgacggattgtctttcattgcttgtgacctcagttaatatcgcctatgctatatcaaaatcaagccagtcctttgttgatacaacttacaatctctctcatcgactgttactccttcacatatgggactcgaccggcttaaccgatgtagagctcaaagtttggagtaaagacatcgttagaacaaagctcatatcggacgaggaagaactgaagtggtcagtcttaggactggacgtgtctcatagcgcaggtaggaacaaagtcatttggaagacaggaaagctaggtttggactatctggtacatcgatttgagctagtcatatcaatagaaaaaattcggagaagtacgttctctgacttgtctattgccatttcgtatatgacagcattggtttgctacaaacgatcgagcagcattcgcttcagtgggtacattggtcttcattctacctggccaatctcatatagtgtttgctaacagtattcggtcatatacagctcattcataagcaacttcgtgccaagccctcagagcgctgcccgattggccaagctaggtttgttctcctccaaactagcgcatctccactcttactaaactctgactagcttctcttatcgaaaaaagcaacgaaacacttgatcatctcctcgctcaattctccatccatgatatatcacccggtcaaaccatcacttcgttcgttcttcaattacgacatatctattctcttgcgctacaatttttccttcgaatgtgggaagaatcaaattcgatggtcgacgaaagagggggagaagatgattttcgacgggttagtgaggtcgtcaaattctggatcaaggagatcttcacggtaggcgcacagacaccgatgattcagagttcaggtcttcagagagcgaaaggaaaagactatagttgggtcgagaaaatgtttagagagtcagagtggagtgaattgagatcgaaaatgaggcaagttggtgaagaggagcgagaggtgttagacaatattgctatcaggtatttatcaatctcttcagattacgcccagtagtactttcaatgatacttcttggctaatttcatttcattttgatgatcgtcaacagagatttgacatcatcaagtcaatatcatcttctttttcattgttccgatgacacgctatgctcataaaatctcacttaacaccatcagttcttgagcagtgccagaatttcgtccaagagcagcgtatcaactgtctattgtaagtttccgcatttaagtatcatttgactgtgatttgtgtctaaaaaaccctctatctaatgtaaaatttcacgacatgtatatatacactcattgacaaatggccttcagggaaggagcgtggttcaagcacggagcactgaccggtccttacttccgagaacctactcgggatgttcccagaggatggacatttgtgcgcttggtacgatttctatatcttgatgtccctcctaccatgcatcggatatcatgctaacaaaagatatgatatggatgtgatacggcaggcaccgaacaagcatttcttagcttattgcgaaactcaacatcaattctcggctaagcccacgattgatgagctctccgaacgaagtacgtttcatttaataagaaaacgcttcttcgaaccggatggctgaacatgacaaacccatttggcttctctaaaacacagttgaccttaatcttgtccatgagatcgccactaagacggcatatccgatcatcagcgaaaccttcgatttggataacgggtcctcaaaaatagaaatttcgaagaggaccgtccctagcgatctcagtttctctttgcttgttggaaaaggaatctctgttttggagtctgtgtggttttcttcttacatgaacatggatggtctaatcaactgatgtctttcttcgtttctcctatacttcatttaacttctgtagcttggtggcgttgaaccgagctcagttttccgagtggacagatggcatcgggtaccttttgggacgttcccctccgactcagactcaggaaacgatggaattgatcaagcatctgactgaagtcgggctgaaggtttgttcaatatgttggatttttcttggcgtcctcaataacggatcaaaaattagattaaatgactgacggttcgaatctttccaaacgatgaaacactaagttgaggttgctggatatcacaggcgaagaggtcgaagtcccggatgaattgccaatcccagctcctccgagcaactacaacttcgttagtattggcataccggggatacctgaacgacctcatgacctaactaatacctgtcatttttgtagtactttgcggatccgatgtagctaatctgtcattctgttgaatctcgtaattgtatccatatcttatctatcactgttatcgctattatataccaagttattccgcatactaagtatctacccatacttagcttggttcttggccaatgctgaaaactatcatgaaaccttcctttgtttgcttgcttgctttggattgagttatgtccgagagaaagcttcaattgaggggcacatgggtattttgagaggggcgattgttgatcggttcgagggggtctaaagaacaggagaaacacttcagtactcaaacaaaggattgatacttcgttagacaaggcgtacatattattttctgaacaaaagtagaaggagagtcgtcttcatcgatgtcgtcgcggccgttcccattttgttgatctcgatagcccatatgacaaactccgcacgtggtttttagtgtttgtgaaaaaaagccgacgaatatcaatctgaacgcggacgcaaaatgagattatctcttccaatcgaagatcgtagtaagaacagctgccaaagcaatagcagccttagttaaacacattagatcgggaggatttgaggtcagtacaacgtgatgttcgtgcaaatgataccaagggaaaagggaggactcacgactgctaagcaacttcctgaaatctgctcggtgaaccatttacaaacgtcagtcattgatgtacatcgctcttctgatatacaaacaagcctgaagtgtacggacggcaaagagttctccatttgagaagggttcgaaagagcggttgcttccgtggttcgagagtcctgaagccatattgatgtaggtgatagtagcagtgatggtgacgataatagttataaatcgattaaggggcgcagtacatctgtccatttgagctcatctcacttcgtttcttctcgttcctctctctctctcctcttccatttaccatcacaatctttatctaggatgtctcaacagcaaacagttccttgtcaagtaagggtcgcctcttaccacggttgctcttgacatcacttgggacaaggcattgctaaatttaagactgatccatctcgttttagtataaaaccggaaagaccctcgggtcaggaacttatgctatcgtcaaggtgggtgcttatttgtcttcaagtttgccaaacggatagcattctctaatgataggcaactgttatctttggtcaaatgacgcatcggtcgtatccaggaagccgtccatatcgtcactggaaaggttgggcctctttctctcgagtagttctacaattgattgctgtggaatctccatcagttccaggacgtctaaagccgcaattctctttaccattggtcttgatcttgagaacaaacttgctgacacgtgaggtttatctaattcactcactgtatgtagtactacgcttgcaaggtatgtttatcatttacgctactcgtcaaatttggtcagatcgtccatgtataacgcctaacctcgctcaagtatcctttctcagatcatctcgaagaaggtctgtatcacaatcactttgcaatacattcttcaacagacttgaaaggtacttgcttatcttttgtattgcatattgtttttgttgaaataacagcttatggaaggtcgagagcatatggtgagttctttgatcgaaccgcaaatgactgttctcatgctaaagttctttcattgcacgcacaaggttcgcaatgaaatcgaggtcttgaagcgagtctcccaaggacaccccaacgtgcgtgacagattctttacagtactgcccatggagttcaaaggttgatagagagccggaaggccacgtatattgtatctttcactaatgaagattgtcggcctaatcgattatttcgagacccgaagcaatctctaccttgtattcgattgttagtaattcggttcgttgctatatatgtatagattgaggttggctaatctcggtggttcgacttctacatagtatgcaccggaggcgaactctttgatcgaatttgcgccaaaggaagctactacgaacggtcagttctctggtttcaatctgaccagaaaccaacatcatggtatcgaggctgatgccttctagtcaatttatttgacaaagtgatgctgcccatctagtttacgttgtgacgtctgccgtcaaatacctgcacaacgttgggattgtacaccgaggtatgtctgtcgaagtcctagcttctcgtatacaaagcgtgatgctcatgtgttgtgacccgcaatctcctctttccgcacccttagatctaaagcctgagaatctaatctttgctgacaaatcagaagagtcggatctgttgattgctgattttggtttgagtcgaataatgaaagaagagcaattcaatctgttgacgaccacgtgtggaacgccaggtgtggatccatttacattacgttggatttgattcattccaaaacatgttgcgcaatctggtggtactgatcttagtgtggatatggaattttgtcaggttatatggctccagaaatcttcaaaaagtccggacacggaaagcctgttgatgtaagttccgagtttgacacgctcttgcgattttgagaagatagtgaatttaactcattcactactctcttcaatgcggctcaagatatgggccatcggagtgatttcctagtaaggtttccctcaaaaagattgttaatttgtttcatcagcgctgactatcaacgttgtctgattatgacccgattcttcattagtttcttgtccgtccctgtcttgtcttaatgacgcgttcctagagagcatttataagcgatgtatcgttgagttgttgtattgttcctttttcaacaggttggccgggtatactccatttgatcgaaactcacagaccgaagagatgcaagctatcattcgagcagacttcagctttactccggccgaatagttagtctcatctacattctcttgccctttcgatggccgaaacctcagtctcaatactgtcctttgattgattctattcaacttaccatggtcatgatgaatagctggtccggtgtgtccgatgtggcgaaggacttcatcaaaaagtgtctgacagtcgatccggcacaacgactaacggccgaacaagctcttgagcatccttggttgagccaagaggctaagttgcacgtggccgatacatcggcggtcgatttattgccgagtacgttgtgcccatctgtgtctcggtaaagaggataaaagtgactaataaccatattttccgctgccgtccccttattcagatgtcaagagcaacatcaccatgaagcgaacgcgtgagctgattcggcatctttctctttaaaaactggacatatcgattgatcatcactcttgtttcggagttcatatcaactctagtcagaggtaccgtcaaagctatgatctttgcccagcgattgagcgctactcaggatcctgttgcacaagagatgcgaaccaggctcgattcgtacaaacgggaagccgaagaggtacgttgcttgatcactgtcctccgaagagaaatctcagctgatgtacatctcttcgcctctactctgatatacaggacgatcccagccaagtcctaaagcctcaatctgcttcggtctagttgactcttctttccgaataattcttttatttccctatatctcctcttgttttcggcaatgtttttttcatctgctttgtttcttcattccttgggtcgtctatcttttggtatatgatatgagagaacaaaaatttcaaaagaaatgttcaagtaacaggagctgaccctgaatataattggaatcagggcgtaaggaaagctctggcggacaaggccagaaaatgatcatctttctatgcgaccatcccgcatcccattcttgataatcagatcagccctctctcctccattataccttctcagcccccgagtagcaagcgtttgtattccaaggtcacatccaatcgtctacggtcaacgaagaaatatggcctccaatactgttttacccccagctgcagacgctcctccagctaccgttcctccctcgaagcaagagaccaacacggccgatcctaatactgccgtggatgttaaagttattaccgaaggagtaaagcaagcaaagattggaaaacagcagggagaaaagaaggctaagaaggagaaggctggcggatctggatccaaggaggttcgttcaagcttcatctcgactcttcctctctgtagatttttctctctctcttttcctctgggtacaacacgtcgtcgggatggcatgttccggctggctggctggctggctgtttcgagtcattctcggtggagattattgaagaactggcatgacaaatgtgtagagaaggttgtcgttctcaaatccgagtcatatgtctttctgcacactcttgacacactc

SEQ ID NO: 1554 - DNA, 53626 bp, Xanthophyllomyces dendrorhous
gcacactcttgacacactctgagctttcgttttgctgtaaagctgataatctaatttcaataattacgatagctcgaccctccaaacttcttcattggtccgcgaatggatttattcgagaaatggaagaagattcaggccgatcgaatcgcccgttcgtatttcgtttttgaacattacatcagactcgagaagttgtgttaagggttttctgatgatgttggaaatacgatcaaccgtaatgcaattgatgtacacagaggagcctcgagttcccataaccatcacccttcccgatggttccacccgccagggaacttcctgggagactactccattcgctattgcttccgacattgcgaaatctttgtctgagaaggttgtcgtcgccaaggttgacggtaacctttgggatcttacccggccgcttgagaaggattgcagccttcagcttatggactttgacgaccctaccggtgaagcgaaggctgttttctggcattctagcgctcacgtactgggagagacttgcgagaagcacctgccgggctgctgcctcggccacggacctcctatcgatgacggtttcttctacgatatgaaagtcgagaatgaccagtacgttggatttcagtttccatctattctctttcttaacaaaattgaatcagtgttatgcgcaagttaaatattaatactcgcaatacaccattaatctacatctcattcaggcctatcttgcctgctgactggcccgctttcgaaactacttttaagggtgccgttaaagagaagcaggctttcgaacgagtcgaaatgcctaaggaggccctcttggagatgttccacgtacgtttggttcttgtttcccatcaaatctcttgactgatacgaattgcatttggctatcattcaactatgtagtacaacaaatacaagtcccatttcatccaaactcaagttcctgatgggacctcttccactgtataccgatgtggtacgtcacgaaacatgcatatcaactctcttctctatttgagtctaacccttccctcttccgatttggaatttcgcttctttataggacctttgatcgatttctgtttgggacctcatattcctcacaccggtaagatcaaagccttctcggtcaccaaggcttcgtccgcctatttcttgggagatgccaagagcgattctctccagcgggtatacggaatcagtttcccggacagtaagcagatgactgagtacaagaaatggctcgaagaggctgagaagagaaaccacaagaagattggaaaggtatgtgcatttgtaattacaaagtcacaagaatgggttgctcacgaacaactcttggatggcgtctgccacccaccaggaccaggagttgttcaccttccatgaattaagtcccggaagcccgatcttccttcctcatggggttcgaatttacaacgctcttatggatctcattcgagaagagtaccgagaccgaaactaccaggagggtaagctcttatatagcagatatagagttttaagcgtctgtaatcaacagatatctagctaacctcgattcatcttcgacatacagttatctctcccaacatgttcaacgtcgatttatggaaacagtccggtcattacgccaattacaaggacgacatgttcctacttaacgtggacaaggaagagtttgctcttaagccgatgaactgccctggtcactgtctcatttttgactctcgaaaccgatcacacaaggagcttcccctccggatggctgagttcggagttcttcacagaaacgagtccagtggaagtctttctggtttgactcgagttcgacgattcgttcaggatgatgctcatatcttttgcactcctgatcaggtatgttactcaactttcaagcattgttgtgaaacacattgtacaagacttttgcagttactgatctcttcagttgtcttttctcattgttcctccgtgttatataattgtagattgagtctgaaattgcaaaccttttcgagttcattcacaaattttacaaccagtttgacatgaagcttaaattccgactctccactcgaaacccgaataagtatatgggagaccttgatgtctgggagaaggctgaggacactctgcggcgacagcttgaaaagttccagcctggagcctgggagattgctccagaagatgccgccgtaagcgatcgtctctgattatgcatcatcatcgagattagggagaaactaattaaaatcggcgtttgccttttgttctcatttatgtagttctacggacccaagattgatattgcctgcgctgacgctctgagacgggaacaccaagtcgcgactattcagcttgatttccagttgcccgagaagttcaagctcaagtattctgccggtgccggtggagagacctctcaggaggcgagacctgtcatggtatgcttttttttcccgcaattatattctgtttgacagtcaaagacatccctttttctttaacgtattcttaacgcgatgaattctgtaataatcgacatttccagattcaccgagccgtgactggaagtttggagagattcattgctatcttgaccgagcatttggtcggcaagtggccgttctggctctcgccccgacagattatggttattcccgttggtgtgaagtacaacgattatgccaagcaggtctccaagcgactctggaaggagggattctactcggaggtcgatgagagtggagagaccttgaacaaaaagattcgaaatgccgaggtcgctcagtggaactttactttggtggtcggtgagaaggaggaggagagtctgtccgtcaacgtccgaaacagagatgacgtcggtcagaaacagcgatcggaggtggtcgttcctctagacgagttggtttccaagcttcgatctcttaagttcgataggcgaatggataaccgattagagtagaggagctataagctccctcatctatcaaggatggcgagaagaagcgaaaagaaggagaagtagaagtagaagtagaagtagaaagggaaggattgaaagggtacgcagagaggtactctggttttttcctcttcagtcgagatgtttgtcagaaatggatttatgtgcctttggagtcaaaactgagttgtttacgtcggaggaaagtccgatcgagggacgaacaccttgtcaagtacatggcgggagacacaagtattatattccataaacatatataaccaatccagtttacaatcaaaaatgttgagaacgtgttcatcaagaaccctagagagtacgctataaacctaatgagacccaatcgacctgaccttcatttgtcgttgtgtatcctaatccgtcgttgaaatgaatcgatccttcttgcggctgcggatgctgatgccgatgctgatgctgagagtgttggggatgggtatgagattgattgtgatagccttcgaccggtcccagatctgacattgagtatccctgtccatgtgtcaattctgtcatattcgcactattacctcgatgatagactttttcgtccacgttcggaaagaccggtttgttggaatgttgttggtcgataccatgacgagaggtgaacgaagacggcgttgcgaatggagggggcgtgtttgaagtaggaaaggtgttgtccagatgagtgacattcaagacttgtcgaaggtactgatccaagtcgaacgagtttggtaaagtatctggcgtgggagatacctcgggtggggctgatgctggcaacgattggttggacgaagcaatagaagatgatgaacgagacgacggatggatgggtgagtctttcgataacgagtagattgatcgagaatgactctcagacggcgaacatcgattatcggcatagatgtttgtcgaaggtcgcaagtgagctagcttatcaggcgcgtttgaagttgtctgctcagttggtgacgtaggagtgaaagttgagtggttgaggttcgtagtatcagattgagacgcgatcgaggccaggatcgcgttaaaatccgtggagtaactgggagggtctatggatatattccccgtgctggctgcgaacaccatagaaggtgttggctcatgttgctgctgagttgacggctgaactaggttgaagttatgccctgtatttcccaaagtagccgctatggctagctccaaatccaaattaaactcaaacccgcatagaacatccaacccagactcgtctttttgaacgctaccgctctggtcgatcaactcattgccggttgcagacgacatgaaatctgacttgctgctagtttcagattcacctttaaatccagtgggctgatgcatacctggaaacatcgccgggtgatacatcgatagtctatgcgagtgatcgagtgaggagtgatttgtgtgtaacgggttcgagatcgatgaggatggtgtcgagcttgacagtgccctcccagacgagttggtcacttcttcgctgagagataagggttgattctcatacgcgtcgattgtcttcaagttcttttttgagcaacaacccccactatcttctgtctccagtttaacctgagaagacggcaggatactcgaaggagttgttgcgcattgagtttcggaacaacgagacgactgtcctgtcgacgtaggaaccgagtgacctgcaagagatgaagtgaatgagggtcgcatagtagaagatgcgaagggcatgatagatgtttgatccgtcatagcactgcggctcgatgaatgatcgttgatctcgtctggttttataggcgatgagagtgtggcagtcgtttggtgggctagactattgctttcgggtttgaatgaagcctcgaggcctgatgctgtgccttcacagaggcacttctcgcactgtacaatgaagtcgcgaaagaggagatcagtccccgggtagaagtgtttataaatcgaatcgagatacgcacacaaccacaacagtccttcatacagctacattcccccggcggacattggcactgtccatcacagcattccgttaagggttttttctctgatgcaaatgcatcttcgctgaattgggtattattaggcgtcgagattgtgtcaacagatctgagcatgaactgagaattggacgggtttgatggaggtagcatcgcgacagaagcagaaaacagatctgcaactgtcgtcagatttgcaggaagtgcaacagacgaggaacaattgaaacatctgcagacatgaaccgacgagcatttggaaaagtcagaagattgaaggaatggacatgagtacgaagacaacaggttatagccaatccaggaagctagcttacgatgaacatgtctccggacaatccacgtgggattcattatccacgtcctccggatgattcccatgctccttacaacttgggcatttacaatccttgccgcaagtacacgtgctcaccatcaacacatctccgatcgcgtcttcatatatcgctgacagactaggcaagccttcgacctccggatttatgtcagaacctgatgtccgatctccaccggccattctgtgacaggaagattcgttgttctccttgccgagcaggagtgatacggacgaggtctcctttcgagcacggacatagtttcctacgagttctttcagaccccgtctaagaatctcctctggactcgccaccctagaggctgaggatattgattctgcagaattccgtacttgaagccgattcacagaatgggatgatgactgaggatagggcgtgtaatatgatgcccgtgatagataattcggaagcggtctattggctagctgaccagatgacgaatacctggaagaagacgaagatggcgtatggttggaagacgaggaagcaataggctcatgtgttgctaacggtgaggggaagtaatctgcaaacggagcaggtagggtcatcggtgtaagcggtaagttggagtatgtggagagagcaggtgaagacgatgtggatggtgtggatggaagattgggttcatgagatgttggaggcgaaaacacagaggaacaacatccactgcctgagcctgaactagagttgagtgtcgacccactagggttgatactagaactatcgtttctggccacatgcttctctgtgaaacaatgacattcaccgccgactgaggaaaaagaagaatggatgtaaacttcacgaacagcagccggcgatgagtatgaagaattgagatatacctcgacataaacactgtttggctattgctttcactagaaaagtgcatatgacgtattggacagataaatccacgagtcaacatgatggatgtgtcttgggaacacataaagacattacactgacttctagcttttccctttcccagagagttgggaatggtcgactcatcttcctccttcttcagtccgccaacagaagacaaattttggacatcctttagcccgtttggaagagcaggagctgttaaagtgacatctttcttcttcttctttgcctgtcctttacccttggcggaactgacaactgattttaagagccagaagagacactatcagctataagcatacgccggtgaatgtaaaagatgaacacactgctggtggaggatccctcggcgatctgtgaaggatccaatatcaacggaccacgagcctcgcacatgcactttacatggacctgtttcttctttcgaaggtctcgacagtggctgcactgtgtcggcggtcgacctttcttcttgatctcgaacagtggacgatcggtgtgggcgcatgaggacgaacggtgacctacgaagagaaggagaaaagggagaagagtgtttacagacatgatcaatcgactgcaatacacgtccacactagacataactcaggaaacgttccggccagatagacaaatgagacgtacctttgatgcaagcttgactatatgatacaaagcatgaccacagtcaagatttcgatcagttgaattgagttcctcgataagcttgttgttctagccaagagagcaatccagtcacatcgtagaattggaagcgtaccatgcatatttgatctgtgccgatcataccgaggagtcaaccgaatataagcttagataacaacgtttcactggtttcccgaacaaacaaaagtcgacaagaagcaagaagactcacgtcgtttatgagctgcgagtgtaccaacaagagggcaaacagatagagaacagtcactcaagaggcccaggacttcctatcacgaagaaaagacaggttggagacttaccaccatcttgaatgcgagacccggctgttgagggaatatcgactttgtctttcgagcaatattctccagaagtccgaggcgaagtgtccgatcgctaagaatggaatcaaaaagagggatatagaatgatagataaggtggatatcttgaatgggaaaactttcctagtcatgcagacgtgacaaggatggaggacggagcagacaatatggagaagtatcttaccaagagtggtattattgaggcttttttctaatcgggaagaattatatatgaaagaggtcgatctcgttgccgtcgttagaaaacaatttctaggacgaacaagactggatggcaatcttcaaacagaagagacatacgagtcgatgtctagctctttgttttcagctttctttcttgcttcgatagagatgtcatttgtcgatattgtcaatacgatcaggatgtctctttcatcctcatttgcttctaatctgactccactgtttccggcggatactctgagcggcggccaaactgaggcctttttgcgagcttcatacaccaccaacaccacaatctcagttccgaatacactcataaccacatatccgggtctcccttggcgcttcttatgacaacccacatgatgttcaactcaactcgactcaacacattgtcatcgatagacaagataataaacaaaatgaaaacaaggcagaggcagagcacgtgataaggcaagattaaagtaaaaaaaaacacatcaaagaagaaagaacaggagttccacgggataacaacatatcaaaggcaagatttcatgtgaaagaaattagtggcggcaccatcgacgcctcgacaaattggccgtctacgaggatccaaggagcggggccctttcctcatctccgagaacggccttgacacctccggatctccactgtgaacgatgcatgatgagcaggtatatggtcaaatataaatcccaaatctaagtatggctatgattgaagggagacacgtacggtagtgaaaagagccttgacagagaagaaggtggcgagaatggcaaagaccaaagcggaccagtggatgaatttgctagaagtttggtgctgaaacagagaaagaccgttgccgaattagtctctagtgacgaggagatcggatttgagacgaaaggcaaaaaaaaaacttgtttacctggaagatggcccaaagaacccaggagatggtgagggctcctccaagatcaccctctcgagagctgaaggctatttgatttcatagggttattatcgtcagatgttgaattgacggcgataccaaaacgattgataaatgtgacgaaccatatccgacagcagaggtctcgaggaaaaacctgttgtaggaacggaagggcaggagttgaacatgaaaccaacaaatcttgtatttgaggacagtgatgtgtttgaaatatatataaaatgtgcttacaaggcaaggaagacaaagaccttggttccaacgcctgcatgatggtgagcctctcgtccaaaagcctggaaaccagagaggacgacaagaacgagagcccaagcatggtacaaagaatagggaaggtgaacgaaaagctcgtcatagacattaccacctcggtggttgacccggacggtgtagtagatggatgagacagtggcagaaacgcttttcgtcgaagcagaaagacatgagctcacaacttttggagagaatatcacatgaactggactcacagaatcgagaagatgaaagcggtgatataccatcctcgaactccgaagaaactgtacagcgaggtcaatgcgccaagcaaggcaaatcggattccgatgttgtcgatgatgacctcctttccggcatcagctgaatgaatgaccgacaatgacgttgatcagtatatgctgccttaacttgaccaaacgggtttctatgaatcatggtgatactcactccactggtagatgatgtatccgagcaacaagaggtggatcagggacctgtgatgtaagtatatgccaatcaaagggaaaagagaaggagactgtcagaagagatggctttttttttttaattaaaagaagaaaaagaggagaaggcaagagatattgtccagaatacaatatcccttccaaaatgagcttaccagatgtagaaagcgtaagcagcaggcgtgatgaaagtctcctttcctggctctcccgagaaagtgtagacattcgcaccgagattgacaatgtagacgagggtgttcaacacctatcatggacaggaacacatgcacggggcagaaaaagaaacagtaatgtggaatagatttcgatcagacgggatagaggctttcaatccaatgaacagaacagaaactaccttgaggagaagaccgtcagaaagagccatgttgagtaggtaggctgatgtgaggaggcgagataatggtggttgagagatgaatgtgcaatagaaagaggacgaagaagtagggcctatcaaatccccatggcgtatgaatttagtttgcccccgtcattgggacattgtcagccatagcatcagtctcagtgtcagcctgagcctcggtgacagtgacatcatcagcggcagtcatgtcgaacactaacattctcgccccctcattctcttctaggtgtagggctggacggactatgtagcgcgacgcaatacaatccctgttccgccaagtgtaagaacaaggagagagagcggagaagatgatcagtactcggcacgcctcgctgggacgctgtcatgagaaatgcaacaggcattcagcataggcgaatcccccggcatacgtttcaacactctttgatcgcccacgttctgctcctgctcgagaactcgccatggcacttggaacacactttcgacgtctagagctcacagatcttgcgaacccggagcaacgagaacgctttcagcttaaaagatagcgtctccacagggcctgaggtatgcacgcgaaaagatgagaaggaggcgccgttcccgaatgcccggaaggtacctggacgtcctttcaacagacgaaatgccagcttgtggtatccctgctcgctcatgatgtgtgcacatcagcggagacgtctccactctcgggcggcgtaaaatgtcgagatccaaggctaggaatgagaatgtgaggcgagagtagcgcggagataaacgagataggcaattccaaacgaaagaagatctgttggaagaaaccagagagaggcaatggggtaagagaggcaatctacagtgtcagtctggcagttttcacagtcagcgtgagtctgagagtgagagatacttatcacggagatctgttgacacttttacgatgtttttttatccacagctgctgtttccgagcgtctctgtttatcctcgcgaggtgcctctatggcttgaaagaaaatgactactgcgtgccatgttcaaccagaccgctagtgttcagagacatgtcgagccctcccgcggtcatcgagagaagcttccgacaacccgggtgagcagaactcctgaaagcaaaggcaactggtgagtttttcaatgcggaaacttgtcctcatcaccccgacttcattttatccttttaccagctgtcgggattgatgcctgcttctttgcagaaaatcttcttggtcggttcggctgttgaaggtcatgatgagtgacctgatcaagactctacaactcatgtacaaagcaatgaacaggcaaagagaagaggagataaaggaataaagatgattttctcaatatagacacgtgcagctgatctctgcaggcttcgtatggacctcaatatcaggtacacaacatgatctttcgcatgtatatgatagtaaggctcaagcttgatgagaacagaagataagaaattaaagagcggatgaagcaacagcttgtgggtagtgatacaagcgcaagaacacgggttactcaacctgcatccacgacgattagtgctatcgcagaatgatgtatatgttaaatacatcaaatcgctccctcgtccccagcaaaccgaacgtccgcattctcttctagccagatcatccagtctttcaagtacgagcttccgttgctgactgttcccgaatctcctatgactacaaattgccgttttgccctggtcatcgacacgttgatccgtcgttcgtctgacagaaaaccgacctctctctaaagatgcgtcacagagccgatcagcccatttgatgacgcgcgtgttcttccttatcacgcaaagaactataaagcttaccttttcgttactccgaacaagacttaagattacaacctctcgctcttgtccctgcagcgagtccactgtgccaatcaacaaatttggatattctgttttgagaagactcgaaagaagggaaacctgagcctgataagctgctagtatgccaatatcctcaggcccaacaccaagtgtgatctggttactcaacagaggagagatttcaaattatgtgatgcaaatgaattcatcatcaaagactgttctatagactgaccaaaagtgaagtctcatacgcacaagtctcctgacgtagcgctgcacgagatcggcctcattctcattcaacttgcttccttctccgtccgaggactttccattccctgatccatcatctcgttcatagaactcacatccgttgctatcaaagaacacaacaggatgatccaaaaattcgacgtcgtcctctgataggtctggtaagtttggaagcgaagagagcgttcgattggaaacagattgatgcgaaaccaaaagagatgaatatagtgctttagatgcatattcagcgatacgatgattcattctgatatgccgaaaagtgaaacatcagtccacagtttgaagtcttgaggaatatccgaaacgggacgaacctgtattgaacagtcaatatcttcttaattcctggtccataaagattttccagcctcataaacaacgttgttgccaatgagcgcaaaggtttcaactcagtctcctggatctcagttgcagttgattcagtcaagtttttgacgagctcctgatctggatgaatctcaagttcgtctatctcctcttccttgtcatcattcaaagacgttccatgcagatcaagtttggccgctttaccctctagtgtgatttggttgccctctttgctcagatcggtcctggtcttctttttgggtgcttggtcggtctgcttcacaatctttcgatgagttgtttctgagagtacagtcggtcccaactgacaggggtctcctgccagaatcaacttctttgcttttagaatagggattagacaaacagcctctagcgcttgtgttgcctacaacaaatgagtgtattgatcagagatcgttcgctgaagatcgaacaaatcaagggatgaaacctaacaaacctcgtcgatgatgactacatcaaagtcttgaccgaacagctgcctcgatccggctgtatgacaagtggcaagcacaatctagaaaacgagcatgagatcgaacggcatgcatcaggtgctgctgtacgatggatgcagaacaatgtagacgacaattgagcccacctctgttgtagaaagcacgttccgaacgacacctgcttctcttttccggaatctgccatcatgtgtttatgtcagtcaaccttcagatttggcagacatgtgctgcatcagactgactcttttcgcagctctctgacatcgctatacatcgcgaatctctcctttccttttacgcttcctttttcttttcgacccttagagagtctgtctagatgaccatctagttccttcttgacatccttgaccacttcgccgctagatgaatgagcggtctgatagtccagcgtagtgggcaacaaaatagggaggatacgagcagggtgtccaattcgggttatggattggggcggaaagagcggtgacaatctgaggagcagattatctgatgccgatcatcaacaaagacgtaaatcagctgtgtataccaacacaacgatcgacgaatagtgcaagatgactaaccaactgagaggttagaagcgccgcaaacgagaacccgctttttttctactctgattaattgacggatgatttccacgagggtaaacgtcttgcccgttcctgggggtccatgaatgcaggccacctctacaagcatgaaaagagaaactatagtcagtggtcgttcaaattcatttgaggagtacctacagacgagatattcgatcagcaagacaaaccgttactctctaacgcaaaccgcacggcttctttctgactttgatttaaagactcatcaaacaaattgatttcgcctatcggagttgatgtgggaggagacagaccgaaactattatcgatgtcacaaaatgagaagaggaatcagattggtttagatcaagtgcgcggcgctgcataacctgtcaaaaagcttcaaagtggttcctacagtgttttgagtaatggaacagaattatattctggacgtggtccacgcacataattgctgaatggagaagttcgaaactcttgaactttctcgctcattcgctcatcgagctcatcctccgctccttctggagcgtttataggctgttctatcaagttttccccgatagtctgtgtagtggtgggcgcgttctccaacgtttcttcgctgaccgaattagaggatgaaacatcgattatgttggtagaagttgtagtttcagaaggggtaggtttgattgttgtatcagatgtagaggctggtccatctgcttggatgagccgcctgactttatctaaagctttccccatcctataaagatgaatcgaagacaaagatatatcagtatggaaatgaaacattggtcgggtaatttgaaggttcctacctatcgaaagttcctgtagcggcagtcttgatgctgtgtattggaccggaccaatattgaatcagatcagatcaaaatggtcaaattagacaacataactcgtattcactaacagtcgacatctttccggaatctctaaatcatcgccatctctaaccgacacggctaatatcacgatggtttccgttaccttgtaaatgattccttcaacttctttcccttcttcttctgcaggtttcttcgaagtcttgcccttccgaacggtctcttgaggaacgatcttggcgggatctccgtttcgaaacccatgagagggtaattttggatctgtatgaaaagcagaaggcctatgtaggctaactagactgttcgcacgcgatgtaagattataagaagtgtaagtacgaaagcaccatcctacttacccaagaggcaaaatgcaaaggggctaacgatttgcctcccaacccgatgttcacaccagataccccgagtcctactctcagccaaagtagccttctcaattcattagaacaaagtaattactgaatgaagcaaagaggtttgtagagaaggggcttgccattgattgctaatcctttttgtgcaagaacctcccatgagcaagaagtcgagagtaaagccgttcgggcttgatctgtttcgagctccttgtctagaagatgggacaaccggtcgaggtattgacctagtgttgcactcgaaggtggtcgaactttataaagactgggcacaaaagcaggagaagatgatgacatcggagttttcgtcaaagctgttggtcggtcggagatgtttacgagcaaggaatgatcgccaaaaagcgtgaaggatgatgacgcgcgttgtaaactcaagtcttgcattttgtggtatctgcagctatttcaatctactcttctatcaattcttctgagttctcttcaatgattattcaagaattcaatcacatgagaagacactatgattatataaatttaattaaaaaaaactaatcctacagttgactgatccgcgaaaggaatgaacattgactaaaataatacagaggaaaacacggatatgataatgatctacaacagatgggtaacgtatgcttttagagggagacggaaagcttcacctgaacactcggcaaacagtaatgtatatatgtgtgacggctagctttttgtgatagctatccttccttttggcaagaccactgtacgcctaggtttcatgaccaactcttctgttttaaatgtcgaggtcactgaatccttctcctctccagctctctgcggggagacgaaagacgtagtcctcttcacagcacgcacatctttggcttcagactttgttttatctgcactctcctttccacagtttttagaactctgggtagacgagattcgttcccttggtgatcgaccttgattttgaacctcttcctccttcaaatcttgcttcaacgatgtgatcaacttgacccatttcctatcatctccatcccactcttcgtggaacaactgcttaagtcgattgacaatgagagtagcagagtgaacgtctgccgctgcgtactctattgcttcctggctcaatggtttcgtccaattagaggttcgaatcgcgcttttggggaggtagcgagtgatataatagtttgtcaagttttgaagggagatgatctgtcatgaaagaaccagccagtgtttgataaaacaaagcaaaaagtttagtacaatgatcgtttcttcacaatatataaagtgagagagcaaactaacagttttcccaggtcctgtccttattgggtctacactccttgccaagtgtgaaatgtcgacgaatcctctaacaaagaccccaaaatcccttttgagctttaacgcatcgcctctgatatttactccgaccttgattctatttggatcgctcagaatggagagtaagcgaggcggaattttgtagtacatggcagaaatctgacagagcacgattatatggccgtcaccaatctgcaggagggccgtcttacgttcgcagccttttcgatacgagactggccattccatgtcaaatgataaagggactctgcggatatattgagcaatcgtcagctaaggaggagcgggaacgaaattcgtgacaaacatcatgaatgactcactccagtttgaaacagcctactagatcgtcaacctctcctggggatactgaatagattatactgggagctctcccaaaatcactgctcttgatgtcgaacaccggatggtcctctggatcaaagttgatagcctcattcatatttgatgaagtcctcttcagcaaggcgctagtactctgtgttctgccaagagcttttcttctgctcttatcatattttcgagtgacagttgagaacgtcgtcaagaattggttcaatgaatcgcttgttgagcggccgatgggctgcctagaaggttgcaggttgaatgttggtcgagaaagctcattgtacggcttgattgggctcgatgccaggcgagattcagaagaagtataaacaggaattgctcgaggtcgcgtgattggtgaacttgggctagaatgggtgagatcgatcacgaagtccgttcttgagaagggatgatagtgatcggaaagacaaaacaaggaatgagcctgtcgatcgagcctttttggaggacgaaaaaacagtaaaatacagagagaagagaccaacaaggagactcactgcgtgctaaaggagcttccagggatcatgacgattgagatatcagtgtgaagaaaaggaggaagaggattctttaaaagggagtgagagtgtatagtggccacaaggtggcaaaggaatgagggcgggtaaaggatcggatttgttaccatgacgacacagtaaagagatcttatctcgttcagaccatccagacttcaaacaagcatcaatccatccatccatccaacgtcaacggtcatgtcgtcaaatacaagtgcagaaacaagtctggatgaacaaaacaccgccttatttgttcaattccagtcctatgacttcgataacgacatagaattctcgacaaaagtacttcctttattgtcaaagttagaatcaaacgggatcgggacagatgtacaagatcttctgttgaaggctaaggcccgatatttatccaggtagttttcctatttgcatgcttgatttctatgcctgaaatatgtgtttgatcgcttatcatctcttttcaattagaaaacaaaatatcatcatcgatattccgacgtacaataactggctcgcatcaccccttgctgtgacctctgatataaccctaacacctgacaaggaaataactgctaatggaagtgacaacttctcaatcgtgacgccaaccgtccacaacttcatcgcgtctcccgttccttctgaaggtcaaccacccatagcgcctcttcctttgcaagagcttgctaaactgatcgcgcagggacgagtggatgaaatccctgtgttgcatgtcgaagagagattccacaccgttcgtgctttgccctcatatgtttaaatctcaaaaagtctcgaagcttacgcggatgattttcatactaaacccaaataggctccggaaaaaacagaagtcactgtgccagttctcaagccctgggaacgtgttcaaaagcagtcctgaccaggtatcgagaattctgtactgttgacagaacgaatgttgtaggtatgcgtacaaaacatatgaattaaagagaaagaacaaatggatcgaaaccagcgcaaaatcggatgacgaaaatcaacaagaaaagaggaaagaggtacgcatgtgagatcgaatgcagacagacaatgaaaagcaaaaaggagaggtgagatgtacgacccaaggccgatacctatctagttctcgggtatacggaagatcgtgatttctgaacgaattcaataatagcggcactgaatatgtcagcgattgcggagaagactcagtgtaatgatgtgcaagaattaagatacttgccgttttgtttgaaataccgtctattctcctcgtcaatcaaaactagatttaagaaatacctggctgaaaactttttgttgacatctctgaatgtcggtgtgagttcgaatcctccaaggaaaagtcggatgggaattgtttctcctaaatgaatgagtaaatgaagaggaatggcgaaacacatcaattacgcgtttgaggttatttgcgtccgtcttcacgtgtgaacgaacctctaacaggagctccgtccatgatctttgattagaaaagatccgcagacagaagaaagtagaataagtcactgattaggcaacacgagcagcgataagtagtatgaagaagtctagaattacctcaaatttggtgattgtctcgctttcattgtacagattagggggcgcgcctgtggtctccttccgaatgatagacagctccatgtgtttaattttgattcggaccagcaagaagtagatcttgccgacgatcacatctttgagatggtacctaacgtatccatcacgcaggtggatatattgtattcgatacgtcaggacccaaccacgctcgtgtcctttttctttcctatcattaatagagagagaaaaggataggacatactttgacttgttgtactcgaattcaatatgcagacaatcctcgattccaacttccatcttgatcgagttattcgagtccggtggcatcctgtatgagtgcacccaaatatctttctctttgacaacatccgccattcgtcgagagattgttactcgaaggaagtatctgatagcacgtaggtcaaatcttgtgttagtaaccttgtgtggttagttgaacgaggtgtatgtttcaagagaagacacgaagccaggacggacctcagcttgacattgatgccttggtaggactcgtactgcttttcgacgttcttgaaattgaagttgaatgtctgcgcctgacgcatctctcctggagaagcaagctcctgagacaacgataagaattcatagtgatttcctcgatcatagaacctaagaatggatgaaggaaagaaaaagtggtcagaattttgtatcgagtcgtttattgaactagcttagccataacgtacatttctagcagataagacgaagagatcgtgagagaagagagtatttcagatcaagctctcatttcagactaagactgggtattcatgaggctcacctatcgatccaacctgaagaacgtcggtcccaatcagtccatacacaaacccatgcgattagcctcgtttgaccaatgtgttatcctgataactccatcctgctatctatccgaccaatcccatacatctgtgttcgactaggggactcacaaactcgactttgatcccctcatgaatcagcttcttcccgtctttcactctgactgtgacctgcccgccaacggcttcgccatcgaagtatactggagagagttctttttcgtccttctcgagcttgatctcaacctgcttccgctcagattcggacgaaagtcggatgtcgacatctattggttgagcaaacgagaagaaagatgccatctgaatctcacgaggcgtatgcttgagctcaacaggtggtgaaaagctagagagaaggatgaagtaagaaagcacgaggaataatcaagatggaaggatcggtagatggccaaaagcgaagaacggccgctgagagaagccacgatgactgtcactcgtgtggcggtgttggctgcgcggaatgcacagcttccccaacttctaattacccatgttggtagtcagtacagtacattttatgtctggtgtacagtctatctatagatacagcggtggtatttctgcaactctgtacccgtccgtaactctgatcccactcttggttgagttactcctcctttctgacgattttctgagtgtctcgcgtctttgtcggtacgtttgcgcgagccgatttaggctttgggttcggctttgctcccggaccaggcttgaagtatccgtccaacgtattcttttgcccttgcgccttcctctccttttccttttctcttttgatcgcctcatcagatttgaccccaatctccatcacttccattaacactctaaattcttcgtctccgatgattcctccggatgcttctcgatgccctctggcataatccccaccaacgcgatctatccaaccgggacttacggcttcgcactgcggcttgtacgtattgaggatctcgatcagattcggggttgatgaatcagagggcgaagaagcagaggaagctttcgatttgggaactctgcatgaaaaatgtgtttttccaggagtatacaagtcgtttgtacactgtggcgggtatcgaagacagacaggagatgattaggcatctaaattcgcaaggatttcgtcaatatcttacttaaattggtcacgtaccatgaccaagacaaggtctttcgcagttttcaacgtcccagcccacctagtagcaatcagcggatggacttggtaaccactatggatagcgatcacggcgattcggccatctttgctgaattttggccctgcgctctgccagcgagcggtctcggctgtcgtgcgggctcgacaatctaatagataaggagcagatataatgtctgagaggctggttgcgttgaacatgacgtcccacgctttctccacatcaaagtctggcgttcttcgggctagctcattttggtcatttgaaggaagaacgaatgagaagatgaaagacgacaacaagacatgcaccaacattggacttacgagcattcaacatagagacaactttagacaacttggactttgtgcttttcttttcgacttcggccaaccaactaggccagggctcatccttcccaaacttgacagtacctgctcccagatctccatatactcctatcaatgctgactcaccctgagtatccttcacggcgtcgtccaactcacaacagagcatgtaggttaacatggagcttgttgcgacaggctctgatttacaagcgctaaggatcgctgcttcatctggaaacatatctgagtaatgatggtcgatgatcagacattttgttgtcggaccgggaaggagcggagggccagcacgagacccttgatcaagcgcgatcactctggaataggactgagctagagaagggggtaagctgtgaacgttggctcctttaggaagaaaaaagatttcaggggtcggaaaagaggatgaggttgactccgagcgggaagccatcataagtagtgttctataaaggatcaaggtggatgataaaccgtccgcatctttgtccggaataaggacgactgtatgcatgtgtgtgtgcaataataaggatacttagtctaaatagatcgagagagtgcacttgaactggataatcctactcacctcgatgacttccttgtacgcaatccctaaggaaactcttggcccgttccatgctttccctcggagcgggccagtcagcataaggcgaaagtttgattgacttgtttggacttgccgagacggacacgctgttgaacgaaggggaggctgaacgttttgacatcatttgggccaaactcttgaacatgtgtcgtatgtatggtgtacgatgctgaagcaaggcgcaagtcagtacgttcgatcgagatcgtcgcactgtgggtgcgtcattgttttgtcgcttagtcatcagagtcatctgcggcgttgaccgaaacgcatcatcgaattgcatgaggcgagctgtggtgacttgtaagggtcaagacatgcgagaatcgtctgtgtatgctatgagctgtacatctgggtccagatacattgaagaagagtagatggcggtggtggcactggcgatgagatgtctgagagaggctaggtcaagaaagtagagtacggaagtgaacaagaaacaggaggagaaagcaaggggaagaggaatgaagcgttctaggccactaggccaacgagccggttcgatctcacccgcctcttctgtttcctttgatgggttacatcatataaagaccctttcgagatggaaatgttcttcttcttccttctttcgccaccgttgaagtctatccttccttcattcaagactttctcacccaaaagatttatagccccaacacatgtccgctagtacaatcaagaccctggtgtgtacatgttcttcggtctacaatcgggatcagtgcaatacatgttattctgatgcttgctgtgctcttgaaaactgtctttcggtcacctggtcacccatgttctctagaacgtggtctctcttattccgttcgccatcgcccatctttactttggagtaagtcggccggtgacacggaattttcttgccacagatcaattgcttatcttactttgtctcattcatctcttcagtacaaagcatctatcgggtttgatcactatgtacacccttctccgattctgtccatcggcaaatgggcttggctcggtttccaaggacaagctctacttgtcattctattccagatttaccagttctgtcagttgatgcatctctgatccctgtattggttacctacaaatcaactgaccttgtacaatatgttctacagttgactctgcgctgcctgtagtggcaggtgtgatcggctcccgatacgctgtcgcttctcttgttcaaatcctcgccattctcgtctgggtggtaagccatgcacttttgccgtttgtctcttatcatcttctgtatagcttctgactgcgtttcaaacaatattcttgtacaccttacagcgaacggccaactacctcgccgccttcatcctcagcgcccttctctggcttctcgtgctttcgatctaccttgatgtccagcgaaagcacgtctcccggtcgttcttcgatcttttcgctgttcaaggtctcttttcattctggctcgtttgggtaagctgcagggttcctctaatacgtcattcttgagtacatgctaaggtttgccataaaactttttagtccacctaccttacgattttcatcggttctcaagccttcaacctagtccatggaaacatccacagaagcaccgtctggacctcgatcttcatcctgtgagtcggcttagcagattatatttgacatgaattcatcagctgataaacgttgttgtttctagtgcgctctttgccgccatctccatcggctcagccatcaccagtgatagccgaccagccggtgacttcaatcactctttcggaactttctgggttactcttggagttttcactgctgtccgacatcagcacaagctccgatcgctcgcttgggtgtctggcctcctcgccgttctcaccggtcttgtcttcgtctactcttcgtacactgctgtgagtttccaacatacatctcccttgtcttttttatgcatcacatagactaaacctactttacattcctgcaaaatctactttcactcagtaccaagcctaccaggctcgaatcttcttggtcgaagacgatgaagctgctgacgaacgacgagctctcctctcctccaatgcctaaatacatcacatgtccattcggatcatcctcttgcttaatttctgtattttgttgaaacctctttatcttctatatgaactgctttgttttgatttatcttttgcttgaatccattgttattactgctgttatcgattctattgatgctcagtaatccgctgtgattacccaagtttcatgatcatcggagagagaaaacgcgcgcgtcatgaaagtatcgatcggctacgcccgaccatagacttccatctctatcgttctacatcaaccttccagaccgtcaatgtagaggtatatacacatgccatcaactcgaaaagttccccgatccgataaaccgttcgaggcaccaacattatactcgtgctaccttcttcgacctgtctatgccaggtctagacggacttatgtcagttgtcttcctagcacatcgctattcttcttacctgtctctgctccatggtcttgattacttggcggctcaaatctcaagtgacgggaaccagcctggaagcaagcggcatgaaagccgatcgtttgtataacataaatttagtttactgatcatccgatttaaaaattgacatcacaggttggttcaacgcctcatccgatgcggaggctcagacaacataaccgagaagctttaggaggtgctgtaagatgtttctatgcaccctcttgaatggccctattgttcttgtccctcggccagaactatcactgaacataaactccttttgaaaaacatttacttattggtcggcgtgatttcaggcatatacaagaaaatggggaccatggaatatggaaatgctcgtgtatggatttcccagtaaacattctgctcttcaggtgggtgcatttgtctcgattgagtcaagatctctcctctctgctcatgtcgtgaaggatttactgatgagttcattgtggcgatcggtcgacggaaatagtttgagtgggcttggcaacatccagagtgagtccttgtttggtacactcataggttgctgtcatactgagttacactacatctctgcctcaagacgctcccgattcctccgtccacctcccgttgctctttctccaaaatatacctccaccggcaaactcaagatttccaaaccttctcttcaagcaccttacttccctcaggacccgacctctaatgaaccgctgacgaaagtaagggtggtgaagaagatgttgagccttcccccttggaacaggcttccacttcacgtccggttattctctagcgaagctgtgagactttggttagacaaagagcctggaaataaatctctcaaatcaaaatggatgaagtttagtcaggtcgaaataaagaggaaagggttcgaagtcgtttcggacttggcgggtgttcatggagatagaggtctcaggcaactgggaacaaagggacttgatgatggaacaggattaatcgatgttgatgattgtgtgtataagctttttctcggctctactttcaaactgcatctgatccagctcgggcctgacgcttttcgttctgcattatcactgaaagataaatttggtgtagcgcattgggaaaaatataaactcttatcagatgaagcctcgatatcccgtcaatcagcttgcacactctgccctcttccgatattcctctcccagcctcttacatacgcactctgcgtctcttccggtcttcctacttgtctatctacagcgcatctcacgtgcctctcctcccacttcttgacttcgcccgagtctacttcttccgctcatcctgttcatccggtcgaagggaaaatattaattcctcaatggggaacatgccctgggggatgcggatgggaaggagaatggggagatgtcgtgagaggctgttggacaaggaaaagaggggctgaaggtacatttgatgagagggaaaagaagaacagggagaataaagcgccagccagcgaggaagatgaagaaagtgatgaagatagggaggagaatagcgaagatggactcgatgatatggctgacgaggccgaagattaagtcctcataagtcatcgccggaataacgtatgtgcttcttatattcatattaattctttatgccgtaactcatacatgcgtctcgatctgatcgatcatatgaaccgaacagtgaatttccggttttgatccaatccatccatacacacgtacttttcaagtatcatacgcttcctcaatataaaaatgtcagagcttggcggctcaaattgaagcgagctctaactcatggaagacaaccaagtcttcattatcaacatgaccgtcgtcaaggaaggaggtggctgaaggcacagatttggatgatattctgaccatcttttatcatataactcataaacttcagtcagacagctcatcttgatccatcataaacttcttcgactgatggcatacagaatagaactgtttctttagaatgaaataaattgaagaatcaaaagaaaagagaccgaggtaatattatttcaagtaatccgccgaagtcgtcctacaagtcaagtcgagatagttgtgaaggcttagtctgaatggattgggacatagatatacccgaaaagagaagagacttggcttaccccaccgcgtagatttcgccaaatcgttttagcgcaaggatgacaactaccaagaaggaaccgggttgttctcaattaattcttcatctcttgaatatatcaaagcaaaaattactgacgttcaacatcaatagtgatttgcaaagcctctgatgacaccagcaaaacaaacagttaaacgtcagcatggtacaatctaacaagcgagatatgataaattcgactaaaactgaccttcctcgtttccttctgagcgctgacgtttgacttcgttcagcaatacgtgcgccacgattcgccaggagatctatattacgattgttttcattttcacagcattcatatgttgcaacgtcaacttctcttgtgcttgttcttgcataaggaaagacaagaagcgaacaaaggggacatgactgaccaccatgactaaactaagtctactgaaatccacatgcgcgaccatatgaaggatttttactactgaccgggcggacgaaacagcttgagcccatgcactgggttcgaaatccgatcgctcttggtagatcaaggcaaacgcgctatccagaaattttttacttcaattttcatgaacagaagatagaggaacagagatagaagaaacaaagacaagcgtgatcaaagtttgcatacgtatgaatcccggtatgtatcaggacagtttccgggtcaatcccccatgtctgaccggactgctcgcttgggttgtcagaggttgagcaaactggagagacctggttcaaaccccatgatggtagccctccaaggctgattcgtttcattcggcaaaaaaaagacattagtcgatgaccagtcgagaaccgtagtgatgtacgtagcgtcaggggaggatcgggcacacaacacgtacactatttgagcgggatttgattgatgagccggaagagacttgacaaatttaatgagcgcattctgaagccgtacaatctcagttggtacaggtttgggttcatcagcgtcaagatcatttcctggtacgtcatccgaaacgccggttgtcatgttgaaggaggcaactgagttggctgaaggtgtggccgagccaagagggtgcgacacgcaataagcgaggtaaccatctcggacagaaggctgaatgaattcatcttccagtcgggacgcctcattcaagaagaaagttgcaatatagaaacatgatgcgctcctgagtgtatcatatgctgtagaatcagttaaatgtaaaggtcctgaaagaattgaaacgtcaaaaaatggcacaaacaggtctccgacgagagtcgtctgagaatcatcgaacaagtcatacaacgccgtgttaggctgattgttgacaagattaatctggaaaacaaggagatataacggcaagttagagaacccaactcaacacaggtcacatcaatgcgaggaatgtttacatcagcatatctgtacaacggtaatgggaagggagtttcgatttccgtccagtgcatcgcctatgaatatacaacaatggaccaaagtaaataagacactgtgttccataccaataaggcgtcaatattgactaactgggggagatccattgcttgttgaccccactctatccatagtctggtcagtggtataaagaacaagaattcagagaaagacgccgtatgatctcattctgtgaggcggcgcacggaacgaagccttggcaaagaagataaaatagaagagaacatacccatgctatccagaacaactgaataaactctccgagttcaacaaaatccttgggagatcgaaagcgtctacttctgcctttgtatgattttctatcaaagcatcgagagctgggttttggatgttgatttgacatcgatgagaacggaaaggtaattctttgaagattgacgatagagcagaggcgcatcgcaagctgggtttgatgaagcacatgcgatgcatgttgatgaacgacgaagatgagcgaagacaacaatttgaaaaacaataagggaagcattcagaaaagagtaaaataacgaacccccccaaagacccaagctggtcgaaatcgcgctcgggaatctatcgtgtatcaattccggaatagtatggcattcagcatcgatgtgagcgggataatcagggagattttagaattcttggagatatgctgacatgatgaggaacttaacacgatcgcagtcctgatcaagtcaatcattcgatgatcgacactattcacggcattgtctaactttttctgtgcgatctcaaaaaatagatcgtccaatgctctgactgcctcatcagaggaaaacaaactagcgcaataatactattgccgcacaagagaaacacatcagcatcaacattcatgttgcgtcaaactctgacaaaactctatccaaagcctctatcgagagacaagaagtatatagggagaagcccagatcctgcaggaattacgaaccattgcaaagaggaatgcgggatgtggttgatccttgggatcactttcttgaagggaactaagtcacaacgatcgacagcgtccccgagccaatcataatgatatggagaattgaatcagaacccaatctaacagtcttcttgttttgttttgataaatgaactcgaggcggagagaggactatggatacagaccttctgaatctatcgatgttcatgtcgaattggaatactgccatcctagagaagaacaagtcaagaagtggggtttggatatgttcgggaagttcctcataaatcagcacatgtgctctcaaggccgttacgcgatcctctagaggtgctgaggatggcgaatgaagtaaggacccctgcatagaagaaagcgagggagtggataacggctgggaagaatcggcgctcaaacgatgatttgggttgatctgcatggaggcaaagagttcaggaactatcgagcgagattccgatggaaagattgattctgttgtagtgctttgtgctattggaatggtttcaaacgcccagggatcgagtgcaagatttgtattttctgtctcttcaatgagttggttgagcacatctacgggaaagtagtctgcctgaacgacagactcggtggctgtccattcagcggaaggagccttgcggtcgatgagatttgatgtatcaactccaaaagtagagctcgttccccacaactcttcgaaagcttgggagaaggcttcttgttcgtcgcgctttgcttgccgaccagggcgagatacctctgaaatgccatccgatttgacctggctggaggatgcataaggaaacgttgtttaagtccttcgactggggattggatttgctggtttatcttgattggtatggtcaggtgccagttgagcaagcatagattcaagttgaactggtgcagatgagcgagagacgacgatagtgtccacgatcagcgattcaagctctgctgttgtgaaattgacttggcagcgagaagaggcagaacactgaacctacgaattttgtcctctagctttttgacatgagttctcggtttttgaggaacgtcgtatacgcatttttgggagttctaaggaatcgcagaggtagttaaaccaagttagagaagctgagaaaggatagcttcatccatgcgtgagctatgaaacgcagaacatgaaaactgcgttctcttacctttaaacaaagagcacagtttggtctctcgcccgtactgatgaaggatcatagagatcagacaagatgcactcgattcgtgatgcaaaatgaagataacataccatttcttgagagtaataaagaagaaggaccatcggcctgattagcctcatcatcagaaacgaagagcacacacgtacatgcaggtttcgtctgatgaaacatagagatggacctacaagctttctcttcctgccatatatcaaatgaatcaccccagatcagttagatgagatacgccatgatgaattgtctgagagacaagcaacgggtggaaggactgacctgcaaatttgacatctaagggcaaaaagatggatcgttggggaacaggtcgagcgatgtgtcgatcgatgcaaaattcgtcagataagcgatttgttcgaatatcaggcagaattttgaaagaacgaaaaaataaaaagctctgaagaagcgatatgtgacatgaacgatcttacgctgcacctcgtttgagaacttttggagctgtgaccggctccgaggacatgatgatctggataaaagcgtcagaacctggaaggaaagtaagtatatggccagatgatagctcagatggtgttgcaggtcactcgaatgaatgataaccatcaacagactatcaatattttccccgtttggtgatcgagccaagcttactctggcctgactactgaagattgaatcattacttagattttggttcaaaagtaggacaacatgttcggcaatcacatcgcatccatccccaacagagttgctagcataccaatctcctctctcagatctctcgtaagaacccacccaacgtcttcggtcgataggatcttgccgttcatccggcccgcccgtctctttctccggacattcgccttcccccggcctggctctgggtagtcacccgggcttggaggctgccaagataaacaccggctccgtgggcttacttggaatgaacaaatcaaatattgtaagtacatcgaagcgccgttatctaagtatctgggacgcgccttgttttgctttctttatttccggttcctctttcttgatcatctctttcgtctctactacacaccttgtttcttgttgccagtaaaaacagttgagacagttcagttggcatccttggaggacacacatcttgcagtaatccaatcctgctatgtcaggcatcgacgagactccttcgaggtaagtatcatcggaagcgtcctattgtcgcctcgaaggcatttgtgctaaccgtactcaccaaatactttggtctccgttcctcaggccaagagtcgatcaatcatactctcatgaacttccttctctaccaaccatgcggcctgttgattctgacggcgaggaggaatacaccgatgaaatgagcgagtctgtgagtggatcctcagtaatccaccagatgtcctacatgattctcattaagcgcactctactctgttctatctatctattttatcgtggttctcaatcataggaccctaatttggatctgtcctactcatattccatcccaacgggcacaccttcgacacaatccggcataaactcgtcaagcaccgtcacaccgtccacatttcctacaccccatggctatgctcgctcctcccttgcctcttccggagctgctacgccgtcatccgtcgcgtctacccgagacactccactcgccagatatgctatgaagaatccgtatgctcaggaaacacctcgacaagccccgtcaacgcctctctccaatggcaatactcctttttcatccaccccggcctcttatcaatctgccagatctagaacgtcgattggctcagcaaacagaagtcttcgctcgagcttgaattcaacagcttctcccaggagtagattctctcgacccagtcccagaagacaagcttctccgctccgtgatcgaagtttggcatcaaagtatgacctctccggaatatctgcagctacaccttcgatggcctcggagagtatgtcttcgattcgacaagaggattcgttcatggacgagcagtctttgcctctgtcgtcgagggaagatcagctgaacgatcactcgcttttggaagatcaggctcagctgataggcatccaagaagagggcaattcttttgcaagtttcagccgaactgcggaagtgacggacggaagaacaaatcgaagctccaatgacgacacccggaaccaggaagtcgcagaaggagtggaagcaactgacgcgtcaattgacctcgaaaatcagacacacaatgacggcgaaggagagtcaaagtttgatgaagtgacggaaggagagcaacatggtaacgcgactgaggaggaagattctgctatcgaaggacaatcgagcaacacctcattcgatacttcgatggggctcaactccaaatgtagactaccctcagctgagctttctctcgttcttgaagctgaagaggaagaagaagaagaggaatcaaagcaggcaggctcaaccaagtcactggtggatgctcctacacctgatgtggttgtacgtgttcttagctattttcagttaactctttatattgctaacactgatcgatcggtgatttatcgtgatgcttaggcgcgaacctcatacgttcagttgggcctccggcgctcaaggtctgcggctcctcgaccagaactcttatcatcacccatgtcgtctgccacctcggccacctccgaatcacgagtgtcgactcccaatggcgcatctcaaaactctcaacaactcgatgtcaatctcatttcgattcctttccaatctgatggagacatttccgaagatagcctgacaggagagccgcgaagcatgctcagcgatgtctatcactccccgctcaaggacgccaccaacatcagcttctccactcgtgctgaaaccgactacagaacatctcctgagaccggtactccctatcgacgtcctttgattaaagaatttaccatcccaattgccgatttgactccagcagccacatctaaaatccctcgacctgccctcgatacacctagaatcatgatggctaccccactcccgtcgtcgaacgcagaccgaagaaccagcctcgtgctctccaccttgagctcctccatcacccgaccgaaagtccgaggaacgccccatactcgccggtcgtttgtaggatcgggctcgttaagaaattcgacgttggcgctgaacgcatcgcgtgcgatgtctgaaacgccgacttcgtctacccatatgctcagcttacctggaaacagcacaggtctcgaagaagattcttcgtttgtctcggtcgaatcggcagaagatctcacaaacctccatcgcgccaatacttctttgcccgtgtcggaaaacccgtccaggcaaattggcgtcaagcttcacaaacaccttcacgagctaaacactcaacagcatgttctcatcagcagtttacaggatgagaacgaggacttgagggatcagttagaggctgcacaagccatgcttgcttcagctcagatgaagaacaacttggaatccaacgatgagagcggtcgaagcgagacttcgatggccccggtttctttggaagaattggatgaactcaagcagctcttgtacgagaaagatgaagaaatcaaaagacttcaccagagaaaggaggaggcggatcaacgagacgccgaagtggatgaagaacttgctatccttcgacaacaaatcgagcttctttctcagcaagaactcagtcaggccgccgctgttgcccttcctccatcaataccatccagtccggaaccttctccttctattcggacacacgcctcgctcgaaaacctattgtctgctaaaaccgcggaagtagagtccatccgagtcgagctagccgaggtcaaggctacggctgagcgccatattcaagatttcggccgaaagacggagcaccttgagtcagaaatcatggacattcttgtggagaatgaggccgagctgaagcttgctcagtcggagaagaacgatctgaaagatgctttggtgaaagccaaagaagaaaaccaaaagacgatagaatttcttgaagaagaaatcaattcagtacgggccgagaaagatgtagaattgaaaaagttggtcgacatgcaggcccatctggattccacgctcgaaacggtcaccgaaaaagatcagatcatcgtttcactccgaacggctgcgttgaacaccagctctgacggacgggtcatgcagctcgaacttgagctttcagcagcccaggataaatgtatccagctcggagaggaggttcgacagctacaggctcaggtttcacaatcttccactcagctcaagtcatctgaagaatttttcgaatccatcactggcaaactgatggcagctgaatcaagactggctactgtgcaggaagacgcaactcgcatcgaagaagagctctctaccaacaaaaaacgtctccaggaagcggaggagaaaatcacgacccttgtagatcaattggctcagcaacagaggaatgctgccgaacgaggccaagaccatcagggagaacttctttcacttggtgacaagcttgctgcagccgttgctcttcaagaacaacagtcagccaaacaaacagaactggaatcgtcccattccgaagctttgagccagctcaaaactacatactctgaattaatcacctcgctcgaggacgcggtagccaaggccgatactcaggctgattcatatgtccaacaaatctcttctttgcaagcacaagtcagtgagctcgaagatcaaaccacgagccgagctcgtacgatcccattgccaccctcttcgcctggtccctctgccgatgattccaaaatctacgccagtggaatcgaaacatctttcatcaccggggatgaggtcgtcagtcagcttaaggctcaactatttgatgcgaataaggagcttagccgaatgaaggcagacatggcttcctcgccgtatcgtcgagcggcgttggatcacaagaacttacgtattcaagtcttggaatctctcaataccaacctggattctcatttgggcgctatgagaaaccagtatcgaaagctttccatcggttctttccgatcagccaactcgtcaatcgcgaataactcgattatgtcagttcaaacacctagaaacatcggatctcttcgaaaggtaagttcacacccatcaaagtctcgattcgagcttggtcctcagctatgtttctttccgtccgactcatttaatattgtccttgccatctatcagatgccttggctggacagtccctctcccgcctccaccttcaaggaagcctttgaaatcgagcgcctgcagtccgaattggatcatctgaatgagctcattgatctcaatgttgccaaactcaaggattccggaaagcaacagctctcgctgtcagatgaactgtcgagtaccaaggatcaactcacaaaagcacaatctgagtttgagagcgagaaaaagaaggctgaaggccttctttgggagaacgagcagcttcagcttcaaactcaaaacctgttgtccaaacaatcttctgattctgtgtaagtttgtctacttcttcttcttgaacatcgacatctgcacgccgctgactcttacgctttatacaaatgtagactttcaattcaaattacctccttgcaagctactgtgtctcggacaaaagaggaacttcttgccgttgaacagtcgcgtgatgcagaccggcagtctttcaagtcgaaacaccaggcattacaaaaaaacctgaacggtctcgaagctggattagaacgtaaagaacgagctctcaaagaagctatcaatgctcgaagattgctggaagaggtaggtcttctttgtcttctcttgaacaacagttatccacgaccgccttgttttagcgtttgttgacctattttcttttctttctcgtagaacttggccgaacagcaaattgggtctcagaagcttgagcaagatatcaaaaagatcaagaatcagagacgagaagagtctgaaagtctggcagcggcggaggccgctcgactgaagcttgagagcgaagtcaagcgacttgagcgagtaagtatgattttacttagttgaaattaaagattggagcagcgtgggaaaaacaaatattatctctgactgtatgtgtttcttgattaggatgtcaatgtggcccatagtgatctagaacacgccacccagcatgcagagcacctcactggaatcatcggtcggaaagatgcaagcccggttgatctgatcactgcagaaaaagagaaggcctcgctgagaaatgatatcagaaggcttaatcaagtaagttttcaccgattcggaagatcttaccacctagttggaaaaacactgacatgcatgagcgaaaacaggagctgtccaatgctcgactggatcttgaggattcccagcaagacgccaatttggtacgaaagaccctggagtcgaagcagtccatcatggctagtgaaattgaacgtcttgagaagacaagaatagaactggataccaaggttaggcactcgaccaaggtaagtgaattgtcgtcgtgtatatataacttttcacatttggtcctgtctaatcaacgatactcccgcctaaacattcgtcatccaaagcacgttgctgacgccgagcgcgagatcagcgacttgaagcaaacgttgaacagtatgttccaggatcatgatttgttctacatatatttcagctgttcatccgttcccttgactcccacatcattctctagatgcccgcgttgaagggactatctccgcccagcaggtcactcaagatcttcaaaatcttcgtcgacaaaagactctgcaagatgagaagcttcgagatgcagagatcgctttgagcgaagtcgagaacgttggttttttgtcaacattgtcctctgcccccttaatttgatcggaaattctaatcgtgcaaactcttctcttttagcaatgtatcgttcttaaggcgcaattgactgcatctaaagcaactacctcgaccctccaagaaacgctgacgcaacaacaatcggttcttgcttcgcaaacccaggatctcgcacagtaccggcttcaatcccaacaaattgaggcagaacgagagaccgtgaagcgcgagattgtcagcttagaaaaagagcttcaacgagcgaagcgagatacgcgctgcttgaaggatgagatctcgtctctccggagtgagcaaagcgcaagctcgagggcagagaaggacgtatctggcaagacaaatgaagagatggcggggaagctgaggttagcagagagcaagttgaaatcgctggaagctagtcagaagaacttggagcagagatacacatcagttgattcggagcttcgagtgactaaatctgagtaagttcaatcctgttgcctaaacgatcagtgtattggatgactcactgtatcatctgatctgcaatagtttaagcaatctgacagcctaccgacttcaagctgatgaagaggctcgacgtctcgattcagacttacgaaccgcattaaccgagtacgtatttgaagcttctatcctgtttcgatcctcacgttcaacatgggctgatcagttggacgtcctcataacggtttaccagtctgagcaatctcaaatatcgacattcgaaggaatctaagggattactagttgacattcgatacttgaagcagaagtttaccagggagaattctttccgagaagatttatcacttcagaaggagtatctcctcatcttgattggtcaactcagtcgacagtaagtgatagtttctctctttaaagtttgatgatcagctatggagcggttgccttaacttgcctatattttcgtggttgtcagacaatctcgagtgtacgctgcgatttctcagatgggttgtccagacgaaaaaccggtcattcgaaagcgacggacactcaagtcaacagttcatgctgtcatcttgatcatccgtactagaaactttgctactcaatggcgaaaggagagtgaggttaaggttgctttgatgcacgcctatgagcgcgtcgtgtcggaacgagctgctcggacagctatcggtactggtccttcaaaaccattgcgatgagtttgtgcaggctcgccggtatgtggcgtcctcatcaatacacttcttgctaggtcttcttcattcttacttggtttcctgagggaggctccatctgcattgtacattacttagttgctaacaacctgaacgtgagacaatggtcatttttctcaatataccctctcgacttccaaatcataactttctcaccactaatttctttcgataccgttcatagttctatatatgttctttctcaagtttaatttcattcgtttcactatcactgcgactaaaatcgcctgccgccgaacccaagacggtatccagcaaatgatccagcgcaccttcgaagcgcgatgtgaatacagattgtcagatgaattgcattgattatatattatattgaaacggatgatagagatatcttctcctgtaaaggacgagaaaccaagatctaagccttgttttctggttccttcacctccacttcgcccttatcgttcagactcattctgtaaagctcaacctcttcctcatcatcctcgccatctttgtcctctactcccaccggctgcttctcatcccgatcttccttgttcgcctcaggctccttgtcgtcgcctaacaacattctaccaaccaaccacacggctacctcgtttcgctccatcatctcggcctctccaacagccgtgtgacccgaggagttcttgatgtctattaatttgtctccaggagaagaagggtgaagaataagagcttttacgatgggaaggtgaccattgagagaggcccaatgaagggcggttgagccacttgagttttggagagagaattgagtgggaggaaggagaggtaaaaggtaattcaacaaatctgtgacgcaccggcccaatgatgtcgtaaaatttagcaaggacactttcaacttgtacacaacgcagaaatcgtcttgacagatcacaacaagaacgaaccgatatgaccgtttccagacaccatatgtaagcagccacaacccctatcgtctcgagcgtctgccagagcgttgatgccatactgagagacaaaagactggacctcttccagctctccgtatcggcacgagagcaagatatcctcgagctcctcctccgctggtttcgatggaatgttctgattctcggttgagcccattatgtctttgagtgaggacgaaagggtatatgctctgtgtgtatctgtgggatgatggtgaaactcgtaaaatcgagaaaattcaaaattatcagaaatctattgcttactgcgcatttcgatagtccgggcgtttcacctcgtcttcataaagatcaccatcaccatcacgacctattggaacctccgaaatggcaccacttttgactttggcaacgtatgtttaatatggtatctgcttaagatcccgtaggtacagatggcatgattgacgatttatctcggtggatttcttcccaattagatggtaagtgttcatcagactgttactaggcgggatccgaacagaattctgacagcctacattcggtaattgctagctcgctaaatcaatgggcgctcgactttgaggtagattcgtcttcattatgcatatcaatacatgcacatgctaacttttcttcaataacttactcatcgtcataagggaaacaaagctcgaatcctcgaatctatccgaattgccaaacagcgaggggcgaaacttcgagtcggaccagaattggaaatttcgttcgtaaagactttcatctgttcttgatcaatgatactagtgggttgtagctcataagctgctgtttgatggcttcacgcttcaaaaattagtggatatggttgtcttgatcactttctagagggtgagtcttttcgttcacgaacgaagttcgtatgatatgttgaatcagcctttggttctcaatatttgcacataaaacgttactccaacaggcgacactatgatgcactcctgggaggtcttagcagatatcattgactctgaagatgctcaagacatcgtctgcgacgtcggaatgttagtcaacttttatatcttccaaactcaagtctgagcttaatccgtcattgctgggttttcatttcttcaggcccatgactcacaagaacgtgatctacaatgtccgagtcatctttcacaaccgaaagattctccttataagacctaagatgtggatggccaataatggaaattacagagagctgagatatttcacgtcttggtcaaagcatcgggtaactgaggatcacgttcttccaactcaactaagaaagattacaggccaggttagtaattccctctcgaccgaacgatgtgacgtatgagaacttaggttaaacccctacactctctttttggcagactagcgttcagtttggagatgctgttgtagccaccttagatacttgcattggagtcgaactttgcgaagaactcttcacccctgcctcgtatgtatacaatcagccttttacacgcctcccctaatactcacatacatatgttgtccttgtgtcttgaatagtcctcacatcttgatgggtctagatggcgttgaaattttcactaactcaagtggcagtcatcatgagcttcggaagctcaacacacgtgtggagctaatcaaggaggcgacctataaagtgagccctatcgtcgatgtcgatatgtccgttcgatccttccttgaactgatcttactttctatgttctattcgagctctaggttggcggaatatatctctatgctaaccagcaagggtgcgacggtgatcggctctactatgacggatctgcaatgatcgttctcaatggagtcgttcttgcgcagggaacccaattctctcttaacgatgtcgaagttgtcaccgccacggttgatcttgatgccgtccgagcccatcgggcggtgagtagtcgaagtcaccaagctgctcaggcagagagatatcaaagaatcaatgttgactgggaactgggccaaggagtattgtctgctcatgagactgaggagatcgaggttagatatcacttgcccgaagaagaaatcgcgtatgtcacatcatttctccagattaattatggtcaaacttttcctatataaaaaactaactaatacgctacgtgtacgcaattatgtgtataagattgggcccagcctgctggttgtgggactatttacgccgatcaagggttcaaggatatttccttccgttaagtggtggaattgacagttgtgcgacggcaattatcgtccattctatgtgccgtctagtcgtcgaagcctgtgatagaggaggtgattttcttccccctttctctcaacgctttgtatgtcactgattttgagtctcttcattgttcattgcagaccaacaggttatttctgatgctcgtcgaatcgctggagaacccgaagattcaacttacatcccttcggatcataaagaatttgccggtcgcatcttccatacgtgttttatgggcacagagaattcaagcaaagatacaaggcagcgtgcgaaggagcttgcgagcgacattggaaggtctgtatcactcttgtttctttcttctttcccgagttaatttgatgattagacgatgccatcaaactaaccagacttaccattctatggtattttgcataaatagttaccacgtcgatctcaatatggacacggttgtaagcgctgtgacgagtttgttcggactcgtcaccggggtgaagcctaaattcaaagtctacggaggaagtaatgctgaaaacttggctcttcagaacattcaagttcgtgctgactttcttttacttctgagagaaggatttgttgctgattccacatacgaacacatctgaaatcatgtttgataggctcggctgcgaatggtactagcatatatgtttgctcaactcttgccatttgtgagaggtcgacagggtggactgcttgttttgggtagtgcaaatgtagatgagaggtccgttcactatcatccagatgctgccgttgtacattacttatctttgtccttcggatcgcactttgtcggtcgctgaaaccctagtcttcgaggttatttgactaaatatgagtgagaccttcgaccatatgactcttctgctttaattggaatactgacgaaatgtatcgtttattcagttgctcgagtgcagacgtgaaccccattggaggaatttcaaagacggatctaaagcgatttatcgaatggggatccgagaaattcgatctaccgattctagacaggttcgctcgcatcagttcatgactcttttatctttacggcaaaccctgacgcgttgagatatcctgcccaatgctagttttttgacggctacaccaaccgcagagttggagcctataactgaaaattatgttcaagcggatgaggtgagtgtctccacctttcgtcttagagctgtgaatacacaccgacaccttgcggagttttgttcatacaggccgatatgggaatgacatataatgaactctccatctacggacgactacgaaaaattcaaaaatgtggaccgtacagtatgtttgtcaagttggtccaggagtggggagataagctttctccgactgaggtgagtcttttcattcatatagaagaccgggtttaaaaccctgtgctcctgtgttgacctcccttttctgtgctttaaatgattcaagatcgcggacaaggtcaagctattctactttgagtatgctcggaacaggcacaagatgacgactctcacgccttcgtaccatgctgtacgtttgatctttccgcatttttttttcattattgcaagcgctgttcaaaacttaggagtatatcatgtgttttctgctacaaactgtaggaatcttattcgccagatgacaaccgtgagtcaattctttttctctctcctttctgttactttcacaatcaattgagccccatatattccttcattctctacttggtttccaacttcaggtttcgatctgcggccgtttttgtactcatccagattcccctggcagttcaaaaagattgatgccttagcagcgtcgctcccaaaccgagctggattgtccacagaagggggcaaagtcaagaaggactgatttgcgtggttgtcgatctacttgattatgtttccttctcttgatagaatgtttatgggattatgtgacgttgcacgatctgttcccggatatatgagagaagcgtacttggcgtgctgactaagcgaaagaatcactatccgctaaacgtatctgaaccatccgtacatcaacccccacccatttagccacatccatcatcctcatctagtatcgatatcaccatgtcttctcctccaggcgtccttcgatcagtactatcttctcctacgactacgccttcatccatctcattttctgatcaggctcctccctctcagttaaacaacccctcgggagtcgggacatcggcatcaacggtagcaagtgggggtacacgaggaggcacgtctttctcagatgatagatccaaccgacctttcaagtcgtcaagtaggcgaagcttaagtttccagcgatcaaggaccgtcagctctggggaaggagggaatgaaaagtcgtaccgtaacagaggtcagtcttgatgggctcttcttcttgtgtcattattcgtgcctcatatctttagtccaagtcgggatatcgcttgcatcgaatgatgcattcaaagagagccactatgtacacgcgccgcgctatctgatgacggccaagattcacgtctattgatgctctgtgttcactcatactcatcgccatcttacatctggatgcccacatgtcttccatcttctagtcggattcgatacctttgacgactgccacgatgatggtctgttttcattcactctacaaagtcagtataagcgttgtccattcaaatgacaacaaccagtttgcctaatcaacaaatcaaatccgtgattttttgcccatctccctgtttctcatttcgttgtacagcacaatctgaaggttatcatcgatcacgagagtctcggacatttctcgtagcggtctcgcgagatgaatctggatcggaggctttggactggctcatggaaaatttgttagaaggtaagttgatgcgtctttacttgatccttgtcttttacatcggaaaccatcgtctcaaccagtgtattttgggtgtgaggaacagacggggatgagatggtagcactacgagtcatcgaatgggacgagacggagcgagcttcctcggagaaaaaagaagatctccgagaggaagcccgagagcttcagcgactgattttagagaagaacgacgatggagacgagcgcaagatatcaattatcgttgaattcgtcgccgggagaaaaaccgaatcgattatgcgtttagtcgcactctatcgaccggactcgctcatcgttggtaccaggggctcgcgagggaagctggctgagtggggagctgctcttggagcgccaggcatgggctctgtctcccgatattgcatctcccattctgctgttcccgtcattgtggtccgaccggaggcaaaggtgaagaagagtatggctaagagggagaaagatccgaagcgtaagagctatctcgctttgctcggaacatcgggcactgctggtaccaatctcagccggtctcgctcggctggaggactcgcgtagatctttgctctgttcttcgatatcacctgacagatattgaattttcatctatacatctatcggattcgtgttggtcaaaatgctttcgcagctacacgttgaaggcagttcatctatactgtcacatccgctcgttcaaaataccttcgtaatgtttcttgttttctcaatagtgcaatttgtttccatagaacggtgccgatcatcacttctgcgttttgtatatcccattatttgtgtttgttcagtcacttcatggtccagactcaccacgccaacgctcagtctgctttcaagatatacaaatttatactattgatctgttatgttaatcggatatatctagagaaagcaagaattgttggagacatttgtacgcgtgcaagattaaaaggcaccaaaaaattcacgcgtatcttcgttgacgactttgctcggctgttcttcttctatctttgaccttttttcaacccatcttttcagctgaactcatcatgtcttccgatagcgagcaagatggactcgacctcgatggaatattcgttgtaagattttcggttctcgtgctgtcgcgtgatctttgtctgaatatgttcgctcttcaggggctggatgtcgatatacctaaccaacctcgtacatctgatttgtatttgacccccctacacattgacttcaatcttcctgttggttgatggtcacaggagcctcctcgaccggcctctcctccaccgactttctcgacgtactcaccgcccgaacctctccaaacgggcccatcatcgatatcaatccgcttagttggctcacatccgctctggggtatgtctcgtttcgttcttctcctcaccctatctttcgcttttttctccttttgtcaacatatgtgaaactcgagacacagaaggaattgatgtcagtcctgatctatactttattaaaaaaataaaaaaggtcagcacctttggaattcagctcgggtcttcactagtttcgtggtcgagaatgcggaggagtttattcagggaaggaacgttctcgagcttggagcggccggaggtatgttccttctatcgtcattctccttccaataacgctcagagtttggaggaagaagagttcaagctaacaattatatatttttgtttggccacttcgttctggttagctttgcccggagtcgtcgccgccctttcaggagccaagaaggtgaatttcaatcctcttcatagcttctctgtctaatcaagtcaatcaatgatgctgacgaagatttgatactcatgaataaccgtgcatatttctttctccccctcagacggtcatcactgattatcctgataaagctttgatggacaacatctcatttaacgttgaggccaacgttcctttgccttttagagagaacgttcacgttctcgttcgtcgcctcctctctcataacataagttccatgaaattgacaattactgatcaacctaactctgcgctcataccatagggccatacctggggaacagaagtggactctcttctggcttgcttgcctgaaggtgaaaagtttgatacgctcatactttccgatctggtacgttattggctattctttagtccctttacatcaaatgcatcacccttcacaccctgacctttttgtctctgtattaatgggaatttaaaaataaaaaaggtgttcaatcatactcaacataaagcgcttctcaaatcatgcgctcaaacctccagtcttacgtctcgcttactcgtgttctacactcatcaccgacctcatttcgccgatcgagacctagtcttctttgatctcgccagagaggatggttgggaatgcgaagagattgttacagaatggactggaccgatgttcgagaccgatccgggagatgaaaaagtggtcagtatgattttggctactgtattcaagctcaagtcctgatgccttcttctctgtcatgtacatttttcgactggaatgcatcacaacatagcggggaaccgtacacggatgggtttgcaaacgaagcagtcaagattcatagaacagacccaaaagaaaatacaaagaaatgatcttgaaaacacacataggtgtacagggtacaaatgagattttcatacagaaagtgaagaaaacgcaggattaaccggattggtcattcaagaacagtgatcactccggatgatccaactctctttttcctcagatggaagagaggcagtataagtcgaaagtttatcgagcaattctgagggtgaccagatatcaagatcgccttctactcgggaggatcgatggcagaccttcgcatgacgcctattaagtaacgaaatcgaaatgatagcaaatggcgacagaatcagctttttgttgggtatgattctgatcgttttcttttttgtttagttaaacgtaccaccaaaagatctcgggaacttgaacagtcacatcctgttataccacaataaatatcagatgcttgaacagctacaacaaaaatggacagtgatctcaccttgacaccttctacgggtatccatcctttgcatttgtctaaaacgagttaaaggtttacagacataaattttacacaaaatatgctgatatcagcttcattttgttctgaaacacaatgttggcaaagaaaatagctgacggcatagcccttcggtgatattcgacttctcatcgggtcttttgagatgtcgttgagatgtccggaatctaagcagatacattcacagagcggcacacgaagtggaatattagcctgtttcagcgtgaaacaagaagacagaattgcccacgcacttgattggaggagagaacggaagtccggttaccggcgatattccgtgagcaaagaggagatgatagctttttgaagtaatggaataatttcacatcgtcagctgcaatgtggaaacagaacacaagattagcgcatgcttacttgtatgctgacacctgatggtatgcgaaacacaaaaggaggctgatgttcagggcaatttttgactcttatcaatcagcttcttttcaacctgaccttggttttgagagcgactagatcctctccatcctccacgcaaatcggacaaacaccgaatttcttgctggtttttgtggacaaaacatacagtcaaataagaatatgtttttccttcaaaattatacaaacgtaccttccaagaccctgaacccatcgaggtgtataaagatccaacatcccacgtggaaggaaattgaaggtagctgaccgagacataggcgcgctaggtgttgggacaggaagaccgagattcttacacgtttcagcgggaagagcggaaggaacagtgactgaggttacaaaagcagatgtagctcagctgttgttcttagccttcagatcgacgagcagcgggaagggagaaaggactcacattgtcgatacattgctttgaactcatccctgatttccaatccgggagggaatgttctgaaagttcttgatttagaggtacgttgaactgacaaagagtctaacgatggattatatggtgacgatggtggggatgatgtataggcctcgttttctggctcgggagaaggggacaaagatgaaagtctagaagatattggtgaagatgaagctcggagctcagttcttggagtcgaaactttagtgggagtagtgtctacgtcagacaactggcgggctgtatgtaaaaatcctgaggtttgattctcaggtgtagaatcggacggatctggccccaaacgggccgaagaactacggacatgcgaggtgagtctcattacagggacgtgtttttcggcagctcggcttcggagatgtggaagcctgtatggggaaaagcgagaggttcgaagtggccgatattcagaagaagaaaagacgtcgtcggcacgtctgataggtctcaacgatctccttgtaacgttcgatgtggacaagatccagtgtttctgtgcactgattcctggagatgaacatgggacgctggaagagaggggtggcagaaaattgctctcttgtggggatgacatggacgaaactgagtcacatggcgaagctaagtctgactctctgcttcggaggtttcgagttccagatggactgggctcggatcgctttctctttcccagacaatgtgtgctgacaggggtttgaggccgtttgagtgcgaataccggtaggtgttgctgttcactagagtcgttcgatgaaggctgcgacgtttgaggggaaggcaggtgcttttgtttgcaaggaggtgtttgagaagctctccatcggtctcccatagccaaaagagcatgtcgttttcctcgagtgatatctagattagatagggttctggtggcagcgcttaagacaacgtcaggatcttcatcaacttccaaaatcggcgcatgctcatggttactgtaacgtgaattaatgtgtcccaatggatactttcggatgatattaggtgtagtcgtttgaagttcagcctccttctttgggttggaaagctttagaatgattcgcttttgtctcggaggaggactatttattggagaagagggaccttgacgatacagagaagggcttgaaaggatgggatttgactgtctgcgagagattgatggcaaaggaatagtgaatgaatgtttggttttttccatggcaggtgattcatataattcgtgtggagaacgatttttttccaaggatgtgactttgtcctagatgacaggtgaaaatccaaagtttcttcttttaggccatccaggcacagggatctatgcgcggtaataccatgagaattcaaacgtacttgaaaagatacagggaagaccatgtttgttgcgacgcactcggtcgtatcccaatccagatgctgcttccaatggccctcaccttgagaaaacccaacatcagcccaagcagatcctggttcagaattctgctcccgactcgacgggctgagtggcgctattcttccgcctgtgtctcgtccattgcctcgagttcgatcgaaaccggacacgccgactcgctcacttcgaggggatgagccctgtggaaatggggagagattgaggtatcgaaacgggtctgaaggatatcgcgttataggggctggagaatgcaaaacttcgccgggagaactaggatttggagtttgataaggagctgatgtgtcaaacagatacatcttgggtagaggaaaaagaggacggtttagatcaaacagatcacttttcaaaagagaaggaatgaggaaagaatgggtgcacaagataaaaggctcagatagaaaagtagatggcgaccaagagacgaaaagagaccagatgaagaaacgaaagaagaaagggaagaagagacaacgaagagacaatggagagatggctctttttcctgtcagtcagtcaatcaatcaggcacacggtcgaccgtcactcaggaacgagagatgctctgtcagcccctgaattgacctttgatcagccgaagcagccttgttcacttgaccgttcatcaagtggggtcaacttttgtcttcgagcatctcaagactaagatatcgaaacggattgacaagtcacacaatctgaaagaaggttcatagggttgataaatggaacgctcgtgaagatgaaaggatgatagttcgtggtcagttggcggtaatgaatatgaaaaaattaaggaaatcatcaaaatattcaatgcgctcatcaatctccaagcgtcccttccttatttctttctgacaacaaagattctctcatcatcaccatctttattcttgagtatgcagtcttcagattcgattcccggaccttccaaaccagaggctaagtcggtcatctactgtcaaggtatgctctttcattctcttttcttgtgatgtaacatactgatgtaaatttccgtaaaagtttgcacttggcctatcgagtactgcgaattttcgcctagttcctccaagtgtaagacctggcttcaagacaaccattctgatttgttcgaaagatactactctgctggtacgtttaatttctcacttccagatcccctgagctacaaatccaagtttgatctcatgtgatttgggcttattgaaacacttctcaaaaaaacttcagatgcattgcagaagaaaatgggtacactttcggtagagggtgaaaagaagttggagcaggacgtggagaagcaagagaagaaggcgagaaaaaaggccgagaaagaagaagagaataagaaggtccgtccgcgctcttcagtccaagttctctgtatagcatgctgaatacgcaacccttacatctggtaaatgatcaaacaggctcttaaggtgggttcttatacaactagttataatgttgcctctctttgttggctatctcacccaaacctcttactttctccatctttgtcttgatcatttctccaggtcactatcaagcgaattgaaagaaataagcggaagtacgtgaccaccgtccagggtcttgagttctttggtaagtagagtacttctcgtagttctgttcttcactcttccttctttctcacaccacctcattgggtcacaggcattgacctcaagaaggccgccaagctgtttgcacaaaagtttgctactggatcaagtgtgaccaagaacccgcagggacaggatgacattactgttcagggtgacgtgacggaagagattgtcagttctttttatttatatgtcttgatggtctttgtcataccattttactaaaacacctgtttctctccttctctttcgattaccaacctttctcgcatacaacacacagtctgatattttgacatctccctctggcaaagaggccgcgatctttggaaaagatggtcttcctgaaaagtcgatttcaaaagtcgaagagaagccaaagaaaaaggctgaagtggttatttaaaagcttccatgacggtcatggcttcaaaactgtcaatcttcatggcagagttgagaatgcgtagataaaaatgatgtggatgactcgctcgatgacaaaacttcaaagaattcgagttcataagttattacagacacgtggctggcccacaaggcggagtgtattgccttcccccagagaatgctgcatacgttcagtctctgggcttaccgaagcagctagagatctgtcttttgctgaggcaagatctctccttgtttgagctgttcaagctcaataccgagatgaaagagaacggcccaatggttggtgatatagacttcccaacaacagggataatgaccttcgctacaagaaattcaggcgcattgaagacctctagtacgtgatactcatatttgagcatcacatgatatcttaccaatcctctctcctttattgttatttcatagtgaacaactaggagaattgggatacttcttgaagcggctgactaagcaataagccgagccgcatgccgaggcatggccgaatccacagaagatgaccgattgggggaacctagcctcaaatatataaagctactcaatctgaggatcaaacttcttgccttctcatcccttcgaatctacttcgcgccatagcaagtgaactaaatctaacacaaatatcaatatgtctttcagcgtgcttcagatcgttatcgatcatcccggacggtcggctggactcgctttgggtctcatcggcttggccgtgttcgtcgactggttccatctggctcctcgaagatcgcctctgtacaacttaccaggttcgacctgtcgtctgtggccgagatagcgctgactgtgaccgctcgagactgactgcctgcctgccttgtctcttgtcggatgctctccgacttgtcgtcttgtcatgagcaaacaggtccgaggctagagagctatctctatgggaacgcgaaggacatcatcaagtgagcttggcgatcagccaatcacttgctgcccataccatatggcctgataccgggcggcgatagctattgatgtgtgctgacgtgttgtgctgacgtgttgtggtgtctgttgtgatgtctgttgtggtgaacaggctagaagtaggcgtcgcacatagccatctggaggcggtctatggaccgacgtttgtgtacaggggtatgctcggccagcctaggctgtactctgctgatccgaaggtgttcaaccagtgcgctctctctgtgactgctgaggcggtggtccgactgctagtggctggttgctgactgtcgacttctggttgctgactgctgtccactgtttactgtccactgcctgctgtccactgtctgacgacggacgatggctggatgtggtgaacggaatagtctgatgagccaggcgtacgactatccgaagccttggcacatccgaaaggtcttgggctccatcgtcggtgatggactgc

SEQ ID NO: 1555 - DNA, 8247 bp, Xanthophyllomyces dendrorhous
  misc_feature (1874)..(1883): n is a, c, g, or t
gagctctgagggtcagtccgtgctctcttgtgagactggcagcgctctcggctctgcctggtcgagcgctcggtggggaggagagaagctgatgctatccgctcttgctttgcgtgctttgtccccacaggcgagacccatcgacggcagcgccggatcatccttcctgcgttctctgcccaggcgatccgggagctctttccgatctttcttgacaaggcgatggagctgacggagaagatgacggaggaggcggcgaagaaggacgggccgacggacggatccgaggcggaaggagaaaaggctgggccgtcgaggctggtatctgaaggggtggatgtgatgttctggatcgtacgtatcgatctttgtctgatgttgcttctctgtctcgactgatgaactgatgaacggactgatgaacggatgggcctgtctgtagggccgcgcgatgctggatgtcatcggtctggccggtgagtgcacgcttgatgttccgctccatatgttctgccgctagagacgacgccggacaggacactgaccccgacgatggctgtctcacgatgtgctgccgatcccatgatgcaccgtctgtctagggttcgactacgactttgactcgatcgagaaagagtcgaacgagctttctatcgcttacaagacgatgtttgacggcctgtctggacagtcgacactaggcgtccttcaggatctgtttcctgtgctaaactacatcgtacgttttgtcccatctcagaggcatctctgccgggctctgtctgactgtgtttagctgagtctggctgagtctggctgagtctggctgagtctggctgagtctggctgagtctggctgagtctggctgagtctggctgagccaagctctcccggggctggatctgtcgtgatgggtgtccgtccactgtatgtgcacgatgctgaccggtgttccatgtgactggctttgatgtagagaaccgagcgtcaggccatccgagaacgagcgatgatgactgtgaaccgttatggaagggtctgtctctttgctgtctctgtctgagtcttggtgtgttctatcgatctcatgtgtgctgtttatgtgtgctgttcatacacacatgtctatctctggacgtctgtctgacggtcgacacaggacatcctcgctcggaagaagaaagccgttctcgatctctcggttggtgtcgatggcgggaagggccttgggaaagcagacgtccaggggaaggacatcttgagctctctaggtctgtccgcatggggtgtttgtgtgatgttcgtgaggtgttatgtgcctccttccgagcgagctgacctcttctctgtctcttctctgtgtcttccttgtgtcttccttgtgtcttccttgtgtcttctttctgctcggctttcctttctgtcgctggcacctgtagtacgggcgaacatggctaccgatctggctgagcagaaccgactgggtgatgaggaagtgctcgcgcagatctctacgctcctcctagctgggtttgagtacgtcctatgctggtgtcttgtgatatctcgttctcatggtcaagtacatacgctcacacctacacgcccataccggtacactcgctggtggatctctttacttctcttgcatcttaggacatcttcgactgctctgacctggatgctccactcgttgtcgactcggccagagatacaaaacaagctgagggatgaactgctcaaggtggagacgagcgagcctagtctgtatggtctctgtgtctatctgatcgtgatgtgaggacgtagcgggatgctggtcggagctagccgtcggtctggaccgactgatcaagacgctcactcacccacnnnnnnnnnnccactcccttccttagtcgtctactacctcagtcattcactaactcactcgtttactaccttactcctatgctcgctcatccgcccggccgatggtctttctcgtgtgcagagacgagctgaacgctctgccatacctggatgcggtaagtgatctaccgagtgcgcctggtggcatgtgtgacgagctgagctcatctgtctgtgttcttctgcgctcatcgtcgttcgtcttcgtcgttcggtctgtctagtttgtgaaagagagtcttcgtttcaccccgcccgctccgggcacgatgcgagtggccgccaaagacgatgtacgtgtgtctgctgtgtctgctgtgtctgctgtgtctgctgtgtccccggtttctctgacagactgacgaatgcaactgatcggttcggtctttccacggtctgtgctcacttggcctagatcatctctctgagcgagcccatcaagggccgggatggcaagctgatgacagagatatatgtgccaaaggggacgacgatgtttgtccgtgagtagagcagccgtccgctggatgtacacgctgtccgtctggctgatgagatatgtgtggatttgtcgtgcgtcggacacagcgatcatgcgtatcaaccgtgccgctcatatgtacggcaaggatgatgctgacatcttcaggtcagtcggggctttctctgttgcgactcagcctggtctggtctggtctggtctggtctggtctggtctggtctggtctggtctggtctggtctggtctggtctggtctggtctggtctggtctggtctttcctagcctggcttggatcgccgtgtctcagtgtcgaggcgttgacctgttgctaatctcttggctcgtcgtgggaaacgctctagaccggaacgatggctagagccgatgccacgatcggtgatggaccttgatgtgccctatggtcaccaagcgacgtgtgagtacagagcctgctctgtctgtcgtggcgtcttttgactgtcgctgatgagcgctgacatcgctgccggtcgaccgggtcctactagtcctgggaggtcctcggggatgcatgtgagtccagtcggtcagatgaggtgggctacatgggccgtaggccgtatgggctgtacgagctgacgcgcgctctgtttcttctgtcctcgaagcggctaccggtttgctcttgctgagatcaaggcgtttctgtttgtcatcctccgccagttgacgttcgagagcgtcgtcccggcgatcgactatgagcatcgggcaaacatggtacaaagaccgagggtgaagggcaagaaggaggaagggttccatatgaagctccaagtgcgatcggtcaaggactgaggaagcggactgtgttgcctgccgctatcttatgctatgttatcgagtcatcattgtctttgcgcttatatcactcgaaacccatgagcgtccctggctctgtgtgttagatttcattacttcatctcagcttgtcactttccgactggccgcccatgctttcgccctctccctcctcctcctcttagcttcttcttctgctgccgaatctttatcctcttctcctattcggaccttgtcctccttactgctctcatctaaggaccgaatttcgtcattttccctcatctttccaggtcccttcctctcagatcctgatgatgacgcgtcgctatcatcgtcttcatcacttccatacccacccaacaaccctagtcctcctttgctgacaccatcaacagacacaacaggaggagggggctttttggctgccgctttgaatgcctcccatcgtttacgccaacgtcctctgaagaaagcgaaacgaggatctgagccgtggttggtaagaatccgaagttcgagcacattaggattcggagatgcctgaagcgactttgatgtgtgttccatcaggattgctatcgattctggaggctttttgtatgatgaaggaggatggacagacatcgacaaagacgataggatgagggaccgaaggctcaaatgagagatagaggagcttcttacctcttcatcgctcagaccccaaacatcttctatttgaccctcaagaagtccatccttcttccgttcatcttccagagcagccaaccgaccacccctgagtgcgtcgagctttcgtctcttcttatcatgttcatagttttcaccttctgaaccagagaagaagaaagtatcttctgcatcggacggcaggtctgaccaaccggctgttgaagatgatgctgagggggaggagggtggtcgtggttgggaggatgaggagtgaaaggcgggaaggatatggagataagaaaacctataatggaagaagggttgtggatgacaaggatcgaatgaattggtcaagagcgagaaccaatgtcagtcaaaagtcgacatctgtgcaatgaggtagaagaaggagtacgtcaaagcccattcttttgactgaagacgggtgaaggtcagtagggttcttgtatcccttcatattagattgttgcacatcttcatttccagaaacaacccttctagtgatacaggaacgccatcatctatatcatcgagagagagaaataactgaaccaaaccgaagagcaagaagaaggcaagaccgtacctgtcagcccatattccctcgtccgaagcagccgcttcatctatgagaaccttcagaagcttgccagtagaccgaccctgtgggtcgaccacctggcgggcgtcgacatcacgcgctagagctggattgtttaatatctcggcctcatatccctgaatggatagctcgttcaactcatttgatctgtcgggggaggaaggaggagaagacgaccggtgtctatgggttgaagggttgtagactgggtattgaggatgagaagatgtagacggtgtgtgttcggtctgcgcctggtgaagtctatcctgaacttgacgcttcgtccgtttctttgaaatctttgctcgtgaaaccatccagccagagagtatgtgagtgtgcacgaccgtatgaacgtaagtgtcagtggatggcaaaggtgagtctatggggaaggttgaaggtgaaacgatgctaacaactttgctagggttaaatagcaagatccatgccgtcctgcttgtctaggatcagtagtcactctaacactaactgttctatcgtgttctgttctctactcaaacgacagggtgaagaggctgacgaacggagttcaactctaggcatgcttcaaacatgttgttttgtatgcttataactactcagctagctgtatatgctgttggcttgtagacttgagtagctaacgatctgacgtaatcgtgcagtctctttcagctttttggttcttttgtcttgttcaaacatagaacaaaaggaacatccgatcaaacatcttgcattcattagataactcagtgtttgtcggatgcctcttttgtgtctttgagtatgtgctctttgtggggaacaaaagaacgccgagaatggaatctctattcaggattcttgacttgatttcatcgacaacctaccaccatcatcaccatcactacttctctagttgaactctataacgtgcgccatgggatctgactgggatcccttaaagtctgggcccattccggagccttcctcaatatttctcacctcgctctggtccaagcatgatctggataccattcacgagaaacccaatggagagctattatcaccaccgttatcggccagacctagaatcagcccggacgccccgcctgcaatagaatggacatccccaaagccaggggtttctcttctgtacaagtattgttccagttgggactatctgctcctaattactccagccgtcattttatccgcagcctcgggtgttctcacgccgttcatgacagtcatcatcggttcttccttcaacgcctttgcttccttccctaccgaccatgctttttcgacaaaggccgagagagatcagctcaagagcgacatctccaaagcctcatttatactggtcgggatgggcgttggcttcatcctcttgaatgcgctgatggcagggttatggattatcataggagaacgaatggcccgtcgattaagaaatgaagttttcacaaagatcggctccagagacatgacctggtttgatcttggaatgggtgtccatgatggtggcgacgagaacgtcaagggaaaccaggaagccatcggcgctgctggtctcatggcgaagtttacgaggtgcactcgttttctttctttctcaggtatagaggcctccgcttatatcaactttgtgcgcttatcatcaaatcagagaaacagatgaggtccgaattgctacttctcaaaacgttggacttgttgtcggagacgttttcactatcatcacctctctcatccttgctctcatgaaatcttggaatctcaccctcgtcatcctgtctgccgtaccggtggtcattatttgtcaaggcgtcgttcaacacatctcctttcccttactctcaagtgagcgccgaatttttgctgccgcctcgacaagatcagaacgagcaacatcatctattgcgaccgtcaaggcattcaatgccgagaagaaagaagccgacgacttcttcagcgtcatcaacaatggcaaaaaggtcactgctcgaatcatcttcgtctgggggactaatcttggactctcggcctttgttctaaacaccatgtttgtcgccgggttctggtacggatcagaacttgttcgtcaaggaggaatccaatctggggacgttattaccgtcttttttgccacagtccttgcctcgagcagtcttcaaactatcatgcccaggttcgagtccatccaaaaaggtatgggcgccatggtttctctccaggtgcttataaatcctccaccaatacagtcaaaactcgtgaacggagacatcgttagcagtatatacagccaaggctcagcagatagatcttccatgatctcttcagccctcccttctgcttcgtactctatcatggctaacgctcgacctatccctggccggagaagacaccggagaactgccacgcttactcagatccgtccggcaaaatgtcacggagaattcattctgcgacacgtctcattcttctatccctctcgacctcaatcccttgccttgtcggacgtaacactctttctgccctcgggtgaattcacattcattgtgggtggctctggatctggaaaatccactatcgctcagcttcttcttcagttgtacaaaccgacaggggggtcaatccatatggacgatcaagataccaacgtactcgaccccggttggatgagagagaatattgcttcagtccaacagggctgcgtgttgtttgacctgactgtacacgagaacgtcgctatcggtctagcaggttcaaagtcgagacgaccagaagatgccactagagaggaggttatcgaggcctgtagaagagcgctcattcatgaatttataaccgatctcccagatggatatgatacaagactcgggacctcaggcgccagtttgagtggaggtcagaagcaacgtatagcgatcgctcgagccgtgttgagggatccccctgttttgatacttggcatgtctgttcatccattctgtttctttttgttctgtctgctgacaaaatatgctttggctcttgcgaacttctgctttccactgtcactcacctagacgaggccacttctgccctcgatcttactgccagagttctcgtgttcgaggcaatccgttcctggcgaaagaaccgaacaactattgtaattacacacgacctatctcagatcgaaccagataattttgtgtatgtcgtccagaatggttccgttgtcgaagaaggcttccgatcagatctcgaccggtcgaatcaagctttcagcaaaatgttacatgaacagcagaaagcgccattatggacggggccagacgagattgatgaatgggatgacccagagaatgtgatggatgtccttcaagccacaacaactgagcaagagactccgttcactggtttcaacataactggagccattcagccgatcccgggcaccatcaaacgtcagacttatcaacaaggcgcatatcttgacattattgccgattatacggataagcctcgattgacccggcagttctcttctttgatttccaacggcggtcccttgaattgtgaccaccgtcaatcaagcaataacctccctattgaaggtgttctcaatttcccagatggtctcaggaaagtttcaccgtctggtaactctttctccaatagagtcagagatacta

SEQ ID NO: 1556 - DNA, 3086 bp, Xanthophyllomyces dendrorhous
atacattcccggatgagttttccattccggctgttgaaccaaccgtgttttcaccttcgggttcatgcgatgagacaatttcgtgggctcatcaagaaacaccttatccgacgagagctatcaacaagtaccctcaacatccgtcccttaaccgaatgaatggtcggctcaattcatttaaccttctggcaggagaatcaaccacagatctcgaacgtcagggtgagatcgccactcgtggtcgggccggtttactctatcctggctctcggatcgaccgtcgacggaacaacctctattcttctggactccacgggccggacgacggcgctttgaagagcgaggtgataccggaaaagacccctgggatactcgccgtcatatggttatgtgtcaaatcttgccctctcaaaccccttcttgctctcggcttcgtcgcttctgtaggacaaggagcgatcacacctatctggtcgaactatctatccacattgatggcgctcgtcgctcaaggtggaggcaatcccagtaaactccaacgagactcgttggtcgttctaggtctttcggtggcaaacgggttgagcattggtttatccatgatcgcgctcgacattgtttccaatcagtgggcatgcgacatgagggacaaatgtttccgacagatcatggctcaacagaaatcatggtttgatcaaacggagaacagtccgtccgctctaagtcaaacgctcatcaaagacgcggatgacatgttggcgattgttagtgatattccaggaaagttcgtcacttctgttgtgatgataggcatgggtatcatttgggcggcgatcgtgggatggaagttaactttggtgggggtagccgtcattccagtgcttctggtatctgtgggtgtccaattcaagttattgaacaggattgaattgagaaataaacggacgagggaagaaatagcaaagatcttttatgaggtttgttctctcttacactcattcttcttcttacctcaattgagctgccaccttgctgacatcgctcggcatatgatttttctctcagacggtctccaacatccgtgctatcagagcaatgtcactcgagtctatcttcatcgaaaagttcaatatcgcactagagaatgcttacactaccggtcttaaaggggcttggatccaaggagttggaaacggattgatgaatggcttagtgtactttgtcgaaggtaaacgaaacttatcagttaagcctcacccattcatatctttcctgtttgcctgaccatgctatactttacaacattgtagccttactgttttacgtcatcgccgtcttcatgtgcgacggaagctacacctacgctactgctctccgagtcttctctctcgtcgtattctctttgacgtttggagctcaaatgctgtcttttcgtgcgtttggttactatatctatatattcatcctatgtcttgagtcagttgatcttatcttctttctcttggtctatatagtccccaccgtggccaaagcaaagcaagctgcacttgacttccagggacttgtcgctcgatcttctgcggtgaccgaagagggcaaaggaagccttcgaccaaagatcactggccaaattactttttctgatgtcagattcgcttatccgactcgaccagaagccgatgttctctctggtatctctttcgatatcgatcccggggaatgcgtagctatcgttggcgcttctggctctgggaaatcaactatcgccgcgcttcttcaaaagctgtacgaacccggcagtgggtcgattcatctggacagacacgctctagcagaagcagaggcaagatggatcagagaacatatttctatcgtttctcaaattcctgctttgtttgatatgacggtcaccgagaacgtcgcatacggaactcatcagctaccattttccgaggtcgagcgcgcatgcaaggcggctcaagttcacgatttcatccttagtcttccccaaggttacgaaacaaacctgggtgaaaacgcatcattgatatctggtggtcaggctcaacgactccagatcgctcgagcactcgtgaaacgagcggatatattgatactggatgaatgtacgtccgccctagattcggaaaatcaggcggcagtcctagagacgatcatgagagtcagaatggatcgaacggttatcatgatcactcacaagctaccggcgatgatggcgtgttcgaggatcctggttgttagaggcggtagcattgcagaagacgggacgtttgatgagctagtccggaagcgtggggtatttgcagaactcgccagaggcggagagtgggagtaatttcatcatttcatcatcatcattaatttatatatatcttgttctgtccgttttcttcatgtgtactatgggtttgctaggtttcgttccttttctcatatgattgattgagcctttctgtcatctctctgtcgactctctttatacaatgtcgtctttctatagagatgcgctacaataggcgtatgaaatcccttaacatccgctgatgctcatgatttttcctctccggtcgagagaaagaaagcatgtagaaaacagggatggtatatacgggacccagatgggaacataaacgaaacatgacaagagtgaaatatgtgaatgtgtcccgcgatgattgaccagaagtaggaggaaagggcaaggatgaagtgaatatagaggatgatacgggatgtagatgaacagtcaggaacaagaggtagatgggtagacaaggaataagaaaagagacaagaacaatgaccaaagcgacgaggccaccacgtctacttgccctttccagcgccagccggtcccttctttccttcgaacccacctctcgacttgtgtccaccgccgctcggcttgcttccacccttcttgtaatccttcttgtctcctttcggtttgattcccttcttggcattctttcgggcttccaggcgggacgagatgttttctgatcgtttcttttgtttgatagcttgagttgtcttgagtttttcttttcggtcggacctgtttc

SEQ ID NO: 1557 - DNA, 5319 bp, Xanthophyllomyces dendrorhous
ggaattgatttcatatcaatttcaatgaacaacgagagaatgagataaaaaatccaaaactcaccactcgccagcacttttgctcttctccttctccttgcgcttaacggccttcttgagtctactctcatcgtccctgactttaccgccctcagctctctccaccgcgacatcccatctggcggactcttccttttgtgctctgacgtctgccggaagatcggcaagtttggcctttgcagccgtaaggacggacagtgcctgggtggggttagaaggcaacggcttggactttcgaccaccactgacggtgcttccaaaagtcgacggaagtttgaactgcgagaacgacacagaggatgcaggagcggtcggcttgatatctgggaccaagagttgggtctgtggtgttaagtataaatcgatatgagtatcgtttggtatatacactcaattttaaagggtacaaagaaggaaattaacgagacagacacacacctttccgggcttgaccgacggatctgcattcttcttcccttcggctgtcttacccttcttgacagcggccggagcttcttccttcctcctttcctcctttcttgcctttcgtctgttatctctcaatgctcctctcctcgccctagcttcctccaaaagttgctccttgctagcgacttcatcacctccgtcttctcctccaccagaagcccttgcagcgagaggatcagagtttggacctgtgcgctgaggctgccgtcggttctgcatggatgcaattcgggcggtgagtttctctcgaagggttgataccgaggttggagcgatcggacgaagggtggagggatcgaagggagcagcgtctatctgaggagagtccacagtagacgaggtgatttcagcaccgggcgcctgagaagcaaggatttctggaagagacaggttgtttgccgggtcaagctggaaaaagtttagacgagtgaaggtatggaacaaaagcattaaatatgacctttagtttgaaataccggacaagccccaacacatgcactttaaagacaacaaacgcaccttgtccttcttggccttcttgcttctctccttgagctcttgtttaggaagagcgctttttcgcttgttcttcatgtatttgttatcatgctgttccggtcgtacaatcatgccgtccggacaaaatgatgcgtgtaagtaaaatgtggttgaggtcataagtatacagaaacgggaaaggaggttgatgtacctcttcgtcggtcttttcttccctgatgtagtgtttggcaggaatcaagctgaggagttgctcaaaagccgagttatgagcctcgagtgaggcgagaagtgtagcagccatcgatggcaggtgtgggagcaaggatctgggaggacaaagtgtacgaagtgaacgtccgaagttttacgccgacctagatccttctgggaaaggaatttttcgattctgcgttcgctccttgttactctggctgtgcacggatgtacacgttcgttcagagcgattatgcacgtgacaaattggccacaaatcatcctcaatcaattaaataccgccaaaacacttgcttcgtcacaacagcaacaagagcatataaaattcagacgaatataaactaaggaaacccatgtacttgagagagagagtgcatcgagagctgtagtcaaagtcaagagcagatcaaacacggtactgggcgacgacagtatattctgtacatcgggtatgggcatcatcaatctaagtttcattccgtcttatgtcttcatgtcttacatcgactctctcaccagaacagtccaactatacatatcgctgcataaccaagactccgggagaaagagaagaatgtacgcgcaaaatagggactatcccttgatggtcttggttacaacgagtgtaacctatctttgttaacatacccgtgaccaattcgcggttcctcttcctcagcctatgggcttctgtttctttcggtatacatcctaacctttccatcttaagactcaaacaaccattgggagagaaaggtcgattgatatcttctatcatctttcttcatagtatacacacatacacacacatacacacacatatacctgaatacgctcatccatccacccacctacccgttgataatgcttcgatcaaggtcgcacaatattctcagacggtcgttcgatccatctttcagtccagccaggcttttctcttcttctctcatccgtaaggcagatgtgacattgacgatcgatggaatcagtgtacgtattcatttcggtattttgtgttcttactactggaaattcctccttgatactgatactcactcttgacatactcatatcacttaggtcaccgttcctcaaggtgcgatcagccaccccacgggggaagagtgaccatctcttcccctttcaaagaaacgcttcttactggtcgaagaatcagccagccctgactctcctttcttcctctcttcccttttcgatcttcgtatcctgaaacactcaggttctactatccttcaagctgccgaggctgctggaacaaccattcctcgtttctgttaccatggtaagcagttgattcttttcttctatctgtggtaacgcgatcagaacgaagcaaagagaaacgcgacgctatcgatccagcgatttttgtccatcacgatctggccatactcacaccttcccttctgtaatctacctcacgatcacagatcgactatctattgctggtaactgccggtacgttttggtcctatgaaaccgtctttgctgtgcatctcctacggaggactcggtaattttcccgatgtctaatctcaagctaaactcttgctttccgtctatccctccctgacactgatttacagaatgtgtctcgttgaggtcaagccaggccctcctaagcctcaagcctcctgtgccatgcccgctctcaacggccagcaggtcttcaccaacaccaacactgttcacaaggcccggttagttccgatctttctgccctctcacatgtgcatctcccactcactaacctcgttcgccttcgtctatctcgtccgtcctgttgttatacgccatcagagagggtgtcatggagttcctactcgctaaccatccgctagattgccctgtatgcgatcagggtggagagtgtgatctccaggatcaatcgatgcgttatggatcggatcgaacaaggattcatgagatcaccggaaagcgagcggttgagaacaaggatcttggacctctagtcaagacttgtacgcctccttttgtctgttcctctcttcacattggttcgctgattgactaatcaatattactaataaacagccatgaacagatgtattcagtgcactcgatgcgtaaggttcgccaatgaggtggccggagtggaagaccttggaacaactggtcgaggaaacgacctgcaaattggaatgtatgttgagaaggtcatggattctgagatgtctgggaacatcatcgacctttgccgtaagtgacgttcctttgcccgatactctcccgcccccctctgttgggctcgaattgaccttttgctttctctttacttctatacactgccatacactttcaatcacaacctgatctcagccgttggagctcttacttccaagccatactctttccaatctcgaccttgggaactcaaaaagaccgagtctgtggatgtgctcgatgctgttggatcaaacatccggattgattctcgaggtgtccaggtgatgcgcgttcagcctagaatcaacgatgaagttaatgaagagtggatcaacgacaagactcgatatgccaatgatggccttcgcttccagcgattgaccatccctttgatcaagcgaggcgataggttcgaacctgctggttgggctgacgccctacaggccgtcagcgagggcctggaacgaagcggagccaaaggtgatgagatcaaggctgttgctggacatctggccgacaccgaatcggtaagtgctagtcatgtgtgttgcctgccatgatcgacctgtttatcatcctgatcacattgttatgtttagatggtcgccctcaaggatctgttgaaccgactggggtctgagaatctcaccctcgatcagcccctcggagaccaacctcctgtccatggagtagacatccgatcaaactatttatttaacagtacgatcgctgagctcgataacgccgatgccgttctctttgttggcacgaaccctcgacacgaggccgctatcatcaacacccgattgcgaaaatcatacctgcacaatcccgtcacatttggactgatcgggcctaaggtcgatttgacttatgagtacgagcacattggagagtctactgtcgatctggtcaaattcctcggttctgcggcgaatgacaaggatgccgggtttaagtcgctctttggaaaggccaaaaaacctttgatcatcctgggaagtggaatcgccgagatggacggtggatcggctgtctatgaggcaatcggagcgttcgttggaaagaacaaggatagattcgtgaccgacgagtggaagggagtctctgtcttgcaaagagtcagtctcattctttctttttttcctctacctcagtctcttcatctgagcggaaattgattggtagtgtttctcttttcatgatacccttataggctgcctcccgagcggctgcttacgatatgggtttcaccccgacaactgctgcttccaaggtgacccctaagttcgtctacctccttaacgcggacgagatcgacggatcatccatcccgaaggatgctttcgttgtgtaccaaggccaccatggagacgttggagctcagttcgcagatgtctgcttgcctggtgctgcctacacagaaaaagcaacgacctgggtaaacaccgaaggaagggctcagcttggtagagctgctgtacctcctccaggcgcgtctagggaggattggaagatcattcgagcaatctctgaggtcgttggttctccccttccctacgaggatctgttagctcttcgggatcgaatgtgggatgtatcgcccaccttggtcagatatgactatgtcgagcgaccatcaaacgaaatctcccaccttggatttgccgatctggcaaagcggctgaaaggaagcaagactcaggccggacagaactttgagttgcccgtcaaaaacttttatatgaccgacgtcgtttccagaagctcggtgactatggctcaatgtagccgagcgttccatga

SEQ ID NO: 1558 - DNA, 38487 bp, Xanthophyllomyces dendrorhous
ttccatgacaagtcgtaccaaatctcgctggaccctgatgccgagcagcgaggttcttctcacactgctcaaccccacgcttgagcgggcgtctccttcagatgaatctctcatctctacacttctcgaactactcttctactcttgttgcctttgaatatttgcccgttgtaaacttctttcttctgtttgtcttccactgttcttgatattcgtttgtaactcttcttcttttgtgattatactttgttgtcattctttcctgtttatctcatattgttctttgatttatcttgtaaaatcaagacagacgtttcatgttcctcatcatctcatcggctgctctcttttgtctgatcggttgagaaagaactatgtaacgatctcatgatatacatctgtgttgcgcaaactgtttggaagttttggatattatgcggaaccgaaagtgaaacatactcggcacgtggctttcctcattttcatataatctcgtttaggtttatcatcatcgtcatctctcatctcatcataccatcgaagaagaggcatcttgctaaacaacacacttgatcgacctttcccaggccgaaaccaatcagtcactgtgtctcgactcaaatcacttgacgagcaggatatgctcctcacggcgtcatcttcttccccatcgccaataatatcaacgccgctacggaaatcatcggctcaagttctggtagaacaagaaccttcatcaccaggcacatcatcagtggatgaggaaagggatgcaagcgacttgaagataacaacagcaacatggtcggggaaaaaacaactcttggcttggtggagttattcatttgcagctgaatgtttcgcagctgtcgccatggtatgtatacattctcatgatatgttcgtgtctctatgtacagagccaactgatatgattttcggggtgtattcggatggaaagtcagtgttcatcccagttacactggaacaatccgcacgggaagcagggttccaggctggagatccaacgaagccttgtgttcttcacttgaacaacaccgtctcagcaatggatgctgttatcgccttagaggaagcttcttgtaaagctaggttcttcggggttgttgatattgagcctgcttcgttcaggtctgttctttgctctttgccctatcatatactcctttcaacagaagctgacgagttgcgcattgatacagcctctacacatactctttcgcagcaatccttcaaacaatatccgtcatcaccatgggatccatagcgaatcatccttcccgccgaaaacttctgcttctctcttttgcagctctagggtccttgagctcgatgttgtttcccttgatctcgaatcctaacgctctcagcatactagctatactagctattgcttcctttgcttgttcgtgggtttgttcgaactcgtacataccggatttgggaatggcaggcccagaagtgataagagccagagagacgtgggaggaagagctaaggagggctcaggttgagagagaggagggtggagatctaggtaccggtttgatgatgcctgggctagaattctcaagaggggtcgagcctttgcgaggaccaactgatcggagacaggacctggtgggtcaaacgaagcgcatggtagaagaaagtgactcagagcacgagcaggagggtgaaggggaagaagagatggtctccgcgccgttattgcctgatcaggcactcatagcctcgatggaaactcaacgattatcaaccctccgcgcagattatctccggaccctatcaatctacgtttctcagatatcactcagaggaattgcgattggatacaccggcggcgtcctcgttcttatacctgcctttctcatagtcactgctttagatgggtcaacaagatcattgagattggcagttgggctttcgggagcactttggtgtttggccacaggaccagccgcggtctggttgggcacaattagagggtggaagaagaggggagaccgcggatggaaggacgaggttgtggaaggctggagaggattaggaagaatgatcagcattgaagagatcaaacggttaagaaacacgttttggttcctcttagcttggatgtttttgagcgatggtcagttgatcgtccagtcacaggaaaccggacaaagccattgaactcatatgctcatcaccgccgtttcttcattttgcgttatagcggccaccacattttcatcgaccgcgatcatgtatgtcagccgtctcgcttccgacggccctgatcttgtacactgattccatccatcttctctttgagacctttctagttttgccaaaacatcacttcacatgtcttcctcagcagtgacaatcgttgcttttctcgctcagataacaggtatcttcggtggtttatccgcacccttcatacaagctcgacttggttggacaaataaacgatgtctgatcatactagtctcattgatggcttgtttaccggtctatgggtgcctcggacttctgaatgggacaagagctgtgggaggaatcaggacaccaggggaaatgtatgtcgtagctacattgtttgggcttgtattcggtccagtgagttccattgcgctttaatttcttttcactctatctattctgtagcgcagcctgatgatagattaacaaaaaaaataacaaaaagtttcaaagttttgcaaggacggtgttttctgagatgatccctccgggtcaagaagcccgatggtttggtctgtactccataaccgataaatcctcttctttctttggggtaagtgcttctatctgttcttcctcggactttcaggccataacgctaatctgcctttgcctgactctcgatggttcgaaagcctttcgtggtaggactgatcgcagacgccacaggtgaaatccgatatggattcatctttctacttcttatcctgatcttacctctcccagtgctgatctaccgagtggacgttccagctggaagagaggatgctaagcagtataaccagcaccacgagtagtacaaacagatcgaacaaggaggcggtgtaatacactccttctgcatgttgtaaaatcgttactttgattaaatttcgaaatatatgacaatagagacagtctgtttatcttccttccatgttcgcttgttcaggagcagagaaaagagcgcacaaaagaggacagaggtcaaaaagcaaaagcttatctataatctagatcccaggagctgcgtccttcttacatgttcaatccagtagacagatcgcttgccaatctgtgaacaccaaccccaaatatacacgtacacgcgggagcgaacagaataaggagaaacaggcaaaggatagagatcagcattcaatctcgtaacgaattgaacacgatacctcccaacacgacgaccaatgctccgacgaccgtcactccggctagtggatacctgccttgcggttccaccgccggcgcctgcccttttacttcttttctcttcttcttcaacgacgacgatggcgacaatttggaggatgaagaggatgaaggggcaggcgctttattcgaccgaaggcttggcttggtgccggtcgggggcagttcagaagtaggtttgactaaccccatagtaacgaatctgtttgcatatgcgttcatcgttatcgtcgttgtagaaacaggggtaagcgacataaatagaattgtttgaacggtatcgacacatcaaaaagagaagacgagaatactgaccctctgatatagaaagcatgcaggttcgactcgatttctcgctcgtgtcctttcggaacaccatcaagagtaaacgtagctgtgaaatatagattgttatgtaacttttgtcaggcaaggtgacaaatacttaacaaatcaagaaggaacatccataccagtagtagaatcagatccctgatttaactcaatagtaagaacaccgagatgatcttggcgttcaggaagagtattcaataaagatatcagctaatcaactgaggcatgattgagcaaaagtggccaacgcacctttgggccaagtaggagaattcaaaccccagttgaggacaagtttcttaggtttgtcagccgaaacaacagttccattgacagaaccggagaacatcgagaaaggagcagagggagtggccgaaaattgagcagctgagcgagaccaggtgggaatctattcaacatttccgatcagatatgtattagcgactgatttggaaaagacttgtacggcagtaggatggtttctcgatgatatcggatcaacgaaccttgctctccacagtcagcaaatcccaaagatcggcagcgctgatcctcaagctggactccaccttgacaacgctcgtgttgatcttcttgactgcgccagtaacagacacaggctctgatttggacacgctggatactggagtggctggagttgatgccggcgcgctagcggcaggcgaaacgtccttactatcgacggcgaggagatcctttccgtgcacctcaactaaagtcgtttggaatgtcgcaaagacagtcttgagagcttcaggaaggatctttcgggtcgactggtaggctggggtagaagaactcgaagacgagaaatcgaacttttgtcgttgattttatcgttgtatgaaagtaggcatcaccagattgtgagccatcaatcctaaaaatatcgataggagaaggttgacatgttgataaacacccacaacgtagtccgagattccgtcaatagcctcgtgagacacctcagggattcgcacacttccagaaaggtcggttccgtcagccagtctgcctgaagttgtaagaacaatccgaaatgagaagcaatttcatgcaaatcagtcttgtttcaaaagggtcaacgcagtgtcgagatacgcctacctgccctgtgtaaaacaatcaaaccatatttatgaggtcaatttgagcagaaatataagaatgcgcatcaaaaatcaacttaccagtcaagcttcatgtcgagatcatagatggtgatgactctaaccacaataaataagattggtatcagtatctgaatccaccgaacgcacataattcagacgaaatacgcacttggactttcgctgaccgaccgtcacatcaccatcgatgctggatacgctagtgatagtgacttcgagtccaagactgtcatcagtagctttgacgtttgcaaggttagttcggaactagtagatttcgatatggtgggcaagatcccgcgacgatcagcaagtgcatatgcgtcgatagaccagttggagattgggaaactcagttgcgcagggaactcacccattcataagcccacttgtcgacattcttttgctatagaaagtctcatccgatatgaaagaataacatgaaagtcctttgagtacggtgcataaactgtatagcgatacgggcaaggcaccaattgattatgaacaggataattcaaatcttaccctccagtgccagttttttaggcctgcagagagctgagcgggttgagacatgactggctggggtttgagtgctgtcagaagctttcaaacaaatagaacagaagcaaactagtgcttatggaggagagaagtagagtaggaaatctagagagaagaggtagagatggtggtttggtcaaaaaaaaggagacaagagaaaagcggatttctttcgcgaacattcgaaagctgtgcagattcacgtgatcttcgattttgtaggaaatgtctctttctttacagtctataggtgatctgcagtggggatcatggaataatgatacatggagtagtagaataaagggatcaatgatgggcgatcttgaggggaaggttgaatgggaagaggataggaagctccttctttagtggtcgacaaaagaacaactgcgtccatgacagattgcaaagtaaaaggacaacgcaatggattcgatcctggtctcgacatatgatgccagataactcttcaagtttactttcgttttttgtctttcgacgaagaagctgatcgcagactatccgccccaaaccgcttcttgttcatctctcgttgtctcaataacttcttcgtccccttcaacaaagtcttctttccgctcttgtttttaggtcgttgaggggcaggaggaccttttggcttttccgaagcagtactcgccggaccatttgtaggagcaataaagggagtatcggatggaaagagggatagctcgttggttgcttgaggcgtctcgagcgcgaagtcatcctcaatgacagtcacaacggcgtgttgttcttctccatccgaaaattcctcttctaaaggctcagaagggaaggtggagggtcccgcctcggcattggcttgtgtggacaaggcaaacataacgtacggtcagctacatacaatttcatcgcgggtcagcaaaagacgagaattctcacaagatggctctagtccatatgcacgctcaacaatctccagattctcttgagctcttttttttctctcttgtcgaagctgtcaaggcgcaagtaagatatgtcataagtgccatggctcattgaaagtgatcgaaccaaatggaagaaaactcacttcacgcttttcctcccttctctcattcttctctcgttcgatcgccttctcacgctttgccgctatcttcgcctgctttcgcttgctgaaacctgtcaagaactcgctgtgtatattaatccggaggaacaagcacaagattagataaacatgcgactatggacaagaaagaatgcatagaagaacgaacgctcgagcttcatcatcgaacacgaccttctcaacctctgcctcctttccggcgtttcttctcttttttttaatatacgccgctccttctgacagcaatgacgcgttggatctctttgaaggtgccatgtcgatggatttatatgtgttggctgggtgaatgtgagccatttgggccaagaccagaagcggcaaatgtccaaatctcctaggaaatttgtggtcacgtgtgtggcgacttttaaaagcggtactgattcttcattttcttgcctagtctttctcaccaattcggataggctcaccatacttgcttctttcatctctcctgtttgaatcggatgagcaacactgtagacgcatctcgagcgggaatagcccggatcaagcccgagtctgttcaagattctttgtttgagtttcttttgagtagttctccagctaaatccatcttatctacttattttacccaggtttctcttgactcgaagttctgctcctgttgaagttccagatgatgacgctgctgagaacaccggcaaacaagctgggaagaggactcttcgagaagacggtactgagactctccaatctggtgaggaaggcggggagcgagacagcaagatggccagaggggaaaataacacgcggggtggtcgaggcggaaagaagaaggggggtcagaacaaaaaccgaaaattcaaaagtatgacggacgacattcaaatctgcaacaacatcgctgtggatagagagtgctcgtttggcgaaaggcaagttcctttttcataggttgatgtcgtctcacgcgtttgcaatatcttaatcttcaactttgtcaatcccacgaatattgtgggctcaaattcaaacagttgccgaaggtcccataacttaccgctataccttgctagcaagcctgctgatctagtctttcctgagatgagctacgttgaaacgtcttctccattcctcagcatcccggacaatgccacgatctactgtcctacattcaacgagctcgggttttgccctcaaggctacaagtgtcggttcttgaaggctcacatcaccaagcccgcgctctcgcctactgctgagaaaacaaccgaaactttgaacgcagagacagagagtttggaggagaaatttgtaggcaagcttgtatttgatgaggaacgtaaaacccaaaccgaacaggaaggaggaaagtggagggagaagaactggatcagacccgatttacaatcgcaactgagaagcaatgctgttcgtcctctgttcaacatctcttccgaagcattcatggaggagaatgacagtctcattcaaatctgcaacgtcttgtactatgtgactctaatgcttgatcgaaaccttagtatcctttccctatctccgaggcctacctgtccaccctcgaaggagaccacaagcttccaaagccaaagaaggggaaagtcaatatttccatccctgcgcccgcccagagcgaggaagaggctatgaacggcaacaacgaggagactgctacggaacaagagagcagaattgaagctgataaggacttagtggatgttcccgatcgaccgcaggagaaaagaagactagactggacgggcaaaacttacttggtcagttcatccgacttttgctattctgaagtttgcactttccttgagacgtcaactaattccatcagtcctggctgtctgtgaaccatctgtcttcttaggcccctctgactacgactggcaatcttcctttcaggcgactctgcgtctctctgggagcggatataacatgtagtgagatggttcgttatgacaacgcatctcacgatctgagtatagaacgaacgttctgtcagcttatctcaagtcaacatgtttcttgatagggtcttgcaacttccttcctggatggaggaaagggtgaatgggcactcactagacgacacaactctgaaaagatgtttggtctgcaagtttgcggtagtaaggtcagtttttccatatgcctttcatgaacaaacacatatccttgctgatagaatcatacttctatctgtgtgacagcctgttcaattggtccctactgcggtgcgtttcatcctcggtctaccgactgtttgaccaaattcacgtttcattattgtatccgtggcttatgtattatactttcatggctcttataggaagtccttgccaaagagtgcccagacgtagactttgtcgacgtcaatcttgggtgtcctatcgacctagttttcaacaagggagcaggtgagactgtcatcctcctgaatcctcatctatcatcgatgaaatttctatctatctaactaacggcatcaattttcctctggtcatacaggaagcgctcttttcgaaaagcctaccaagttgggacagatactagtggggatgagcaaagctctcggatctatccctcttacggtcaagatggtttgttttcactgtcatgcttctcccaatcttgacttacttgaaactgaatgatatatacattctgtgaacagagaactggtatcaaggataacaagaacacagctcacaacatgatccctagatttgctaccgagtggggtgttagtgccatgactgtgagtttactaattttgattcaaagcacaggatcatcggcagtactgatattttctgtccaatcgaagcttcacgggcgatctcgacaacaacgatagtatgttacagcttaacatgctttaatagtttgactattgagagcaatgaaaacttattcggatgaggaactgtataacatctttaaagctcgaaattggccgattggtcttatatcaaggattgcaccgagacgctccggcaatctgtcgccgacgcgaactgtacgtttctccccgcatatcatttacccgactattagttgtatcgcgtgcttgagatctcaacgagttgactcattttgttttggatctatacctttataaactcatatagtgccacccattccgatctttggaaatggagactgctatagcgctgctcagtactatgattcgattgagcagactggagtcgacggtgtgatgatcgctcgaggagctttgacaaagcgtatgtcctttgaagccctttcaacacctgaaatttcagtgccattatgagatagggtgacgtatggaactgacttgtcaccttgacgaatcccctttgttctgtgtgcatggtttaatttgaattatagcttggatcttcacgttagtccttttgtctatttgtcgaggttcttatatgaatcttatctgaccgacttattgactgacatttgatttgttacatgtgacagggagatcaaagaacgacgagagtgggatatcagtagtagggaacgattggagttcattcgacaggcaagtcttcatgcatttatatcgacttgggttttgcgtcagatactgactgtaagatgtgtcacctgaattctcttacagtttgctgagtttggtctggtaggtagttgacaactctgaagcgtgatgattcatattctcaccgatactacttttctcttcgctcattcccagagtcattggggatctgatacgactggtataaacactactcgacgattcctctgtgaatcgttatcattcacgtttgtctcggttttcgtttctcatctgaagatttaagaccgtcactgattcgttcgagatgattcacaactgtaaaacatcgttcagccatcgatacatccctcttggtctattggaggttcccgcaaggatgaacgatcgacctcctccgttccaaggtagggacgagttggaaactcttcttggaagcacagaatctaaggtttgtttcaaagtgctcctcgtcttttgttatctgaaaatcaataggctaagcgtgcggcttcgattctcttgtgtcttactacctttcaccaccaggattgggtcaaaatctcagagatgttccttggaccttgtccgccagacttttctttccttgcaaaacataagagcaattcttatggaaacgccgaagagggtaacggttgataccgtgtctttctgtttaggttgaattaagggagggaacaagacgattgaatgagttttgtgttgaattattcttatcattatcatacagcttgcacttcttgttgaaagtataagttcaagagtgatgggttatcgtttgtctgaatgaaatgacgctcgacaaaaaacgaagtagacaggattcgaacctgcgcgcccagagggcacttcctgaacttgctgatatagcagggaagcatcgtaaccacttgattactactccttggatgaacaaaatcgagaaacgaatcatcataccaggtattatagatggtattgagttcttaccaggtttagatctcatagaaaacaactgtttcagtgtggataccgagctatgtaactgaagttcatacatatatctacccctcattgattctctaattctgtctcataaaaagtggacattcatcgttgttaaatgggataacattcagagttgaaagtgctgtgaggcgattcaggtctggactatgattcaagttcaaatgcgacgaccgtaccatgaacgtaagagaacgaggatagacacttcaagataagataactctgaaacctcacgcgtcgacgcgtcaagccgggtcgcgatcgccatgacgcttttgatatgatccacacctcgactaccatacacttcctctcctctactctcttttcctttcccagttcttcttttccttcttccctttgtataacgtttattcttccagcgtaacatcctcttctgtattctttcccacatcaacttctccgtttgcagcgcaaacgcacgacttaaccatagtccatcaacacgattatccacagaaatgacttgtgttgtgccttgcaaagatgtcgatgtatctgagagtgatcttgctggcaagatcactctatatggtgaaagtgagcaatgtctagcacagcttggtgtttaaatcatcgggttgacttcttgattttttgcttacatcacagatacgtcaattcgacctaaagagtctagcgattcatcagacgcgtcttcttattctttcacctgccctattccagcccgtcacacatcctcgatcaatatcgttgatgttgacgacaacgatgatgaggatgatataggtagctgggacgatcgccagtttggggtgtttcgcaagcttccgtttcttggagtgcccgatgatttgaagccagtgatttcaaacccgatcgatattcctaaagatcaatttcttcgagctatgcccgcttcatcagattcgactatcctcgaaaatattgtcataggtggacccaaggtctcagtgacaacttgttcttccatctcaaacgatatttctggcgggccagagttctcaatggtggacgagactaacgaggttttggacgacgagttgaactttacgagcggttctctgccttccccgagcttcaacggatgcgctcaagtaccaagcgtctctgtgatatgcttggacagtgattcaagatgtccagtgacggacactagagaacgttcgggcgagaaagaggtcgaagggcgtccctgttggttggatatttccctggacaacggcgacatcagcgctggcggtgatacgagaattgatgttgcagagaaggttgtcatgatcaaaccatcggatccccttcaaggaatatcatcactgtcaaacacttctaaatatatctccaaacgatttggatcctctggatctccctgtaacaatcccttctcttctcctgccgttcccactacaactgctagaaatgagagtcttgggtcgtcttcctccttgaatctcaataccctcaatcgatcgactccgagtcttacagccgacctttcctcttctttcttctcctccccttctttggccgacttgaccaatccgaatagtcctctgatcgatgtggacgatcaatctcattccagtccgctcaaatcatctcgaaggaatattctcttcacaaatgtcaaaaaggtggatatggtaccacctgctcctttgcctccgccaacggtcagcactgttcaagattccgatagcgaactcgaattcggcactgaacccgatgtcgactctattgtcaacgtcccgttcagtcagtctcgtcgtgttccattcccttactcggctccgcgctcgtctctcggtaatcgctcagtcgcgtccctttcttatccaaagaaacctgagccatcaatcgattcgatttttggtgtccccaagttggatgacaaaatcgcttgcgctacagataactcggattctagaatgaagtggatggatagaacagtacctagagctcctcgatggagtaaacggcgcaagatgacttttggagattcagatatagactcgccaactgcccgaaaacatcgtctgaggcaagaagaatatggaaatctcgagttgaacttcacagcttggcatggaaaactcaagcacgaagttcgggatttaaagtccactccccctagtaggatcgatctggcgaacaacaaatccaggttcgacgctgattgttcgatccaaccaacaaattctttgacaacaaagtctagtcttatctgtccatcacctcagatgaatcgacctcgcaaaaggctagcttcaccctcatcgcccgcttgcgcaagtgtatcatcgcccttgacgcaggcctgtctggcaaaggagaagaaccggtcatctcaagccgaagcttctctcagaaggggtgtgttcgattcatattcagaacgagataattcaccaagaacttccgaggcggaccaaatagaagaagaagagaaaatggaagaagaggaggaacagattcttgttgacaagagtctgcctctacctccgccttcttcgtcccctacgccctgcacaccttcactctcagctgtcagcgtgttctctttagcgtcttgtctatcttgtaccccttctggaatcaaatcctctcttccacctgcttccatcatccaatcgagcgcgaaccccatcgagtttgaaaatgacaatcaaacatcagaggacgaggattcgccttttatgggaagacttttcacatgtgcatataccaggagcgtctctcctgatacttcttggatgaagcaacgacagctctcagtggatgtcccggatgatgaggatcctttagcttgcgtggacgtttggtagaactttcaacttctcttttcattttcttccttgttatttctttgtcatgtcaagttggactgggctagaatacgagtgtctgtattttcttccctcatgaaaggttgcaccacgcgcgggatgcgtttctgtgcacctcaagacccctatctggtatatgtgtccttcttcgctatataaatgaatgttatctaacttcacgaccggcttaaaaaatgtcttaatcagaaaccagtgtagacatgcaatcatggaaggggtatctgataaaatatgatcctatatcaagtttgaagcagtatggatgggggagaaatcccattaacggttatgtatggtcatcggagaaacatgctaagaaaaagggggtattgagatgctatgaggtaaacactggatacagttgagggataatatggcaatgaaccgatctggaagaaagaatataatgagaaaagaggaagaaagcatagtttgcgcaagtcagagtggtagcaggccacccgattcttcgagaagatcagagacgtgaaccgctcgtcgagagacgatgtatgattgggtcgcggttgttttgaaatccatctcgatctggtcaagatcaaggcaaataaaattggatataagctcttactgaagagattcatttcgatctagttgtagacgtacacttaggagctgatctgcgttccacaagcgtgaagtacaggcttccagagattgataaagagtctgtataaaagtctcagtaagacggttccttggaaatctatatcagcagatatgagattgatctgatgcactcaccccgatagagttgcactgtagaagcgtggtttggttggctttgaggacagctagagcacatcggaagaagaaatcgaaaccctcgacaaagaaaacgtcccctgtgcagccgaagaaataacgctctttagtccatcagtatcactagcgagaagatacagaagctgataatgtactgacaaactcgaaacaaagtctaaccgccagaaaaaattgggatgatcagtaggcgtgtgtattgatatatgggtcaatcaagaactaacctcaacgggcactgtgataccatgtgtcaaaccactcagttagtggcttttgcctgacgatacaagagatgaaggatatacaaaaactcacagcaatcagtgaaaagagataagaaccatccgaaggagacagcagcaactacaaaaattcacgcgaacaaacagaccaaaatcagacaggtcaatatcaaaaaaggtgttattattctgaccttcaactcccagttcggtcagatgaatatctagttgaggtagttcttgtttgaggagatcttgaaggacccgctggtcagcccgagaacctggaaaccccaagcagaggaggcggatgagtgaaaactctaacgaagtttggatcgagaaagaaacccagaactgacacaatagtgaaggagagtagtaatccggaggcataagccgctcaaccatgcataagaatacccagaagctgttgaaagatctttagatatcagcctggatgatgtttttttcaaaagcccggtatgacagtccaacttacgcttcctcctcgcgttggtaaacaagaagcaaagtagctgccaacatctgtagacaagaatcagccagttatgcattagttcccaacaagtgattaggctatgatgattctacagtaaactccagtcttacattcataccctggcagtatccaaccgacatattgtgcctaagggttggttttgtacggtggtttaagatttgtcagaatattagtctaagcgcaaagactaagttaggaagacccaccaggcatatgcagtaagtagtctacgaagtttcgccactccgggcccatcccctccaaagaaaacgttcaagggctggatgacgatcatagaaatatacaaaatttcagcgcatgttctgcttatcattgttccgcaaatgtaacacaaggaagacgggaaaacgtcacactgaccaatgttcggaccacgtctttctcgatctcggccagaacagtagagtctacgccttctttttccgcttgggtcagaagatcgttgtaatctcctggtgccatgacttcctgtgcgccactacactccatccaaattttgggccgataagcaattgggattccacccctaaccaactttgcaaactcctttctttcttccttccctgttttcccatgatttcccatttgggcaaacccaatttccgtccatttggtgtcgtccccttttccagccgccattgagctagactctcttcgtctcctcaggtatgcatcccaagcggctgtctgatttgcctgttgctgttcatgaacagttttctgttgattgaggaggagttggatagtcttgcgcccagtcagatgaagaccttgtcgaggagcagacgagccatctacttgaggaacatcagccttgacgtgaagtttttgtgaaccattcacggctcgaactggagaaggattgagagagactgaggtatgggatttatgtttgcctttggcgcccgcgctcggcttagagaatgtaggagacatcgtgatatctggttcagttcctgtcgaaaccactgatacaccggatgcagcggagactgtagaagagtctttgttgaaagaaagagtggctaggtctttctctgaaataggacggctaggtgatgaatttttcactctgatattttgttccacccaatcgtcttcttcttcaggctcggcattaggggcggtggctggtaagccggcaaaacacgccggagcaggtgcccctgcttcgcttgcttccctcaacatgttgatgtttcgaacatctatacgttaaacaaagataggaaacccagacacgcttcgttagttaagaatgagaggtcaagaaagcgtgtaactcgtaccatagataaagccgtatcggtctaaaatcccggtttgcgattcataagcatattcagtcaagtatcttcatctaaacggaggggcagtaaacctgcgacgaaggcaagactcaccagttaaaggctccaagccggtatcaaaccttgaagccgtgccgctcctctttttcttcgagttttttctggaggcatgcaagaacaatcgtagttccgatcgattggacaacaaagtcggcggtctcaattctgtaggttcgatcgcctcgagctctacagagggtacattgggtgatgtccctgttttcactctcgtaaccggcccttcagctgtcaaactatacggattggaagatctattcgtactatggttcttgtctgcagaggaagcgaagaatccagttgaagggatggattttgccgatgtctttgacggatagggatatgcagcggagctcaatgctctgcttaacattgacgaggcagccaccaaaggttgtccggaagagattgatgtacctttatctttgacgacgagagtagatggttgggagggaggaatgaatggtgaaaaatttgaggggacagaagactctctccgcgatcgagtcgtctggttggatggtcgtctctgttcagacacggtgatcccttggttccttgcattggaaacgagttcgaaagccaagtgagatatcaagggtgaaacagaatgcgggtctgaaaacaaagaagctgcctcggtcgataagagcctagttgataaaaatagcgctcggaagtgagagggaatgactcgataaggttgctcgccgggtgtcgtttcatccgatgttgaggacgactcctccagaaagcctgatctactgtcagaatttaacggaggagatcgatcgagtggtgagagataccctttcatacttccttttgatgataccgacgagggcgccgccttttttcttgttgattgtccttccgatgaagagctctgtttatccgttatggatccagaacctggccggtctctctccttcgctggacggctccacatagatcctataccgagccactcgctaaacgttgactgagctcgctttcgactatgtttcttcatcgaagttggactagatgatcgttgatcggttgaatgcatggttgtatttgacttcgtgggtgtgctttctccgatattatgtttcctacctctagagacacttcggttgggtaccgagtgaggggattcagaggagcttgatggagcggatagtatagaagtaaaagaggcgagagtagatatagagtttcctcgaggttttgttctcgagcgcgtaggtggaagggagacagtttcagtagaaagcttcttgacaggttcgatagagtcattcagtgggggtagagaagatgaacgcgtgggcgtctctaggtaggttaatgggcttgttgagagagacgttgacagcgcttcatgtagatcgtaatgtagtgaatcgtactgttgagataaagatatatgttatcgagtcgatatttgacaaatactcgagaacaggacgacctacctgatcatcatccatcgctttgattggtccaccttgcggccttgccctcgtttccttttccgcacgctgtacctctagcttccacaacctccatccgatccgagccaacaccttcatcgggtgttctttgtctgtcggactgggtgggaacaggggcttttcattcccccctttgaatcctgtaggcaggctggcctggccatcttgattgaacgatgactcccagatgacaagcgcgttagttagctcgtcatcagccatcaaatcgtaccgtgcattcagtacttcttcctcctctctggacaagatcgaggggattcgactcgttgacgatgacgacggccgagtggccatcgaggatgaaattggatctatagaccgagcgagatcaggtgtggaagaggatggatgagacaatggtgactgattgatagaaaccactagaggatctttgtcttctttcggacggcgttggctcagggtagagggttttgaaggaatgcttggtcggtgggcaagcgacgactgtgaaggaaatgacccaggacttcgaagaggcatgtgcgaataaaatcctggagagcttggttgggacgacggggcggtagcagcagaggtggaaataaagttattccaagacggagtagtatcatcagaaggagaaggagaggggaagccaaaagcgctgtgtctggctgtcaacaaaacgggttgtagtgactgagagagttcttccgtttgtttctttagatcaaagtatgaagccggaccagccgtggatgaatctagcgatgtatggacagaagagggtgtatcagtgttctgtttgttcaagatcaagaccactccgttcttgcacacacctgaccgaccgtatccgttgacatcctgaggatagctcgactgtactcttttcgacttgtaatttggtcggatcgaaggtacgagtgagagcgggtgatgtagaggtagagcctctattgggagagacccagtcgtcgcacccacttcatcgggctccatatcagagtgacaacgacagcagatggcttttgttccttataagcgaatctgtccacgagtgaatgtatgagagattgaaagtaccaaaagaaacggaacaagaaggtgagggttgatgattgatggcggaaacacaggcagatgttgtttcccatctggtcaccctcgtcatcacctgcattgagtgaataagatcagagaaccgttcgtcaaagcgctcaccgcacaagggacaatcaagtacacagtaaccggagcacgggagctcaatgattcaagagctgctttgtatgagagttcattttatgttcatgaacaatgtcgatcgtgtgtagacaagcgacaactgagaagacgtatgggtagtatggatagtggcttcaaactcgagatactccttatgtgttcgcaacattaaacacttccaggcatgtatagccatacaagatatcatcttgtgagaagtgaagcattctgatctgatgtagaaagaatcaagcacactagatgcccagtgacacagaggtcaaaggttgaagagattaacgatcaaatcaagactcctttcttcgtctgaccgatcatcccattctggtctatcgattggtagcatccacctcatttggacctcagctagacctcaagaaggtttttacaattgatatattgcctttcaaggtcaagacatgtgtatgtactgttctttggccgtgaaaattgacttcttgatgttgcagcagcttatacacttggtacattctcgtttttctagcctcagatcttatatcaaatccgatatcaccttctcactctgagctagaggcaaagccaaagccagatacagagccagcatcagcgctagaatcaaactttgaaaacccagtctcttcaactaccactgcatcaactcctgaattcatcacaccttctacgtcctcctccacagcagaagtcgcagtagaggccagccggaaacgctcgaaatgggaagaccaggcggctagagaggatgagctcgcgatcaaaattcgaaagaaaaacaaactcgccgcccaagagagaaggaggagagagcgaagtgcagaagagagggagagagaaagcagattgggttcgtgttcttccctgttatcgttctgccctcgctcctgtgttaaactcatgcgtcggctcgtttgtgtctcattgcttcgatacatcctcccagcggctccgtcaacatcgaacacgtcctctcaatatgccctgtcttccgttcccccggcaactacgaaaccgtcaactcctcgttctcgtgaagtcccgaccatatcgacccgctctgcatatgttcccagccggtcatcccatccatctatccagtcatgtcggtcggtatacgagtatgaacggttaaaccatatcgaggaaggctcatatggtgtcgtcttccgagcaagagagaaaaccacaggcgaaattgtggcgatcaagaagctcaagctggatgaagagaagaacgggtttccaatcaccagtctcagggaggttatggcgctcatggtgtgtaggcacgagaacgtagttggagtcagagagattgttgtgggggacacattgacccagtcagtaattcatctggtattgcctctcttgctcgccattgatcttgttccgttgaccgacatgacgtatatgtggcaaatccaaacaaacgaaacatcagaatctttatcgtcatggacttcatagaacacgacctaaaatcgcttctctcgatcatgccagccccgtttgtccaatctgaggtcaaaacgctcctccatcaactcctctcagccactgcacactgtcataccaactggatccttcatcgggacctgaagacatccaatctgcttatgaataaccgagggatgatcaaggttgccgatttcggtcttgctagaaaatttggagaacctctgggtgatatgacgcagttggttgttacgctttggtataggtaggttatatcattcaagttgcacgctcaagagaaactgaattaatctttgtgttctgcgtccctactatctcttcctctcatcctggctgggacacaagatcgcctgaattattgttaggaaagacagactactctaccgctgtagacatgtggtcgataggctgtattttcgcggagcttatgctcaaaacacccctgttccaaggcaagggagaaattgagcaaattggtcaaatcttgaaattacttggataccccaacgaagatacctggcctggttggtcgacgttgcctctggccaaaactatcaacttttctggcccttcgttcgtctctgcttgcgcatctactgtgtcttgactttctctttgattcactattatacctgttcttcttgttcaatgcagatcttcctctttgccgagcaagttccgtcatctaaccgaaacagggcttgatttactaagccaactgctctattacgacccggaacgtcgaatttctgccgaagaagctatgagacatccttactttctgttcgtacccagctttgccttctcatcctgatatttcggttgtgtccgatctgtgacgaaactttattgagacttttcgtttgttgttttggccggtgtccatcgcgattgtgttgttttgtttttcttgtagggaagcaccgttaccgaaacacccttctttgttttcgtccttcccttcgcaagccgctggagaaaggtacgtattcttaagctcaactcgaatgtttggttctatatcgacgctgataaacctttgtcaatgtttgatcgaaattcttagacgccaaaaaccgtttgaaagtccttcagctccgaatcatcggcacgaaagggattaatgaacatttttttccctgactttactcgatcctagacgatttgtataagagatatgaaaaatagaaagcaagctgcatatatgttcataatctattatagaaaccctccgaccagtctctctccctccctagaaaggcaacgtcgggttctcaattgttttgtgggtgtatactttcttaccctcttcagccgatccaaagtctaaagagacatgtccgttatcagctttgcttcgcgcgaggtacttgtaactgtcaagtccacatcgataatatccgtcagttagcgaacagtcaatcgctatttcagatgtatagaagaaacaagggcaaagggacatacatgcataggccttctaagcccacaggtcctctggcatgagtctttcccgtactgatcccaacttctgttccaaatccgtatctgaatccatcggcaaatctggtcgaggcattccagtacacaccagcagcatcgcatcctctcatgaaagcctttgcgatcacttcgttctcggtcacaatcgtttcggtgtgcttggagccgtgttcggcaatatgattgattgcttcggtcacgttgtcgacggttttaacggacagtgtaggtgacagatgttcgatatagtaggtttccgggatggagctatgaatttgagacgtgtgggaagcgagaacagaggagtggagatgttctcgagtggattcatcgagataaagcgtgatgttattggaaagaaggttggcagagagagtaggccaaaggctggtaagcagagaacggtgaatgaggagggtctcaagagcgttacatgcggccggatagctcaactgttgttatgttttttttttcagttgatgaaggcgcacacataagtacttatggccgatgttgaatatagaagaaaaagacagacctttgaatcgagtaccaccctttcagccttagcagcatcagcactctcatccaaataagcatggcacagtccatcagcgtgtcccattaccggaatcttcgtctgacccttgatgctcctcaccagctcggctccacctcggggcatgacaaggtcgatgaatttatcctgagaaagaagggttgaaatctcggatctggtagagaccgtctggatgaacgtaggaggaaaaggagtgctagaaagagctttctgaatcagttgagaaagaatagaggtcgtatgcaaggtttctttcccgggcttgagaatggcggcatttcctgtaaggatagaggcagcagagagaatttggtagaatagcttcatgagtactccaagtcacttccgaaacggatagagcattaacttaccgctcttcagagccaaggaagcaatgttgacgacaacctcaggtctggcctcaaatataacaagtaagactccgatagggcaagtcactctataaagctctagtccgtcgtcaagctcctttgcgtaggtgatctggtccgtcgggcagggaagctgggcgacgtcaagaataccctgaagcatcgaatcaaacttggaagatgactgcaaagataatctggagaacatggacttggatatgtttccggactcgactagaggtgatgcagcctgttatcataacataatgagtcagcttgcattcgcgtttggttgaccgtcaaaaaaggctcacatcgaggtccttctggtttgcagatagaacatcgtccttgttgtcaatcaggatctgacgaattttgagcagcgcactatctcgctcgctagaatcaatcagctgtgatgcctggtaagcggctcgagcatctctggcaacggtctctgctgggttggacattgaggaatatgattgatgatacggaagattgtgagtgtataaagagcaagaagtaaaggtaaaaaagaacatgaggaatggttagggttggggtagtcaccgatgagtcagacgctgacacgtgacgtctgcacgtgactggtcgggtcggataatcgcgtcgcgcgtcgcgtggaattttcatccaaccgatcacacctctatcattgagctctaccaaatctatcctgtttctttctcctctccatatcagctgcattgctctatctacagggacacatcaacatatccataacatctcaatcaatgtcatccacagagtatgttggcttgttttaattcatttatactgccaccaagtgctttgaatacacgcaagcatccttgccttctacgtcctcgcgctgttcctatagagactcgtactgatccgttcatgattgaacatctagctcgtccactcagaaagatcttcttcaggccaatatcgatctgggcaacaaagcctttgtccttagaaagtgggatgaggctgctgatgcgttcactactgcactagagatatggtcagttatctattcttgtgaaggtcgaaagctccttcatcatcgttctgccttcctttctcttcaacgtctactgattttggtcatggatttcttccgccccacgaatctgtttatcagcgcctctatctatggagatttctccgccgagtcggctgacttattgctatcctacgggaaggctctccttgagattgccaccgcccaaaaccaggtcatgaggcaagaagcaggtgctaacgggggtgaagacggaggtttcgatgatgatcaagacgaagttgaagaggaggctcgtaagtgtttttctactttctggcctcttgtattttgttcttttccgatgcagacctcattcatgcggcagtatgtatcatgttgacatcatgctcactcgaatgatatgaccacctgtagtccaaatcgctgcatcgaccgcgtcgaacgtcaacaatcactttgacttccgagaagaaactcaagacgtcatctcgacgaccatccccatcatttccgctacatcctcatcctcttcgtccggcgcagctgacacagttattggaggtacggctctttcaaacgattctgccaccaaaccttcaggcgagcctgaagaagaagatccggaggatgacttcaatgccgcatgggacgttctggactctgctcgagctctgttccagaagaaggaaggtggcttagctagattacaagaagccgagtgttatcttaccttgggtgacgtcagtcttgagaccgagaattttgctcaggctgtcgaagatttccagtcggcccttgcactcaagtccccaatccttcccaactcgtccaggcacatctcggaagcacacttaaaactggcggtggcgcttgaattcgcgtcaatgttggaggatcatcaagctcgcgcattaggacatgttgagctgtccaaggcatctctgctcgaaagaagagcagagttggaaagtggcgtgagtgggtttgaggttggacctgaggagagcatcaaaggaaagggaaaggagggaaagatcttggctgaagacgtcgtcaaggatcgagtagagaaattgagcgaggaggagaggaaggctgaaacaaaggagattgatgagctcctagaagatctcgacctcaaggtgcgttaacaatccaacatcgctaactttatctttgactaatacccgtgcactgtctgtcctacttgtacgttctgcatatcgtacgaaaacacctatggatcttcagattgaagaccttcgcatggcccctctaccaaaaacaaacctggctggattgctccccacttcttcatctacctctacctctacattcaacgcgttcggcggtcctttcagctccagcgtgagcgctgaaacgtcagtctcagcatcccaggtgaacgatttatccagcatggtaaaaaagagaaagacggcggcggcggcctcctcgtcgtcttcaccggcgactggaaaacgaaaggcagatagcgagggaagcggaggagaaaagaaagcgaaaatctgattcctggtcggatatatcattttttcaatatgtcgatatatatatatgtatgcgcgtggtttctctgtatataggtggaaacaaaaacatcgtcgagtgggtatcattcactataacctcctccgtagtctcttgttggttcttcttcatcactctcaatacctacaccttccatctgactgtcctcccctgaccttgcactcgtgtcccaataagcatgactctcacccggcctgacttcctcactcgtctcttcgatagttgtcctactctgttccccttctgcgccgtcctgttcctcttcttcttcggttccttcttcgaccaccatactttcttcttccccgtcagataagaattctccgtccgcttctggtcctcgcttggcgcccgccatcccaggtgggatctcccttcctctttcttcaggcaggacgtctctaagaccgagttcagtccagccagtccggtatgtatgcccttgggctgtacgtgggtgggaaggaagatgattcaaatgtcggccaatgaggagagagggcggattatgttgcgttggtattgagtacggtcggccatatggatatgaaggctgtataaaaacatgcgaacgagaagagaactcaatgacggttgccaaaatgtgtttgtaacaagaagacaagagaagcaacaagactaaagcgaaactaacgtgtgctttggacggtagagctaagatttcacagaaggtcaaaaggatctgtgtgaggataagcttgctcgcttgtgtgatgagaccgatgccagaacggattcgtactttcatattcgtcgggtttcggagggtccaagtcaaacggaattggaatctctacagacagagttcgaagaagcaacatttcagacaaacgtctatggtcacctttgccttttctgaacaacccgaagagggccaacggagctggccgaaagggaaggctaggagaaggaagcacacataccatcatcgaatgcaggaatgattccaaagaaatcttcttcctcttctagatctaatgcaagcagagctccatctgacatatggatggcagaatatcgaccgtcctgtggaggttgttttgaggggcgtcgaggatgagccaaataaggtatcatacgtgtgaatctcgagctcacaaggaagcacaaaaggagcagaacgaacggtcatggtaataggatacccaggatgcaaggacaaatatttctggtaaagagaagaagcagaagataggattgaaaggggagaaggcagattgctagtttaatggttggaaggagaacgaggatatcattgatttcacttccatcattaattgacggccatcggacatcgaccatcgaccatcgaccatcacctatcggatattatatttccatcctcttctgagagtgaaaagatcctgttcatcatgtctccttctgttcctctctccagtgcttcttctgtcttttcgaaagctgcaaagtcaacatcaatagtgtcccatcctcatcccatccgtgcattctcctcggccaagaaggaatgtgcagtttcagtaagctttccttcttaatccatcatctccccctctgtcacctcacatacagccatacagaatctgaccgaagctgcttgtgataccgcgtgttgtgctcagtcaacagcttacggacagtgcatcctcgcacgctacaaggatgtagagagagggatgtgcgaagcagagtttcaggccttcaaggcctgtatacaggtacgtcttctttctctcctcctcttgacacacttaccagaagcatgaagacctaagtatttgtatgatctggatgaatcgatgaacagaaatcgataggccggaagtggtgattgtgtcatagtgttcaacgatctttgatgttcatgtatcataggctttccattgtagatgtacggcagcccttcgtcttctcttctcccgtttgtcgatcgcttcccatctagacattgtatttcgaatgaccttttggtcagatttcacccatgtacgattgaagtagctcttttgagccgatgtataacgggatctggatatcaatgtatcgaccgggacacctatcagaatatacaattgccagtacttctgaacccttagctcatagagctcgtacaatcgtacggaaatgaatatgcaagagaaaaagaaaacatatatgaatgattaggtatggcatctacccgcccctgtctctcgcgtgggtccacctccaccgccaccgccgttttctccctacacgttcgctctccttctctctacgccttcgaatcattctttgatcgcgctcattttgagatgctggattgcccttgcgcgcataaggtccgaatcctgtcagtcgagaggtcaaagagaagagctcaagctcgagaatgggttggtcgatatcttcttctggaggctccggggtaaggtacacgctcggaacagcagaagatgatgcaaaagagaaagaggaggcggctcccgtggtgaaaacaggagcgtgtgcttttgagtgagaagacgatgatattggagatcgatgatgctcataagaagatgagggtgacgaaggggacagaaagtcgatatactctaatgaagacaaggcatcggacgtagattcgaacgaaccacctgcttctaggtcgtccaacaatgtacttgtatttgagctcggagaatctattgaccgggttgtgatcgatgccaatgttgaagcaggcagagggggaggagtggatggaggagtggccatggttggaggaggattgtgaccagtctcgtatgctacgagaaggcatacgagctgcagcacaaagatgaaagtcgattgcaagagaacctgagtaagtgtagtaggtgtggctgttgttggcatacacatcagccatgccttcttgtcttgaaatgccgaaccagaacacgaatacgactatcagcagaggaacactcactctgcccgataaagttgagaaagagccctctaggccgtgaaccaaaggtagctgagggcccgtacagaaaatgacggagatatatgccaatgttcaaaaggatgagataatttgtcaagttaggtagtgagcgggtaggcgtcgtcaatactgggttcgtgagctctataaacgatgatgcggccgggagttcgtcatcacagaagcgcaatcaatcagaatcagcccagatttaaagggattgaaaacgatacgagagagaggaacaaacgaatttgaacgaccactctgacgagaagaacaaagaagcttggatcacagaagtaggagtagaccgacagagcgatcaccaatctatccagctaggtgaggtaaaagagttttgattgatctatcattaagctgagctattaacgatgtgggattagcgacgatgagacaaactagtgcctacctgttctacaagatcagttcgtttctgttcaagcatcggcgagaccatcgggacgctagaacaaagattgtcagcaccttcgtacagttcgccaagggatataggactgacggaaacatatatcctcacctgatgtatatcaacactccctacacaagggctttgaggatcagcagacacagcttgtgctcaaccaaaacaagcagagaagaatgaaacgttctatagatagagagaatatcgttgagctatgtgaagcctctggtcggacactttgacggccaatgatcgagatggtagtgatgaagaaacattcatcgtcaaagggtccgctcgcatcatctcttcagctgttcatcatcagcaccaccaacatcatcacaactattgacgctctcaccagattacatcgttgttcactcctaggcgatagatctcttctttggtctgccagctctcatgtcgcaaaaggatacctctgtctctgtcgatgacaagcgagcagactcaactattcacgacccatctgcctcaagagagcctctactgagcgcctctctcacatccgccaagtcgctcgttctccttcaattgctctctagactcatcacatttaccctcaataatgccctccttcggtttgcttcgccagaggttttcggaacagctgccattcagttcgaccttgttggttcgacattgctgtttttgagcagagaaggagtgaggggagcgttacttcggtctgggaacgcgtctgttaagagcgagaacgaagctgggagcaaaatcaaggagaaggacgcgattgataaagataagcagacgacagatctgtcggtgaacgctaggcagcttagcctaaacctttcgctcatcccgcttgggctttttattttactcggatgtacgattgtacctacatacatctattcatcttcgcgcctgacgacgagccagccgttcttcttaccgtctcttctgctacatgttgctgggtatctgatcgagcttctgtctgagccatactacgtacaacttcagacggaccttatacttggcgtccgtgttcgggcggaaggctcggcagtagtagcaaaggcagtggtgacgtttgggtcggtctggttcttaggagagcgacatgcgcttctagcatttggactgggtcagctcgcatacggaggatttatacttggagtgtttgtccatcatttcggtctgagaagagcagcgaggatgtggattcccaagaaagtgtcgggtagtctcttgggaacctatgtgtgagtgcgaagaactgatgagcgaaacaaagctctagactttgatcactatcatgggtactattctcgtatacttacctatggggttgacactttgatagctactttgaccagtcatcattcgcattagcaaaggcgatgaccttgcagtccgtggtgaagcatttcctcacagaaggtgatcggatggttgtctctcggatcagtcctcttgaggaccagggagcatacgcaatcgcgacgaactacggtaggtgagaatatatgagcttggtagacatcgttcacacataatgcttgctaatgattgtctctcttcaacccttctgataacggaatatccatatcatccggaacaggctctctggtagcgcggatagtttttcagccagtagaagagacagctcggctatactttgctcggtcactatctgctagaaacgagcggggcaaaccctcagagtcaacttcgacctctgtctcggtgtctgattcggatgtggagatcgcactgacaatgctagggacgctgctccgactgtcagctcatctggcggtgctattgcctgcactcggtccaccattcatcccaacggtgctctcgatactactaccgtctgcaaagtggtctggggagcgagcgcggacacctggccggttgctcgcgatttacacaatctacctacctctaatgagcgcaaatggggtgctagaggcgttctttgcagctacggcgaatgcaagagagcttggaagacagagtcgatcgatgtttgcgttttcgatagtctttttgatgtttgtgggtgcatatgttcggctgggaggaggtcgaccggaggaggggcttttgtggggaaacgtggtgaacatgatgtgtcgtatcgtgtttgcgctcgaccatgctactcggtggttccggttgcgaggcgaaggcaagacggacacgctcagtccaagtggcttgatgccgggggtgaaggtcatactggtggctatcaccaccgggctagccgtccggttgagtgagcggctactgatcgctgggcaagtgcagcggtctaagctagatctcaggagcacgtgtggacatgtgctcgtcggtttggctgcaggaggaagctgcgtagtcgcttggtgagtggtgtttcctccatgtctttacttgctccggagtattgtatgcctttgcgagactgacttatcaacgacatttcgatagcttcttttccgaaagaaaatctgtcgtggcagcgctccgaactctaaaaagacgtaaaatagactaatgagaagatataaatggtattcagagagaaagtggacacaacagaggagaacgatattctaagaaatctttgatacgagcgttgagaaaccgaacagagggtagagaaggagaagagacgcgtcgattgatcgaagacgcgccatggacgttatgcgaaagttgcacctccacactctgcagtctttagcttcctttcgtcctgggcaaccaggacatcaataatatcgaatacaatacagagaagattagcattgcccctgcataaggatgacacgattcgatcagagtggagaccttcgggtcaaattatttttttaactcacatatcctcatatgtgcctatgaggatgcttgtgtactgccattctttgatgcttttcctttcttcccttcttccctttctgttttgatcgcaaagcaggatctcctgctcaattgactagccttcaataaggattgacacaagtgatgatgatcacgtagcgcaagaaagggtagaaggcaagaaaggcgaggaggtgaggaaaaccgccgcagtgaaatgcgagacgacagaccatctcacttttctaagatccttcactccttcctctcatctttcatcccactttcttcttctctcttggactgtcttataagttgattccatcaccatgaagctatcttcgcttctccttccggcggctctccttttaagacccacactctccgctgctctttccatcaaagctcagcgatgggctcacaaggcagcctcatctccggaccacgttgctcagctcgatacagcttcatttgaggatctaacgaacaataaggacagggattactctgtcactgtcttacttaccgctcttgattctggcttcaaggtattttcttttcttcttggtatccgaagttgtattcttactgcaaagaggaaaaggcttattcttatatctggttgtgttcgtatttgctatcctccctgttctccatcatcaaagtgtgctccctgcaagtgagaccagtccttcttcactctctgattgcccttgggttattctgatcttgactaaaccttcggccctttgatgttttaaagagaattcgacccatcttacagagccgttgcctcttcttggggtcgactgccgaaagatgttaggtccaagcatatctttgcttcgctagatttccaacagggtcaagaggtttacaagaaggtacgtgccttcgagatctcgttttgtcaccatttgacactgattttgatcatccctctgtcaaaacttagtttggtttgacttcggcgcccacggtgttctacttcaaaccgactgaaggcgatcgagctcctgaagatggaaagacgggtcctctgatgtacgatctcggccgcaagtaagttttcagagcatctcagcaatccaggctgctttctgctcatgtttggtcactcgtcttttgatcttggctgatcgagacttttctcttcattatgatcacgaattcccctgctcagcgggtttgggccggagaacttgctgaaattccatcaggcgaacatcccagctgaattcgagatctataaacctaaaccttgggcacttatcatctccacgcccatcgcgtaagatccttctctttttcaatcatcaggcttgattatccgtgattcttaccggccgtcctgtcatgtcttgggttcctttccttcatctcaaaaaagagtaattgcctcattccgaagtctttaccaataccgatcactctttcttcccatcatcacttccaaacacctctggacggcagtcaccctgttgctcgttatcgtctttaactctggatacatgtggaaccgaatccgagatgcgccatatgctcaagtggacaggcaaggcagatctcagtggatcatcggtgggttccagcagcaggtaggagcggagactcaagtcgtaggcgccatgtacgctggtctcgcttttgccatcgtagcgctctccaacctagtaccatcaacgagggatccaggcagacagaggatcggcgtcttcctttggtcgggcgtcctcatcgtattgttcagcttgttgatgagtatctttagactcaagaacggggggtatcctttccgcctcttgttttgaaactctagcggatgggaaacgagagaaaataacaaaatactccggaaggaagaaaaggatccctcgagatagtctatcaaatccgaaaggaaatgttgggctgaagaaaggagatagataggtagtggtttagtttcacccagatctgatgattctcttttcttgcaaatcaagggcatctctttctctgtttcgtttttccttctcctcatcttgaactagaatgatttagagcatgaagagaaaagagatggaaggtccagaaaaggctagaggaggagttttaaagattgggtatcatggtctcgtgattcaaaaagatggagaggtaagaaggaagagcggtaaaaaaggtatggtcacaagcgaggattctcaaagataagaagattgagatgagcctaggcgtgagaggataacaaagagatggtataaagcagtgagcgaagacatggaaacaaagaagatggaatctcaaggttcagcgtcggttctgacttcctgatcgctgatacgcggcgagttggtcaagctctgcctcgagcgccttgatcgatccgtgagctgtctcaagatctttgttcagtcgatctctttcggcaatcaactgtttaaacatcccaattttcatcatattttcgatcagtcttccggccgctcttttgggtttccacctgttcttggctctcaaatgaagcaagagacgtacatgctgctcccattgtctgaatcgactctcctctagcttgacttgttcggtgaaccgctttctgagcatctcctcttcttctttaaacttcgggttgtcaagcttcttaaccttggcttctccaaacttccgggtctccatctgagactgtcggtagttttcgtagtgggcgtcctcggtcgttgagatgagatcgagcatgtgggttcgaatgagaagggatcgaagcttccggaagtcgcagtggtcctcgttgtccactgaggaggcacaggaggaaagagtgaaattggaaaagatgtcaaaactgtttgacgatataagagaaaatgatacgccgtggacgaaccctcagcaacaccccatagatattctcgacctttgacaacccgtccatctcgagtggtgacatcttgagtggatccgatgattgaaaacggcatggcggccgtcagcgtacgagcatgctctgccgatgcagggtcatcctcctcaatcggaggctggtagatcttgattccctgagcaacgatgacttcctggatctgttgaagaaaaggaggtacaggaacaaacgaaaatcgttcagtgcgcttgagactcgatgtcttatgagatatatgcgcagatatcaaacgcaactcgttgtttgaagatagctaaatcttcgggcgtcaacgtatcagctttagccaccacgggaatgagattaactcgagtaccgaggcgcttcataatctcaatgtctagcggcttcaatctgggggtcatggaatgtcgcgatagagagcgtttgtagacagcaacccatttcggtcaacaacctgtcagcgcgctctcaagtctgccaacaggacgacatcagacgtggagaatacgtacgtgtgtccagtcggtcgcacaaagtatagacacgcatgaaccctaagatctgccttctcctctcgctggggctgctgctcctgacgcataaacatctcgtgttggtcgtccacaaactccacaattggtccccagctgttacaaatcaacgagagtgattagtaaatgctctcgctatccgttagaaaacctttttgttgtgaagcatctagagaacttcggaagagaaagtgatttacctatctcggttgttgacgtagtcaccaaatccaggcgtgtcaatcacagtcaatttgactttaaatgccttttcttctagctgtggagaggaagagttcatgttgattaagtatatgcgcttgcatctagcgtttaacaacatgggcctatagctgtttagagaaagggaccgacctcagccttgatgatatctacctcggtcgtcttgtctagttgctttgagaatcgctgtcgatagttctttggctgagagagctcggtagagaacagagtgttgataagcgtcgtctttccaagtccggattcgcctgattaagtaaagagatggtaatggaggggaagagagaaaggtacacagggcgacacaaagtagaggaaggtgtcagtatatgctaaggagagaacttgacgctgacaagtctgtgggttgacttggctctagctctaacaagcagtcaaaaggagcagatgtacactgtagaatagaacaataaagaaacgtaccaactaccataacggtgaagtgctatagagatccattgtcgggcatcaacaatgggatttcaggcacgagcagattgacggcaagcaccaaaaaagagacacgacgagtcaaatgatcagcaacgaatgatttagatatgtgcctggaggagctcttgaagagaggaccaatagaatggcccatgtagatgtaacacagggaagagaagaacaggaagaaacagtatgaaaaacaagatagatgaagccactgaatgcacttacagcccctcgtttagctacgatcttgtgtcgctggttgggtaggctgaaaaagcggacaagagcgtgagtaccttgtatctgaccgatggaaagaaacgagaagatgaaaagacggaaggctaagtactttgcgattccgattccatttgcagatacatcagtggtggacattttggtggaggagcgaggagaagagtaccgaaggcgaaggtgaaggtgatggtgagggtgaagaggtgaaggagatggagagttgctgtcagagagagaagcgacggccgtttgtttatttcgtagccatttgctatacaggatccttcacaatcattacaaaatctcccatttatctattagaaattatgtattagttgaacccattaaatggaaacaagtactacgaggatcccaccacacaaatggtgacccatcatttggtctctaaaatataatgattcaacacacctatcattcaaagttattgtgatgcagcatgtatgatgactgtagtgatcaaagtgttcttgagaagttcactgggtcgtccgtagtgttgttgcttttgaagtagataaatcagtgttctctctaatgcctcgatcgagtttttcctaatataaatttcgctaggcagagggaagaaaaaagagtccaaagaattttccaagcgtctcctcttttttttctcttccacacacacacaccctctcccccgcctctcccccctttccatcccatggctccctacgctaaaccagagacgtctcttaaggtatgattttttgcatgttggtagtgcttcctatgtttctgttgtactcaatggtccatttcgctgttcggtcaaactggaatcaaccacaaaaaaaacaccataccttctcttacagcgagccgagggtaagtttatgttttgcacctcattgatctttcccatcccttctttgagttgacttaaccctatctttttcccaaacattccgtgctacagagcttctctcactttctcctcccaaggaaaaggaggccctcgatgctctcgccgaggtctttgtgtccaagcgatttaagtcgacccccatcaccgcccttgagcctgtcatcatccggttcgtcttccttctctttatcccttgttctcaggccttgcagaacatagcaaacaacgatatcaatttggatctaattgtcttccgatgttttctactgtatagattcctcgagctttgcgtgtcgatgaggaagggaaagatcgccaaggaaggactcgctgcttaccggtatgcctttctcgggtttttttttttttttttttt

SEQ ID NO: 1559 - DNA, 8082 bp, Xanthophyllomyces dendrorhous
ttttttttttttttttttggtttttaatgttcttctttattcacaacgacttactcacgcaacgattcgtcctcgtccactatttaccaacggtttccagaaatgtcgctcaatcgaccaatgtgccctctgtcgagaacgtcatcaaacgattcctctctgctgctgaggccaaggtggccgaggcccaggagtcggctgcttcgcttctctctactaaagacgattcgtccgctgaagagcccgaggccgatttggatgctcctcttgagccctctactctcctcatgatgtccgttgatgcccagaaggataggaccgaccgacagatcgtccttcctgctctccggttctactgggagtgcttgcgaatttctcttgaggtcttgaggaacagtgctcggctcgagattatctaccaggtatgcctttttctggttcatgcttctgacgggttgtttcgtttacactcagtctgatcacgtcttctttctctgctctcacagcaaattgttcagcgagcgtttgccttctgtatccagcacactcgaaagaccgagttccgacgattgtgtgaaatcattcgaaaggatcttgccaccgtccacaagtattcccaccagcaaaacaccatcaacttgtccgaacccgatattcttgcacgattccttgagatccggttccagcagctcaactctgccgttgacctcgagctctggcaagaggctttccgatcggttgaggatatccaaggtcttctcgtcaaccctgcctctaagaaggctcttaaacccgcgatgatgatcaactattacgagaagcttaccaaggtgttcaagtctgagggtggctccatggccgtgttccacgctgccgcttggggaagataccagatgtttgccgagcgaggcgctgccagcgctaaagagggccaatccggtttgagtgaagaggatgcgaagaagaacgttggctttgttcttctttctgccttggccgtcccagttactgaggatggagagggaaagagacatgccactaagttggtcaacttgctcaacttgcccaagatgcctaccagggctggtttgttgaaggatgctgttagtatatgtttcactttctgaacgccaaatacatatctggtccctctgacttgacttcttttcctttcacaccgtattcttccttgtcagcttgaccgaaacattctcgctcgaaccgccccggatcttgccaagctttacactctcctcgagcaggacttccaccctttgactatctgctccaccactgctcccatcatccagtcattggcttcgtcgcctgattatgcccagtacgctgccccgatccagcacgtcgtcatctcccgactgttccagcagctctctcaggtgtatgactctgtctcaatggctcacgtgctctctctcgtcagtgcgttctcgatggacgaggacgcgctcgagaagttcatcatggctgcctgtaagcgagctgagctcgccgttcgattggaccatgtccagaagtcaatcctcttcttggacgagcctttcaccatggcttcctccaaggtcggctccggccctgccgcctttacctcgaacgctttgatcgtcgactccaaggccgggcttcttcagccgtcgacggctgatttggttcgaactcagctctcgaggttggcgagcgtgttgcactcgactgtccagttccttgatccttccattgctgtcaaggccaaggaggctcagcgagagctgtttgctaaggctgttgcccaggccgaggccgagcaggccgctttctccgctcgacgagctttggtcgctcgacgaaaagagttgatggatgagttgagcgtccgacgagcgactgaggaggctgccgccaaggccgagaaggccagagtcgccgccatcgagttgaagaagaaggaggaggaagactacaagaagatgcagcgagaaaggatccagcaggaggtcgaccaggtcaggatcgatgaggccaggaagttggccgagtcgttgaagctcaggggtggtcttaaggtcgacgccgacaagatcgacaacatggataccgatggacttgttcaactccaggtcgagcagctcgagaaggagaagcgagagatggccgaacgactccgaatcattggcaagcgaactgaccatatcgagcgagcgttccgaaaggaggagattcctctcgttcatgctgattatgaacgacagcaggccgatgatctcgctgctcatcagctccttcagcagcagaccagagatcacgccaaggccgttcacgaggaggctgtcggattgaagaaccggttggctcgaatcttaggtgactaccagatcgtgaagagcgatatccagaagaggcaggctggcttgttcgaggagaggaggaaggcctccgggatcaagattgctgaggagaaggagaagcttcgggccagggtgttggccgagcgagctgagaggaagcgacgagcggaggaggaggacaagaagagggctgccgatgaggccgccgccgctgctgccgaggagcgacgacaggaagacgaagcccgagctgccgaggaggagaaggtccgactcgagatcgagggacgaaagcaggaggccgaggagaaggcccgggctgctcagcgagaagctcgagagaagcagcgacaggctgacgctgagctcgtcaaggcacagatgcagcgagaggaggaggctatgacccgacgaaacgctgcgaaggcttctcccgctggagcacctccggcccccagttctggtgcttggaagcgacctggcgctggctcttcttccccatctgcttcgtcctcgcccgctcccaccggtgagcgaaggcgactacagctgtcgtctcgatcagtcccgttggcttctgagagctcgcccgctgccgctcctgcgtctgtggtggctcctgctgctcctttgattcctgctgtggctatggccgccgctgctaccgctgcctcgtcaccagcggccccaactgaagatggcttcaaggaggttcctgtgcgaggccagaagtggactcgaggtgtcagcaagtgggccaacaagtaaagccttgttgcctctctggtatctgaatcaaaaaacagaagtagggatttccatcaggtctgggttcgagtgtcattgcatgttgtgttttctctttggatctctatagaacgctggcctattcttctgtgatgtttttcttccctttctttttcttctttcttgactctcttcatgcttcttctttcctctacatcaatttccatagcttccccctttactctttttccccatcaaccctttgtgtctttgttcgtcttgcgtatttaaccttatccgtcttcgttccaaaggcttgtttcgaatggaagaagaaaaacattataaaattcgatctttcatcttgccttttccctgttttggaacgaggatagtgttttctcaagagaatgacgtctcttgagagcaagggtgaatgacgcgatcagaacggacgaatacgagtgattgagcacaagataagctagacgaggagaagaagaagaaaaaatcaagaattcgttggaatcttcggagtctttcttgtttcttcctgatcgccaggacgtttctcgaccgaaactctactttcgagctgtcggtactcaccccggactggaccgaactcgtccatcttattccggacagagtcggtctgcgttcggttacctcacccactgacgctcagactgccgaacgtactgacagctcggcatggcatggccagaaagtagggaagaaccttacgtcgggactgtccggctccacccgatgggctaggatacatggctaacttgttccgtcgccatctctttgagtgggctcatgtatgagcttgaactgtataaaatgctgaccgagttggtgtttctgcactgagaggtttcatcgtttcttcaccccatcagacttccaccaagcaactcctttctacacatctacccaacgctaacaatctactcgatctacttacaatcaacatcatgcccgaatgtgagttgatcgactggtcgatcgttcctcctccttcgagctcaagctgatgagtcgcgcttgttcattcgacagctaccccctctaaggccaagcttatgcctgccgatctagttgggtcatctcccaaggttctgcccacctttttccttgtcctgatctcgtctataccttgacggttgtctgtactcacctagcgcggttttctgtttctgctgttagactaaagtcagtgtgctcaaggatgaagactttagccggatcgtcaacttgaaaggaaccgagacgtctggaaatcgtcgggtgagtgtgatgtgatctttgaaggagatgtcagtgatagtcaaataaccttctgacgttcctcttgttggcttgggctttggggacgaacgtctcagatcatgttggcttatgaagatacagcagatgcgaagctcgctctggactatacgctcaagacgttggcaaggcctggtgggttattcttcctctgattctgttttttgttatctcttcctgttcattgtatctgctagactctcgactctggctcatacgttctctcggtttgtgtttctaggagatcatgtattccttgtaacgatcttgcccatcactctggtcgacgctgcctgtacgcactggttgtttggtctcgggcgtccgtgatttcatcgagagctaacgttagaaatgttgtcctttcttttcttgccttgtttgccagatctgagctacgcccctgagtacaaccttcaggaggacgcaaagtggcttcgaaagatgaatgacaacgcgcttgaagtgttgaaagcccaaggcgcgcaatttgaggacatcggagtgggttttcaaattctttgttttctttactttccgttctaggcgaaatggggcgagggatgttcatagtgactgattctgtctgaacttttcttctttgataaatttgcggagtcaaggccgatgtgacggttcatgttgcgcatggagatcccaggttttcactcatcgctctggcagactttgtaagcgttttcgcttatcgcgtctctgctttgcgctggactggccgttctgatgtgcttacctttgttttgtcgctctttttcttatctagcatgacgtcaacttgtttgttccctttcttttctctttgtctctatagttgactcctcgaagggcaccaggatgactagaggagaaggaaacagaaaaaggaaactgaacgcgctcctccttttttttcttccccgttttttcttttcatttcggacgatgcaacacggatataggatcgtgatcgggcggagaaaactaggaaggttccaaaagttgatcacttctggtagtgtatcccaatacggtttgtctttttcatttcctgagcttttctggtgggtacgcaagtgagggcgaggatgaggagacggggttactgacccatttggatggttctctctttctctcttttccttctctcggcgatcgttaaaaagtcttgacgcacgcgaaccagaacgtcctgatcgtcaaggagtgaaccctcttcttctcgtctctccgaacctcccgtctctatgcaactcttttcttttcctcgcgcgatttccctctgcgcctttcagtcgttgtacccatctttgtcttctgtttttgttttgtctcgtcttgatttgtctctatttgagaatgatctgttgtcccgatttatgtatgtttcctttgaattcacatgtgagtgcctttgtacatgaacggttaggcacaaaagaaagagaaatgtgatggtgaacactgatgtatcgatgtatataatatcgcgtgttctattatgaagagagttatgtaaacgagacgaagggggggagagacaaagttatagtacaacgttccttccgggtcattcttgatggaaggcccggttgaactaagaagagaaagacagagacagagaatgaagacgacagaaaatggaaagacaaagtatcgaaacaaaaggaagaaaaaaagagaaaaaaagagaaaaaagagagagaacagaaaaacggatgcaacataaacataccaagacagaagaggagaggatagggtgaattaaaaaacaaaagaggaaggaaagaaattcgttgatgtaccttacgtgatgatataaatgaaagaaaggattttgaaggagaagttcgagagacgatgatcgattgcatgaatgttgaagcattgttgggcgagaagcccgaaagcgaaagcaagggagacgacaagttgtgaagagcgcaagaatacagagtcgtgacgggagacagcaacgttggccatttggttgttcacacgttcaccaagatcaaaggaaaacaagtaagggtttcataatcggccaatccacacgtcgaaagcctggacggatgtttgatgattggttgacgcgtggtcagctgggtctgacaaagagctttattatctctagagagagggacagaagaaaacgccacggaagacagacctttgtgacaagccagacgccgacatgaggccacgagcgggacactctctggacgcattcgaccgagacgcagatctgattttgattttcatttgttgattgcaaacgagagtacagaaccgggtcgtcaggaagagtgttgaagcgcaccggagcgcatcggaggaagagaagagaaactcagagggaacgaacagaatgggcgagcgcatcaagtcgagcttttgcttcttctgactgttgctctggaggaagggaccgatccagcatcggaccctcttgaacgaggataagaatcaggcttgactggcagggagaacaaaaggacacgggtcgtcaacaagagagaagaagaaggaaaagaaggaggaagaagacaaagacatgagcaaggataatgaactgggcgggactaacaagcaaagtctgggcggcttgaatatccagatagaggattctaccgacatctcggtagagggtgtcaagaccgcgcctgcgttcttcctcgagctcccgttcgaacgcttcctcttcgtcctcggtgtcgttcgcaccgtgctgacagtcgagttcaaacaggtcgacgttttcgacgtgaatgaactctccaaagcctagctggatcatcgagggcgggacgtcggtttgctcacccaatggctgtttcgttcgatgctcgctctgaggatcgttcggcctttcgtcggataaagaagacgaccgccggctggttcggtccggatagagccgatggtgaatcgatgagttccccacggggtcgtccgcgggaaccttcttctttttgggtcgcccgccttttcggttctttattcggatgatttgacttgtcgtgctagtcggtgtgtccttttgactttcgacgcacggccggccgatgaccggtgtgggggtgggggtgagtgtggggatggagctgagggtagcagaaagggcagatacagcgacgatggggtcgacgctcgatgtctgtgtgttctttcgggatgaccgtttggacacggctgtcagcttttcagatgcagctcggaacagggagacgggattggttgtagttgatgttgtagttgtggttgtatttgtgtttgaagatgaagacgatgaccgtttagatcttctgttggcgctttgtgccatgttgatggtgaggatgagtgagggtgtgtgcttgaacggaaactgaatctatcggtagagtagaaggcaaacggtagagaagatggtaaatactacagaccacacacaacagcctagcgaacgacgacgtagatcaaagacgaggtggttaccaacgagaagaccgacagagcgacgagccagacttaagaaggattgagtgaggactgagcaaggactgagcaaggactgagcaaaaagatcaagaagcaaagaagttgagaagcgaggttgaagaaacgaaggtaagataaaataaaataatatgatagaataaattaattcgccggttgccttttg

SEQ ID NO: 1560 - DNA, 15926 bp, Xanthophyllomyces dendrorhous
caggggcaaggattaaggaacagagggaaaaagaagatcagggcgggggcaggcggcaggccagaggcaagcaccgtcatccagagcgggcgtcctacacgaggtgcgatcgatctgactcggtgctctcctttctgccgccgcccggcaaactcccgcactttgttcttctcccctggctaacattctggcgcacacacactctctcgcttgctcacacacacatatacacacacgcgctcatagacaccccaggctagatcggaaatcagcaagcctggtggccccactgtccttcccattccagagctctgtcccatcagccaacacttcgctcaactcaggcaggccggcttgttcaatcgcaaacgacgcagccacactgccgtacaacacggctgagagcaagaaaggtttgtttttcccactgtcagttcacatcggacgtaactttcggtcagacacatacatagacacagacacaccttcatacgggtcgttcccagtgatctttaagccagcgcagagtcctcctaggaaagcattccctccgcctggtgtagtttcttgtcaagtcagcgctgcatctatctttcatagaaagcactcccgctgccacgcacacaacagtagaaatgaacctaccagtgacatccttgatccggtcctgctcggacggtccaaacaccgccggcacccagcgagcctcacccaccgtgccatcagaccgaaccactccgaaacaggccccctctgccccactccggaccaccgccagaccgccaggtgacaagaacgatgccagctgaagggtgaccgacgtgatctgtgcaatcaaatctgttcgctccccagatggttcgactcctactaatcccagggcttccagatggtttgggctaaggtttggtccagtccagcgcaacgcgtttcttgcgtgtcagtcagcgttcttttcttcggtccacgaaacctccctcgtgcgcacacgtttgcacactcacgagatcaccttcagtcgggggcagatccgtcggacgttatctagttgttccggcacacaatcgtccttccggtgtgacagacatagaacagaaagaagatatatatatatgttttagtccctaaacacactcactcacacacacgcagagcaaatagaagaagagaggacacgctcaccggcattggttcccaaaccagattgaccgttcctctagcccatccgtcgagagagtcaatctcgtcgacaatctcgaacgctcgaaccggcgcgcacacaaagtgcacgaatgacggcggtccgttctcagcaaacggcgtccccacaaactgactcggcgagatccgaaagcgaggagtgagatatctgtttgaatgaagcgcatatcaacgtatcatcatctagagttcgacccctttgtatggatgctcagtcgacgattgcccgagatagtcagatcagagacctacttgaaactttgtagtccaaccctaccaaccgggtgtcagccaactcagatgcacaagaagcaagcgagaaggaaaaaggaagagaaaaaaagcgaaaaagagcccaccctcgtgcctcgccggtatacatattcaacgccctcgtcgtctttcgttcgccatcagttcgattccgaaagtgccacatgtctgttccgtacgcttctagctcgcgtccgattctatcaggaaagtcgtcccctttgtcgacgatcatccctaacgattggcttgaatccgtaggggagagcgtgccggagatgaaaagaaggcaggaacatatatgtagcaggtaaagataactgatcattagaaacccagctgccactctattccctcggacatgttcttactcacggaggaagaaacaatcgagaccccacgatagcataggtccctcccccaccgatctgtccttcgtccagagtgtgttcgatcagcttgccgtttgaatctctatactcgaactcgtcgatgataaacattcctgtagacgtgcggacggagatgtgccaagagccgggtgtcggtcagagtccatttatgttccatctttcgtctattttacaagaaacaagtccgagccacaagcaaggagtacatgcgaacccacccagagtgatgatccgtcctggacatggatccaaagctgccatgatgtgatgtgatgtgatgcgatctcggacgatacctgggcgagatgaacgagatgatgttcccgatctgcgggcacactacaaaactgcctaatatgttttggccgcgtctattaggaaagcgcagcaaaatctctagtagaaatttcggtcgccctcttttttttttctccttttctttttcctcctttttctcacacatccacttccgtcgagccaacaacccgatcagctgctaccctctcctcatccagtcatcatgtccgtccagaaccagggtttcttcgcttcagtcttctcttctgtctttgctacgtacgtccgcttgttgttcttggtctcttcagtcattcttcaggcattctcgattttttcgcctttttttctctcctccactcgtccatcagaagagaccctccaatcagcaatcgtcctttcgcctttcgttcatgtcccgtactcatctatccgttcttttttctcttgcctttctttctttcttgttcccatccttctttcctctctctcttctgcctttcctcaactacgcccactcaacacctttgttgtcctattcgcatctcggatacagtgctcacgccgaggaggaggacaaggccaacgatcagcaggtcgccgcttccgggcccgagtccgaggaggaggaggacaaggaggacgctcctgctgccgaggaggaggaggaggaggaggaagatgaggagcccgtcgatgttagtccgatattacccttttctttggctttcgctcttttttttctccttccgcgtccgatcgttgcacgttgagagagtctttggtttgttgactgcttgaaccatctttttttttccctcgctctcccttccctgttttatccgtgttatctctctccatctccctctcgccaaactcctcggaattgaaactcactctcggaaaatatcccgcgtgtcgataccgatccaatgatgacctttgccaaattctctccgctacctcgaacatgcgtcatctcccttcgtccatccatcgattccctcccgatcaggtcatgcccgagatccgtgcacagtgtgaggccaccccagagtgtgctcctgccaagaagcactttgagcactgcgaaaagaaggtccgaggtggtgagggttgggagcacgaggattgcgtcgaggagctctggcacgtgagtacacatccttccatacgtatcaatccgatcggtctggaaactttgacccgtcatcgagacaccgagatctgaatgttccttctctcttttcttccttccttccttccttcgcttactcttccccgtctcatcaacagttgatgcactgcgttgacgtacgtgtccattccgtttccctcctgttttcattcgtcacgttcttccagtcgactaaccacttttctgacttttcttcttcctcttccttgattccactcgactcaacacaggcatgtgccgctcccaagttatgggccaagttggtttaaagagacaggaagatcgtacaaaaagaaggttcattctcctcctacaccctccaccctccgccctcttcaataatggacgatgcggggatctcgtctccttttttcccttaatcttaaaaccaatgtttcaatcccttccctttcgtgccagtctagagagccgtgaaaagcaaagattgagaggagtctctttcttctcttcttttcttttcttattattatgattcccttttgtttctccctccccccaaaccacaaaccttttcatccttcttattaccataaccttctttctccttcttttctcctctttcaatgccatcatcattcaatcatcacataacaagtcctcacgcacacacacatccggatctcttctcatcggaaaataaggcaagcgttcaacgcacaagcgggtggtagagaccggtgcagtgcgtgcaagtcagcatgcggtgacaacctatcctcaatcaattcaaagctgtcgagactgcaatcggtcccaccgtcatcttctcccaaacctaccagatttccaacaatgtaccaagagaagaaccaagagagaaagtcaaccggaaagagcggaaagagatacaacagggacaaaaaacactaggcgagagtcgttcccagcacagcctcgatgtggcgagatgggctctacccttttcgcccttctctcgttcatccatccggtcagcatacatcgcacactcacatacacttcgtgtccgtccactgcccagctctctctctctctatacacccgatcatgtcgttagccgaggctgcccaatcaagaaaagaaagactggatgcactgagaaaaaggaaggcaggaggatcgtcgtcagccgatgggttcgttcggtttctctcctgatccctgtatctttataatgctttctcttccggcgcgttcgctctctctctctttcttcttcttcttttgaactgacgtgtcgcttccgtcttttgtacatgcgtctctgcgttgtatgcttttttgatccgactgcacgctcatcatgtgattcatgttggtgttgctcatcttgctctctctcctcgcaccctttggtcgcttggaacacgtctttttctgggttcgttcggacgtttgaccttcggatagactcgttcagatcaaacagcgaaactttgatccagagactcgatcagccaagaaggtatcactagcttttctctgagctctttccggtgttgtttgctccttcgtggaaatcaatgaccgagcatcttgcgtgtgtatcatcgctaaccttatgtatcttctactcttctcttcgctcttctactcttcttctccccccctggtttcgtcattcttcggtttccaatcgacctgcctaatggaacgttagttctctacagccgacttaccagagaccatcgagtctgccatctcgggtgtcgcagagcagatcgtagctgaggatgagctccgtcgacaggaagaactcgttcgtcttcattctttctttctttctcccttttttttccttctttcttctccgttcgcctttctgcctaccggagatctctgtattcgtttggtcagggaactaagagaaaagaagagggaagagagcatccagccgagtctgaccgagtgtatttcccctcctcttctttcatccctcacgcacatacctcgatcgtcgttctcagaacctactgaacattgctcccaagcgacccaactgggatcttaaacgagacctcgacaggataaacttgaagctgaagccagcgacggatgaagccatcaagtccatcattcgtacgttggtcataacctttctttgttaactccctttttcattatttttttcgggggacatctcctgatcatcaaggattcgtcttcgttattgctgttgctgttactgatatcaaatctcctctctccctgtgaactcatcttcgaaccggatcggatccataggtgaacgcctcggcggctcatccaaagatacatccaagcccatcgaccttgtcagcgccttggatgcgttaggcgacatggatgatgaggacgagatcgatggtgccaagtcggatgacgagtagggtagatagaccggtctgaatgaggagaagcaggaaacggaagccgaagaacaaccgaagaaaataaaagacgattcctcgtccctcagaatgggtcaaggaaacgcgtcgtcatacatacacacacatatacatatacacacttatacatccatctatccatccttcttcacacccacacacactcacctatacacatatacttgacttgtgtctatcttcttgcatgtacttttatgatcctcgtgtgtgcgcgtgtgtctgggcgcgtgcgtccgtgcgtgtgtgcgtaatggactgacaaaccgactggctcggtgtgatcggtcgagcaaagggaacgaaaacgaagacaagaacgaaagacattggaaaaaacaacacaatgaatagataacactcgagatcagatcggatcaaaggaatctccgtccctttgaacactcgtatcgccttcttcctttccatggcctcttcctcccgtctgcctcaagctttcccagcttgcacacgttcctccagagcatccaagagtgcctgtgcggtagatgcgtccttcactcgaaggaggtactgcataggtttcgtcttgtcgaacccttgaagcatgatcgattttccttgctggattcgaggggtcaaatcggcgtggcacgcaaagttctatatggacatcaaagatcgagatcggaagaagagtcaggcctggtcgatatgcaacagagaaaagacaagaaaggaacagaacgagagagactcacgatcaacacattaccggtcccttctgttcttccgaggacccgccccttgtccccactttcccctccttttttgactctgatcaacccgactccgaccttgacccatttgccatcatcaaacttgttgatcgaagatttgccttcccacgtcgtctcttcgtcttcctcacccacacctttctccatcaacgtagggtccgaagggatcgtaggagccggtggttcttcatcccctcctgttgcttctcctcctccgccgccgccgctaggaagggcgggagcggaactggaatcggcagcagcggacgtcgcggaaccgcctacactcagaggtgaagggaacacaggtcccgaaccagtcgttaaagctggagccggggcggaagacgagccgaaggagaacgatgagctcggcgttcgagctttcccacccggcgaggcggctccgaacgaaaagttgggtgtcccgctaggtaaccgctggaaagatggcgggtagggcacagcacctgtggtggtggcggcggcggcggctgctgctgtcgttgttgaaggggattctgtcctcgagggtgctccaaaactgaacggagagcttgatggtgtcgtggcagaggtaaaggagaacaaccctccttttggcgcgtccttcttttccgtttccttctttgctgcttcctctttcgaagctctctccgaatcctcggcggccaaaacagatttcacgatcgacccagccccagaggatgatgtcgagaccttcttcgctgaagactctgaaccagcggacaagttaacggccggcgctgatccaaacgaaaacccaccggtagtagttcccgctccagttccggtgttcaaaggtttccccccaaacgtaaagccagaaggtttcgtcgcgccagcaggcgtgctcgaagcggccgtcgaggcacctccgaaactaaatccgcccgtagaaggagatgagctcgaaccgaaagaagaagtcgggaacccagatggggatgccgaggatgaagaactggatgatgccccgttggtcgaagagactttggcacccccaaaggagaacccacccgagctggcgaatgtgggcggaacaaccggtgccgacagtgtggccttcgcctcctctcttggcgcctcagtcttttgggttgaagccgagctgatcgatgcggcttgtgccgctgcatcagtctggtcaatctccgacctgttcacggcgtatgatccagccagatcggacaacgtcttggaaagatctctgaacggatccttttcaaccagtgactgcaacaagacgagaagagaatggttcagtcctcgctggctcaagtaatggtcgaccagtttcttgtccacaccgttctcagttgaaacagggtcagacgtagtgtccttggttgtcgcggttgaaaaagaaagagaagaagaaggagccggagattgggaaggagcagccgttaagcctggagccgaggggaacgggtaggcgaccgtcgacgacaacgaagacggcttggaaccatcaggactggtcgacccggcggtgagagggacaacctttgagggtctaggtctagggcttgtaggagcttcgacgatggtcgattccgtgggcgaggcaggacggagtcggtcgatcgctgatggcttgtcaattggtaacttgggcagcgtgccggacgtggtcggtccccagggcagagagattgtcggcgcaggggcaatcgccggggaggaaggagcggaggattgcacggcggttccggtgaatggttgattggacgctgagctgaaggagaacgcgggtggtttagagataggcgtggttgttgaagcggcgccgaaagtggaaggagttgtcgacgaggatgatccaaaaggattggacagaggctttgcaggcgcagggtttaatccaaaaggattcgtcggaggagtcgacgtagagggtgagaggttgaaggaaaatgaggagcccgcaggcttagatttgggaagcgaaatagaggcgaacgggttggatggaattttcactgttgacgctggtgctgctgccgaaggggtagtagacccggccgatgcagcaaaaggattcgcgacagaagacggtccgaaggaaaacccagcagacggcttggatgcggttgagcttgagccaaaaacgggcgcagctggagcagaagtcgaggccgacgaaccgaaggagaacccccctccgaaggcctgttaatgtacgtgagtgcgtgcaggtggtgggtcagtcaagagtctgtagatacaactaagaaaatacgcctcagaagatacgagccgacagaacttaccggcgtggaggatagtgtaccggaggctggaggtgtaggaacaggcgagttactggcagatcctagtctggaagaaggtagtggtcggattctgagaggatggtggaacaggattgggcaagaaaagcaaacgaaaggaaccgaacggtatgaatacatcacaaagagcatcacaaagaacggcagatcccaatgacgagaccagatcgaaaggcgagactcacttccggacaaaaggctctggagcttgttttggtgttccatcctcggtagcttttgactcgttctcatcctcctcatcgagacctccgccttctcttgtaatctgacatgaagaacgagtggatgaatatttcttcagcacacttcaactacacacacaccagtttgactggcttacctgtgaagtagctcctcgcttggccatggctctacaacggtcgcttgctcgtggagatgatggtgatggtgagggtgagggtgcgagaaagaaagcgtagagaaagttgaaggtgggatcgtcctgatatttgaataatctgatttttatttgatttatattacttaagtcaaatcacgtgaccccggggttgttaacccctcaccctccgatcgtccgtccgcctgccttctcttgttttcatccggccactctcataacatagagcacacagagctgccatcccccattctatctgtatcctaaagatgtacatcctatccgtccttctgtcttgcttgctcattccggcgtcggtcatcggcaagggagtactcatcagtcattttaacatcaacactccttcttcaagttctccttgggttcttggagctaccaacgcacttacctgggagttttcaaagagtttgttcttttctagttttcatcctttttctttttcttttttcttttcttttctttcttccaactcttttctcacgttgtgctgatggtctatctcgttcgcctttttcaaaactcttcaactcgtcaactttccactttcagcctccgttctccagttcgatgtcgaactcgtccgtttgtctgggaatggcatcttgtttgtggccaagaatggtacgtgtgttgcttgtcttgctcttcgtctttctttcttgttctctttacttatcacatgttctttatcttggctcttggtgataaagtgccgataaacgcaaagaaagcagttatcgatgtgcagggtattcccccgggtgatgactactatgccattttcttggactcttacgatggctccgtaggtcttgatcctcatccctaactcttcttcactggtatttgttctaacttctttccttcgccttgcggttgtctcatcagatgtactcgcgatcttccaagttttctatcctcgcgagtgagctctcctcttcgccttgttttcctctagccagttgatctgatcgcatatatgcttgcttaccacttttcctttttgcaccctgttccagacaacaccgcatcgactacagttcacgacgcaaccatcaccatgaccatcaccggatcgccaaagtaagcgccgcctttctcttgttcatcgtgccttgatctctcgtctcttcatggctgatccctctgtcctttccctttcttggttctctcagccccatccgattgttcgagacgaccttccctgcccttcagaccttgacgtcctcgggtaccgaccttgctggtcaagttggggcgtatgttgtcccgggtagccggcataccgcgacgaccacctcgtccgagaccagctatacacatactcctactccgaccccgaccccaacctctacctcatcctcccaagactcttccgaagtgacctcacgtggagtgaacaacggaaagagagctgagctgtcgtactcggtcgtgtcgagcgcagagaagacctttggaaacaacgcggtcatctctgttctgggagttcttgttggaggagccgttggattctggaatctgaactgattcccgagatatagaaaacaaaaggacaacgggttcgttgttggaccgatggatgaggtctaaatcgtttctgttgtcgtcgttcttcaagtcgtcctcttttttccgaggaaaagcggaggccgcaaagagatagaagaattagagatatatccttttgattcattcctgaagtgaatatatgtttcttcgttcccttgtttctatattttcgagttgtgtcggccaaagaacacttttatcgtcatcttttttgttttctctctgtctctgttctccttcaaatcgattttctcttccttagctacgattgctctgtagacaaaatcaagggatcacccccttttacttgccttgctcgactcgtcgactctactttcttttcccatccagatctccctcgattgccatcttctttattcttgctttttactcatccaaatgaacaatctcttactctagctcctataacaatatgtccggcttcttatcaccacccttatcgatcaggatggcatgtctcccctccactcccaccacgttgataacacacccgtcatcaaaagaataggtctatagcgcacttgaactcccatcgaaagtaaagcaaatagacgacgaggatctaaagagaaattttgaacgaatacaaattatgcgtgtagcctttggggcttacatcattccaaagagttccggttacatcaacgtcctttagccgagatcccaagtttatccaactgacttggccagaagaacagctatatatcttgctgttgttctcatctctttccttttctttctccctctgtctctcttttttttttgtcagatattcaaccacgctttgcccactcacaatgtcctatcctactgcgcttccagatgtgtcgacaaaatatctctttgacgtcaaggacaaggtcatcctcgtcaccggagggtcgtcaggcttgggaacgatgatggctgcctctttcgtccagaacggagcgaaaggttggtctgtcttcttctttctgtgtctctggtatacttgtacgatggcaaagggctgatcgtgatcaacactaatgtctgaatgaccacaacttcgaaatcgcccgaaacaagtctacatcgcctctcgaaagttaacccaacttcaggaagtcacagcccagctgaacgggatcggcaaaagctcaaactctggcggctcatgtgcctactttgttgctgacttgggaacaaaggcaggatgtgactctttagttagccagctgaaagaaaaagaatcttccctagacgtcttggtcaacaacagtggaatgtcttgggttagtctctttcgcgtttgtcccgaatcatcttttggaagtgttttcaaaccgctaagatcgaccgtctctcttcgtcgtctgtagggaggaccgctaagtgatgagttccccgaagtaggatgggacagagtgatgagcaccaatgtcaagaggtacgtcggctttatcttaaccttagcatttctatggagaagctgaccatttccttctcggtttaccgttgtgatcgatcgctcatgtagtatcttctaccttgttgctgggtaagattccttgatcccgataactgtacctcatagtcacactaccaagtacctccgagcttatcgagtttcatcatggttcatctatgaaaattgaaactagtcttcgacccctcctcaggaagaacgctacagctctcagtacgtcatcgcccattagtcttgacactcttctctgcctgcttttctgatcatttgctctcttactgtcctatttcaactattctaaatcccagaccctggaaaggtcatcaatgtgtcttctatcgcagggatcgtcccatctgccgaaggaggcctcagcaagcctggatggggtgtctacagctgttcgtcaacttggttctttcaccggtcacaccctaacctgatctcttttcattgcacttcaatcttactcttacaacctaccaacagatgcaacctcaaaagcggccgtcaaccatctcacaggtgtcctagcaacttctttagcagccgaacacataaacgtgaatgccatcgcccctggaacgttcccttcgaagatgacatctttcgggttcaagaacgcggagaaagaattgctggctgaacaacctactggcagggtcggtatggccgaaggttagttccttttccttactctctttctttctttcttgtttgtttgtttgtttgtttttccttcgtgatgcgtggaaaaaaagaactgaccaccagaaaaccctcacttgcctccctctacctctgtacactgggcgaggaatcgcagacatggccggtctagcgatgtttctagcttctcgagcatcatcccacgtcacaggggcaatcattcccgtcgatggaggtgctagattgggcgcggagagtgtgaaaacctctcgagagaaagcaaagctttaaagttagcttgtttgtcggttgccttctgccttctgccttctgccttcttgatcttttcccttctcccgtctctcttgcgatgtaatgtatcatgatcgatgtattagttgatcgtccaactgcttcttgtcactcctccctcttcaccaaaactgatacaagttccattgaattgcgcaaaatccgtcattgacgaagtaccaaaaggaaaagattttgaaagagtccttcacggaccactctgggaaaaggaggaaaccgatccaagacctaaacgaaacacggaaacaactctctacatggctaagatcatacactacagaaaagatttgaaaaatcaagaggaggatgaatattcaaaaacaaaaaatacaactcaagatcgttcttctggtctgaaggattcatatcaaaggggcagacatagccctggtgtttctcgaacacgatacctccgatgttctccttgatgttaggtcttccgatctgaactccatccttgatagggccagtccatcgctcatcttacagatcgaacgatcttgtcgattgtgatgagcgtctccgagcttgacaaaacgttgaggagaacctctcaggatctcgtacggtggcgtaggaaacggttgataccgaggaggaggaaatggataggacgaggtctgtttgacggtcgtgtgcgggagagcgttgagcgagatcctaaatatcaatccgaacaggatttgattactttttgatccatcgtgaaaagacggtagtagatagtcttacaacttctggggatctcttgcttcgatacgtcgtcgacaaggccatgtccatcggaagatcttactgagaatccaaacgatggcgtgataggagagtgtctacaggacacaaagatagagtgtatcagtgatgtgatcgtcgtacttacgacgcatcgaaacagatcagataaagaaatatgtcgaacccaaactttcttgaaagtattgaagataaggggagtagaagaagcgaaaggaagtgccaggattgataacagccaagaatccttctggatactcatttggtgccctggagtaggaacaggaaatcagattcttaggcgctgactatccatgcggggtaaggagagccaacctaccgaaacataaccggtatcccttcattatcagatccatcacaagtctgcttccaaagatcatcccccacgcgccgttcgactgagtggacagtagctgatttgtggaattgatcaaagcagcttgtctctcgagctcgctcgtcaagttttcaatcaagcttgaagtttgggccagatcaaacaggacagaagacgagatcgtctaaggtgttgaagaaactcatgctggtaagggatgcacgctttgaagcaggcctcaatagggaacagactgcaaactcacctgggtctgtaaagcaatgttcagagagatttccagaccggtgtagacagactgtaaattcgattgaactctttccatgccctatgaaaaaatcccgttatacatcagtaactatgactcatgagggatggacggaaggaagagtatacccaccgaatgtgttcgctctactgttccctccaaatttaccagctttgtagcgagttgctcggagctgactgctaagctgtcggtcaatcgctgaagcacaacttcgtgttgctcagcagtacgctctaatgaggaatacaccgtctgcacgaccctagagacgacctcctcatgctgtatgagaagtatgaagataatgttagggcacgacttatatcccaaactggcgatattatggagtttactgaccgattcaaaattcttatcaaacgtttctcgagtcttctgtaacataacatccgatactccctccatctctgcttccatttgggttttgattgaccggacgagagaatcgatagactcctgagacgtccgggctaattcactgggagaaaagaaattggccatagatagatgaatatcagataacgcttgtcgagatgtctcgaaatcctgacaaatccatcaaagagaggaccacatcagcttgtcatttgataagtttgataaaggaaacagcggaaaatgataaaaacatccgaccgaccttcagtccatccttccactgtcggacgttcgaatcaaactcgttcatccggatgtccctttccctggcttcttgctggaggactctcaacaaagccgccttctctagtgtgatgttttgataaaccgatcgtgcaatatctattgactcaacagacgaatggataggagatggttgtttagatcgataattgcaggtgttatagaagaacgaaattgatgagagacaaagggtggagggggagggcaaggaagaaatgcgctaccagtccttacctacggaatttatcctttgcaaggcgaaacagagctgggctgaggatcaagccgagaaaaaattcagatgcagagcgcagatgcgagactaattgaacaaactgttcttactagcttctctcagataaccactgtaagatgtccacatctgagcgcttcgagctagagctcttatgtactcgaaacgaaaaaaaaaaaaaaa

SEQ ID NO: 1561 - DNA, 25472 bp, Xanthophyllomyces dendrorhous; identical to SEQ ID NO: 267

SEQ ID NO: 1562 - DNA, 11416 bp, Xanthophyllomyces dendrorhous
ttgttcttcttcctcttcttgctgctgctgctactgccgccttagtgggggaaggactaggttaatgcactgtggctgtgccaatcacgtgaccgtgcgcctaacaccttccctgtgttctccttccgcttaccttccatccttccccccgacacaccagcagcaacagcagcctcgcactttctctctctctctccccctcatacacccagacaagccatgcttctatcagtctctgcagctctgtccatccttccggcgataggtaagagtcttttcggcagcttgatcgtcacgcctcttgcggttttacttaccggtttctgatcacacacaaaccctacacttctttgcaccgtccttctttctttctttctctggatctgtccggttatatgttggatataaaacacgacatgatgcagctctcgccttgccatcgtcatcgtacaactatccggacgaaagagcacttgctagtcgtggccttgttaagcgacagacatccattcctgaggtctgcacctatatttgccaggatattgaggtttgtgtcgccttctccccccctttctctttctctctttccttctccttctctttctcccaacctcacagaacagaacagaacagaacaggagcacatcacttccaagctcctttttgactgacccatgagctactgttcattctctctcgtctttcccttgtcttctttcctctcccttttgtaccgccccggatcggacactggacacagtatgctctttcggttcgtttcccatacttccttttgcttccctctcagtactccatcagtactctcctagctcttcccagctatgctgacctgtcttgtcccttctgtcaactacagtcgtgtggagataactcgacctgcctgtgcaacactcgcgttctgaattcctgtttgtccttcctgctcttcctactttgtgtttcaactctcacactctgctctgaaacacctacctgatgctcttggttctttcagttctcaattgctcagagtgcaccttgctcaacactcagcaatctaatatcaacgtctccattctatcataccagtactcgatagatggtctgtcctgctttcctccttttctctatcttctccttgctctttctccacttactcaccaagagcatctctacacagcctaccgccaatcttgcagtatgaccactcctacacccatcatacttcctaatgtcaccgtcacccggccggctgccaatttgacgttccctactagcgctccttccaaccagactggcaactcgacctcgcactcctcctccgtctcctcttcgcattcctcgtctgtttcctcctcatcttcttcatcagccctgccgtcctcttcgtccatgtcttcgacaagctcttcctcagcctcgatatcacctacagtgtcatccgcagcagcttcgtcaagcacgtcggccatatctggagcaaacatacttcaaaccggatgggtcaccggcgtcgtcatcggtctagctggcttagccctgagcgcaagtctgtaattgcttcttctttttttttcctttcctctttctctctttctcacacacctgcaagtcattggacagtttccgttagaatcttcctccttcttgttctttcctgcttgatttcttattttatttttccccatctcttctctatattatatttcatccattttttgcttggcagaaggtctcgaaaacctggacgattccccctctctcgatctcctttatgctctttcttcttctttctacctatttcatccattcatagatcaaatcggatcctcttgtcttttctaccgataatgctctttgtcgtcttgatgacctgactattcggtctcatctgaaagccagcaaagactattaatgctcagcttcccttcggataaggtgagttcgagagtgtttacgctcaacaaaaccatacaatacactatagtcatatgatacaaaacaacacacgatgaaatcgggtcaggaagaaaacaaagaaaaagaaaaagaaaaagagaatggcgatatcgaatatctaaaacggagaggaaaagttgaactctaaccaagttgacaaacaaaatctctacttgaactatacatcttcctgatcgtcatccgattgctcctgaagtttcgcaagtccatcgttcacatcatccctagcggcctcaaacacttcaaacatcgtcgactccttcctctgcttcttcttctttccttcttctgcttcttcttcctcctcctctttgatatccttggctttcgagtcggcacgagactcggtagagttggactcgaaaccagagccagactgagttttggagccccaacctagagatcgggagaacgcttcgggagacctgtcaagtaatatctccaagtcttcgtctctgttttcccccccatcccctcaagaacaaagccaggcagggattgagttcagcgcgtatgttcaagatgatggaaggaaaaaaagaaaagaaaaagaaaaaaaaaaagaagaaaaaagggacgaacgcaatgatcttgtcacctgcgtcgacgaggttaatgttatcgccctcaagtctcaataaatcagcagcttgttcatgagccgtctgtttcttttctttggtagaataattccctttgaatttcccttgggcgatgacaagagcttccaaccggcgtttggctcctgctttctggaggatctttgtctcaaccgtatgagctgttaccagacgaaagaccaggacaggccgggtctgtcctatccgatgggctcggtccatagcttggagatcagattgagggttccagtcctggtcgtagaagatgacggtatcggctgctaccaagttgataccctgtacacgacacgaaagtttccgatgaaagcctcagaaacaatccacaagcttgagagagagaacagaagaagaaaaaagcaaaaagagacaaaccaaaccacctgctctagtagagagtaggaacagtcgacaaactccatcttcttcgccccctttattaaattcctccatctgttcccgtcgacggacttgaggcgtacttccatcgatccggcatacctttagtttcttgtattcgatagcccagtcttcaatgatatctagcatgctcgtgaattggctgaacagtagaacctacgcgccatgcgaatcaaaacaggagacgtttgaggaaaaaagcaagtcgacgtctagatcagatagcgaatggagataacaatacggaccttgtgtttacgctcaaataaagcatcgagaagtcggttaagaaggagcatcttgccagatgcattgatgaggtctgtattgacaatctctgatcccgttatcggatcaataggccagtcaaacaagaacggatgagaggcaacctattaaaagtcagaaaaaaagaaatgaacagcccattcggaaggatacaggcggtcggaagggaatgagccttctcacttttcggagttgcatcatggtgttttgtaaacgcatgttgtttacggattttcctgcatgacaatcaatcaatacctgtcagatcaacgaccataggccaagaagaaagaagggcgatgacgaacgggctgctttgttagagtactccttcccaatctcaaatgccgagcgggtatcttcaggcgctccttggaacagaccattgtcccgttctttctccaattgcttaaagtatttgttgtcgctttcgatctgagcatagtctttcttgggaactctgttcagtcgacgactctttctggggttggcttcatattcctgctctggttcctcttctgactctcgagtctgctgcccatcgccatcggcagcatccccgtggtcatcctcattaacatgttcgccctgggtctcccccgacttcacagcaatcaaaaactctctgatcgtcctcgcggccacactctcgtacaactccttttgcatctttgtcaacggtgcgtgaagaaggtactctttctttggaggtaacgacttctcgacgtctatcttgagtcgacgcagtaggaaaggcttgaggattgaatgaagggtggtgacaattccggtggattgatctgatgtcaacaaggacgtcttggattccgaacgggatttgatatcggtgtcgagatcgaacctgagaatatataccagtagatgtcagctggagtttggaaataagggatcgtatctgtcatccttcatcaaacttgccattgttgaaagctatctaggtcgtcgaaaatctttagggtttgataaaggaaaggagagaaaagagagccgcgacgatcagtctatcgacgaatatcatcaatatcaggttgactgttcgagaaacccaatcgacttacatccggaagaatgaaattcaacaaggaccacaattcactcagattgttctactctcgccaatgagatagatccgggcctgtaagaacgcgttctcgtttgaactcagttcaacagaggagaaggacttggactaacgtgcagaggagttccactgagaatcaacctgttggcggtgttgtacgatttgagctcccgtatcaacctatacgagagaagcaacatgtttagcaggcgtccaaaatcgggagctatgaagaggatactcacttgcagtccatgttctttaatcgatggccttcatccacgacgatatatctacaagatcatttcaagaaaatagtgaatacccaatgacacaaaaagttctcggcggtaactcagacaaaagaagaagatatcacctacttccattggaagccccgaaagaaagcactgtccttcatcgcgacttcgtaactcgtgatcaccaccgggaaggtcttcatcgtgtttggctcctccttcacgttcttacaagcctgaatctttgccctttgggatctcgatgcgttctttggcatcgtcacacccaaaccaggaattagtttaccggcgtaggcggctcctttcgcatctgagggagcagaaagccgggtcttgcgcaacacagaacgttcttcgggagtacctagtacgtttgagattaagtatggaaagtcagagaagaaagggacaaagtggaggagggaaaacacaaaccatgatactgaatagtaggaatctgagttgtcgagaaggtgccgagagaaaacaaaagatggagacaggaatctcaactacatcgctcaaaaaggataaatcacacaaagcacagtgatagaggagaaacgtacgtcgggtgtgaacttggcaaactcggccgaccaattgtgcagtacactcaatgggcacacgatcatgaacgctaccaaattagatttgaacatgagtacgtgggagagaagactgattgaatagcagtctaagaagactcacgtccccaaacacctttcgttcgcaggtgagcgatgaaagatatagtctgtaatgtttttctaagggatgtattccgtgaaatgatttatggacaaattagatggcaggatacgactcataatgatatcaacgagacacatacccaagtcccatctcatccgctagaattccattcagaccattctcataaagcgagattaaccattgaagtccctgaatttgatagtctctcatcactgctccggttacaagcgctggttgtccttctgctaattccggtgggtccgtttcgttttttagacttgcagagctaggctccattttgagctttttcgacccctgtaagaggtggatatgtacgtttaagaccggaagatgataactataccaaacagacgcttgtttacggccacagagatatgatttaagggaaggatgcactgacatttgtgtttgtaaccttctttcctcctacagcctcttctaaagcctccaactcatcccctgcggcctttcgtttgataccagcggcattgcctgccggcttctttttttcctttgctccatcttttgcggtctctttcttaagcttagagcttacagagctctctgcatttcgtcgagtcatatgttttggttcgacacgagactcggagtgagctttggaggtggccgtatttgcactagcgcggagtcgagcttcttctttcattcggtcttgacgctgtctttccattttgtcttgaaggatctgtgtatgtggcaaagtgctcagaatcgaaacaggctggatacatgagaagagagaagaactcacttgggtatagattcccgattgctagaaaagattgaagaaacaaaggcaacgcaaaatgaaagattaaatcgttgttagggtgcgcgcatctatcgatcaggattcttaccaagccaactttctttgaaaaagcaaggaacgacagaacgaaccttgagaagaaagtttagtcgtcccagcctggatgatttttgttgctacacgattaaaaggacaggtcgcagaaggaagaggaagcgacgatggaggaaaatccagacaagagcacacgaaagacgcgtgttaattatcaacacgtcattcttcaccgacgcgtcctttcgccttccttttccttttcttttctttgctgccccaaagcgaacgatactaaaggacaacgagcaaacagacgaacctcttccatttcctggtctgcatctagatcgttcgtgggtttctctacctctccgtcatcctcatactcctcgtcgtcgtcatcggtctgtttgatcttatcagccaaccgaccgggagaaaccgatagagaagaccctcggtcggctggtgtcgacggcgagttggtcgttttcgttgttgccgtagagagcgcaggagtagaagccattaaaacagactgttttactgattgacactgaaaggcaaatcaacagagagaagctagagagtgagtgttagtgagtatgaatcgatttgtttgagagtacaagtgtggtgctagggtgatcgatcgactcttcgatcatggtcacgtaaccatccgcacgcgtggttacggtcgtctggtagccgcctttttctccttcctgccttgatctctcatcatcaccaccgacctcgaccattgacttccttctctttctctctcaatctaatcagcaataatgtctggaccagcagcagccggtgggtcttgtttggattatgtgcttctgctctatcagagattctccttatcttaacaagaacttggctcgtttggttgtatctctagccggaggaacaaagttcgctcggttcatgaaccaccctgccggttcgtatctccctcttgtttcttcccttctctttcttttgggctcgctttgtttctatctctctcttgttcacctcagaaatactcacgcgctctggttctgttcgctgttggattgaatttcatagggcccaagtaagttttcatcacaccgggagaacttttttctagccgaggacatttgtcggaatctcgtccgacctagtcattgcctagcacctactctaacccatcttctctctcgtcctcttgatcatccttttcgaaccattttataacgttctgcgaatctaaaggaccatcttcttctgggctcctattgcaaagtgggctcttgtcattggaggattggctgatatgaaccgaccggccgagaaggtctccgtcaacgccaacctgggtatgtcctcatcttgcttcgtgttctcttcctcacttgatttctgagctttccagacagctgagaacggttgcttttcatgatacaattcgaatcttgaatagctcttgccgccaccggtttcatctgggttcgatactctttagtcatcaagcccgtcaactactctctcgccgccgtatgtcttgccgattgctccttatctatctgatactctggtcgccatacagcaatctgacgccaatctcgtggctcctctcattcttgttttgcaggttaacttcttcgtcggatctaccggtgtggctcagctgtaccgagtctgggagtaagctttttctattatatctccgatcaactaaagggaaaaatacaataaaaaagttactgacttgatcaagttgcaacttgctcatcttcgtctagttggaggcgtaacaaccctatcgaggccgccgctgccgacaagatcaaggaggtcaaggcctaaacgaccgaactggcctctatcctttgtcttttttgagtttctagacacaatctgtattctatcttggccttattctttcgatttgatgaaactctaaattttcttctcagaggtggatcatcgcacaagcgaaagaaccggggctggttccagtcggctcttctcatatttgatgcttattttttgcacttgtacctccgtggttcacaactagcaatcccagctttggtgaaaaaagccgctcagtcgcacaaacgcaagcgaccgtacaacccaatcttccgtgtatctcttcagcgtcctacgaaaaggttcagcatgctaacggaacttaagcgagcatctcaggattagaagacacgggttcaatggtgagcatatatacgatgatggggtttgacaaagaagaggaaatatgatatttagtgggtgatatagggtgtagtatgtagaatgcgaaaggatgatgaacggaaatgaagtcgaatacacatgagtgaatgtccagatgaggaagggaaaagacaagggtacggatatctatcaggagaagtggtgacaagccgatgcaagaagagatcgttgccaaggaatctaagaaaaatccccttcgcgtcaatttaaccgaggagatgtgggaattgcaggagttgaactacgagtgatgcctatcgaaggtgatttcttcctgccgatgcgagtccccatctggaccaacgtttccagagaagcttgacagtttatccgtactgtgattcgtattgggtagctttggttagcctgcggagttcgatgtgcaactgaaaagatacaatatcgctcacaatcttcatcccactgaacagcgccatcctcaaggacgagaacaatagtagatccacctagtatatttcaagcacacacaggatctgtgttagactgaatgaacgaccagccatgtaaacgataagagatactgaccaaatgcaaagtacccaaactcctgccctcgaacgacagtgtcgccagactctacagtgtgcacgatggttcccaccactttacagaagaaaccgattccgtttctcgtcaatcatcgagaaaaactagaagagtcacagacacgtgaacaagaacatagaactgactcatagctccaacgcagatggcaaacattcgtccaaacgtaggcgagtcgatcgggacgatcgtcctgacattctccccgtacacatcaagctgggttcggatggcctgagggttgacagtatagtacgcgccttcgattttttcgatctctcccacgaccccgtccacaggaacgctagataaccaggacgataaggagaatgggttagctgggaatcggcagagtatgtgtgaattagggatgaaggaaagctcgtactggaatcggtggtaatcctgtaccaagtagaacatcattatagttagttgaattctgaacgcacagataatagaacatgagatagaaacgcacctgaggagctaatcggaagacagcaacagcgcccccgtcgtacctgtgggcctcctttccataccgatcccctaaaagtcgctcgattgtgaacctattcaatgatggcaaccatgtacaagtcaacaatcacataatcatgccaaaaataattcaagtaacaaccgacgaattactcactctcttcccttgatccagatcttcttagcatcgcttacagtgtcgaaagccataagacgacagtcggcacaagaaaccagcgtattagggtcggtcgggtcactgacagggcgcacttccggctttaattttcgataaaagaactgaaacaagcggaatgtcagtcacatccgaaactatagatatcgttctgttattctatgtagatccaacttacttcattaaacgtttctatgatggtaagagtaacaacgaacagttttacaagaatcaataagtatctactcatacagtctactgaggacttctcctgacaagactcactgaatgaatcaagaggatccagaatttctataaaaacgagatttctcaacaatttagttcataaaacgatgaccaattcagataggcgaacgcatgacgcggttcttaccatccatgttcaaccgatggaaagcaatgaacggtgcgatatcggcgactgattcaggcgagtcgtacttgatgccctgcttgaaggacatgttcttgagaagccttcgagctggacaggcagaggacgtcacaggacgtcaaaggtcaacgtagtgcgagcgagagcaggaaattggatggacacgaacctcgaccaccctccatacgcgatttggcgcccttgtacaacactcggattccaagtctgacatacacagccatcttttcttcaagtaattgacctgtctgtcggtcctggacgagaatgttggcggaatttgcgcctgccggaagagcgcgcgtaaacaagatgatagtaagtgcggattaatcagttctatgaacaaaaagttgagataacgggtatctaattaaaaacacgaaccaatttggtaagcaccgctcgacaccttggtgaacactttggtcatccacttccgttgagctgagaatgaaccaacatgcatcagtaagaaaagagtttgttgcggccccagcatgcgaaacatgattataccttgcgaagatgtaacgtagttgccaaccagaattctatttactcttgcccagtctgcactagcacagacctgaggacgtctccaatactgattagtgctcaagaaacacagataccgtttgatagcctgcaataatgatgaagagatacatactgccagatgagtaacaatatccacctcagctctcttgctcagtctctgtcggtggcagagcggacactccttgatgttaattaccctctccaaatcactgtccggccctagttcttcttcttcttcattctcccgatcgtcatcgtacgggattcctgcctcgtctgtcaacggaatctggtttgtttccgacgttacctgatccccgttctgcgcagcacttgtcagatttaccttcggtatttccgctgaaggctggccagcttctggaccagtgacagagagagagatcgcgtggtttggttggcctttcttatcaatcaaatcgagagaaggaacatcggcagtattgggagtttcatcactgaaactcggtgattcttctaggccgacgtgcttcttctcggttttggtcttcttgacctcttgctcgagggatttaataacc

SEQ ID NO: 1563 - DNA, 60818 bp, Xanthophyllomyces dendrorhous
ttaataacctgttcgatggtaagctcgtctttctcgggatcgagtaagtatgacgtaaagtagctttctaaggtctcgtctgtaagagtcgatcccagagagtcgagcatctgaggtacaagaaaagacaatcagaagtttagatagccgtcgacgatcaatcttgcgcatgctcgtccacttacagcttgtaactcagtgaagctgatcttccctgagttgtcatcatcatacgatttaagatactctcgccaaaacttagataagacacaagtcagtctcccgaaagcgtcactgaaacctatgaattgcgttcaccttctgtcgcaatgcatcgtaaggctcgtacctaaataaggtcatagtcaatatatatagaaccaccaggatataacggagaaaattacttactttgctcgaacggtgatgctaggcttgtgcttggtctcccaacttggatcttgaggggtggatagttgaagctgggcatgacgagcatgggaaggacataaggatcgatataaagtgtctcgctacttaggtagcctgaaaagagggaaggaagaccaaccttgaactctctcatcgcatgttttccatctccttcatgcaatccagtattcgcatcaggttcaggggagtctgccaacaactcagacagaggaagcgtggccaccccgacaaagtcgtttcccgagatcttgtcccagtcgagaatgttgaattgaatcacgaaagaagactcaaatttctttacgtgaaatagtagtttttcgtcccaaacaggattcaatctgtagtccgatagaccagaacacaagtcattattgatctgtttcagagtcagaatcagaactcagatgtgttgttctatacgtacgagtgtcgaatcactcgagttctgaacactttcttgccgaacgacgtgacaacgaaaggctaaacgtgatcacagaccatcagcaaacaaagatgcgatgttagtcaagaaaacttgaaacacatacatccatatcaaacccagttttcaggactgataggaagaaagaggcatcagaaccacgtgcaacaactacatgagcgaccatattggagaaaatgctgctgtaccaacagttcttcagcctcggtaaatcttctgcgctcttgatttccaccatggcaactcctaggatatcgctctgagtagaataactccaattcttcttggcgctactcttcttctctctttttcttctggatgctctggacacgaaagatctccctccaggcgtcgccgcgactgatcctggtccctgaccctgtggatcgaagtatcctggctttcttccaggcaaaagcttaccatctggtgagagcgtaagtccagctatgggagtagatatacccgaaggactcaaagcgggcgaaatcgctatggctgatcccggtgtcatatcgctatcgtcctcgtcgtcgctcgagtctgaggaaacgctcagcccatcgtcttcttcgtcttcctcgcctgtgactgttccaatcccttcgaaggcggggaccgaatggagattacgttctgaagcatgtttcagaaggagtgtataaacctcttgaaagttttgcgaagagagtgactcagaggatagagtgttcggcgaggtggatgaaaggaaccctatacggaactggatggacccagtggcttgagtacggctacgagacgaggcaagagcagaggttataggctgaccgtaggtgtaggatgaagattgagtcgggtggctatgattgaacgtgtgatatatcgaggctgtacgtacgggtaattctggatcccatgcaaccgcctttccgtctggaaaccagtgctgcacctggagagcggtttcacccaagtattcctttcgaagaatatcctgctcattgtagtaacagatatggcgttagacagagaagataggggactcagaaaggccttgatgtatgaatatacttgccttgtcccaaacgacagcttccaaagctccgagcctatctattaccgacccgtaaattggaaagtcaaacgttgactcattactaggaaacacaggatccagcgtttttttaacaactggagttgtctgtcgatttggtacaagggtcatgaccacgaatctaatcaattaaaccctcaaaaatatcgtcaacctcaggagtctagccaactcgggatgtttatgcacatacgggtcgctgctcgtccctttcttgtctttgcctagcaagtcgcatccgctgattacttgaactcgaacaacagcaattgggacctctgcaacaacatcagaaccaagacgtgggtttaaaatagcaaggttcaatgtcagcctcggcgatcttgatcgcctttctctttccttcgtcctcttcgatcaagactagtggtgaagtatgttgaataggtgaaacacaaaccatctgaacaaggctttgatttcgacctgtttgagctgacggggttcagatgtttaacgagccgaataggagccattatgtttcttcgctatcgttgagatgaggagcgcaaaagagatagatggtaataaagatcaaaattctagttgtcacagccagaggacagaggtaaaggggtatgcagtattggccgcggaggaaaagaactcacccgcccatgagtcctggagaccttttgatccaaagacatgtccagtgtcgtttagactgtttgcgattctaatcagagatagctttgtgaaggagggtggtgaatgatgagtggtgtgaagaaaagatgggatggagagagccgagtgcggaagtgatctgggggacgactccgaagatggacattgtcacccggccggtgtggcgtccggtacagcctacacatccgcttattgtaacatagccattgattatacatgccaaacctcaacatcgaaataactttcttcatcatatatctttacaatcaacatcttgactttattttccacttgatcgcctgcttgttcggcttgtccggcgccttttctcccttctcttttcccaaaaagtagttacgatccactaagaacaagccggccgtaagtgatgttgagaattggtttcagtaagccaagatggtagtgcgattaccagcgagacgatgagacagaaggagaaacgtactggctgtcgcaaagatctgcccgttcaacatctggtcatacatctccgtcactatgataaatgtatagatttaagcccttggttagaaaggtataggatgtaggcgatatcgagtattaattgaaccactcaccggtctggcattcccacctaaccttaccagatacttcatcaaccatggtaaagaacactcgctttatgcccgctctgtagcaagtatgatagtgatgagaatagccttgacgctgaacctctgcaaccaaatgtggtcaactcactctacgatccatccaaaacatcgatagcatggcctgctctctgccaaagcccccgatttcgttacacgacaaacactacaagaatgggttgagatttgatgtcaatttcgctttgtatgatacaggatagatgtgtactgtagcacatactaaatatccgctccgtacgttgatttgccgccgtccgctttggtccgacggcacgctactcgaatcaagcattgttcacaaagtaagtcgagagtatcttaagctgctttagaggggtaaaggtgagagcacgtacagaagctaggacccctgccattcttctccttcaaattcaaaaggatcttttttccaaaagcgaggttggacatcccactcttccagatcatcagcggtcccgtcgatctctcctccaccagcagacattcctccatcgggttgggcatgtcgtgatgatttgggagagtcaggtgacgttgatcgagtgagtggaggagactgtcggaaaggagcagaatgagacatcattccggatcggccgctggaggcattcccggtaggagcagttaagatacaggacatctcggcatgcatggagtctgatatagtcaattataccaagaattgttgttagacgatgtctttgacggtttagatgagaggaaaaacaaaaaagggcaagtaactgacgctgaacttctcctccgaaataagtcctccgttgattatgacccatggatatgatttttccgcccttgacaatggcggctgcatgcttgtggttgaggtcactgttttcggtttcaacacaatccgccatcaacatcagaatgagatatacacacggcttgcatcagagaagagcggtagaaggaacaggcgaacctgttttgagcctcggcgagaagaagggaatgaattcgatcggttcgagtcatgatgctaagatgttacaagattgatgtgtgatgctgaattgagatgcagataagtgtagcttggtcccgatcttgatgagaagtctcaatgggctcttgtgagtatgcaaacaaaggaggagagaagaatggacctatagagttgtcagggataggagctgggctggtaacggaatggttacgagatggctacgtgagatgtaaccgctcaaaggatctttgattttgaggaacaagttcaggctccttggacagagaaacaagattgataaagtcactagggaacaaggataatacagggacgagggaatgtgctgagaacaagcgaataagaaaagaagtagaaccaccaaaggatccaggcttgggatttctatctacaagtgtccgagaaagcctgtgttatatgtggttcttaggctctagacgcgtagtacagaatatactggagcgcaaaaacatgctggagccagaaaccaagtagaagtggaggattatgagatttcgcgtcacagcttagaatcacgtgtagttcaagccacatccctacagattgttagggtttgcatttgcttacgtcaccatacctgcacacgtcatttctattcattcgatcgatccgtctttacgggctcataaagcgtagctcgactaaacgacgagtggagttgtggcagaaagagggagtgcgtgtgtgagcgactactcctcccgtctgtttcgcttgaacgtctccatagatttgtaagcgaccgatcgagtgccactcatcctcagaggatcgatctgtagagaagaggccaagaccttgtgcacttccattctatgttctcactgactgaacgatcgttctacgatcggcaaagaattcatcatcctcttgagaggcaaaggagacatatgttatataagatgacccactaatcaagctctctgaacattgccaaatctcttgattgttcacttacccattcaacctcatctgacatatcctgctcaggatgacgttcacagcatttcagacgaccgctctaggagccgccatccgggtcctttccggtcgaagattactcaaatattctgatgagaaggaagtacccgaccattggcttcatccaaatgagaatcgacccagatttattactgcactgagacctaaggtcaccgttcatatgcccagagcgagtcaagagtctgacatgactagggttgatccagaggctgcttcccatcacaacaacaaagcaggcaagggaaaggaagagaaaggaaaggacggaaatattgtcgattttgacggaccagatgatccggagaacccattgaactggtcgacctggtacaaatgctttgtttgtttccaaatctctctgctgacgttttcagtctacatcggctcttcaatctactcgcccgctctcattggtaccaactccgtcgcgtctacattcgacgtctcacaaacctccgccctcgtcggattgactctattcgttatcgggtacgctatttcgcccatgatctggtcgcccatgagtgaaattcctagaatcgggagaaacccgatctatattggtaccctcgtcattttcgtcgccatccagtttccaactatctatgcaaagaatatccacgttcttctggccatgaggttccttgccgggttcttcggagcaccggttctagcaactggaggtgcttccgtctccgatctcttcgcgccaaagtatagagcctaccctttggctgtctggggactgggagccgtttctggaccgacattggggcctctgctcggtggatttgccttccaagcgaatggatggtcgtggacgatctggttcgttttccattctctgggatctattgatgagcgcaactgaattcaatatgcttatctctgatgatattatacacctcttctggtcccattctcagggttctcctatggctatctggcggagctttaatctttttgtcaatcttcctacccgaaacctcgcctgacaatgtatgccgccttgttccttccccagatgtataatctctacttgttcggttcctgatcatcttaccatgttggctgttgttttaatgtcagatcctgtacagaaaggctgttcgactgagacgggctaccggaaacgacgctcttcagagccagggggagatcgaccttcaaggtagttctgtcggcgccatggtcaaagacaccttggttaagccatttgtcctgggcactgagccgattgtgtttgcgctgaacttgtaagctcttagaggacctgttctgtctatccttactatgtctcgagtcatgacgcaagcgctggcgtcgacttatagtttctttcattctcatgtctacctgttacaggtacatcgctctggtctatggaatcttatacatctggtaagaatgatctctctctttataaagaaactttgcttattcaaatataacttttgctgatcgttatgttcaactcataggtttgagagtttccctctggtctttaccgagcttcatatgttcaactccggagagagtggattggcatttttgggagtgagtcgagggaaattcatgatgtaatgttgatggactggaactaacatggctctgcccctctgtctttgtgaaatcgacattggttctgatagatttttgttggagctgtcattgtatgtttctttagctcaacttctgattttaagttaaagggcatgtatctgacgttggctgtctaccattggattcttcagggattgatcggatatgtcgtatactctaagcttaagtttgagcccgagtttgaaaaaaacgggaatgggatgatcaaacccgagcttcgcattcgtgagtccttcgaggggacagatagcgaaaactagtgcataactgcttacatccatactgtacctgtgtctcgccaattgggtagccgttatgtgtgttggagggttctgtcttcctatctgtctgttcatgtttggatggacaggacattcagcatcgattcattggtatgtttaccctgtacttaattacaagctaaatttcgatgttgacagtcgatgcgcttctgttttcttaggattttgcccatcatcggtaaataatgcttgctctcattcgatatttgttctggaactgaactgatatggtttctgtcattaggttctagcttctttggtatcggatcgcttctcctcttccagtctatcttctcttacctgaccgacgcctaccccaaggacgttgcttcaatcttggccggtaatgaccttatgagaggtgtgtttctccctacatttttgatctcatattgttctcttgctgaaagcaacaatactatctccgcgctcgatcttcaggcgctttcggtgcagggttccctctcttcgccaacgccatgtttcatcatctcggcattggaggagcctcatcatgtgagtcgttgtctagatatacctgtccccttcgtgtgactctgtctgatttgactgtcttttatgaaaacattctatagtgctcggaggacttacttgttgcttcgttgcaattcctttcgtacttctcaagttgtgagtatattttaatcacatttctgatttgtgattaggtttgaccgaactttgttctattgattgcagcgggtccaaactacgacacagtagcaaacatgctctaaaggacgaggatattgaggcataaatttcactcgtctccacctacacctagaagtgctctatcatactcaaatactctaatttcctctatatctaattcggaaccacatcctgtggctgctctcttatctatttataatgaagatgataattatttaattcattgaaacacgatgagtttcgaatgacttgtgtttggattccggtagtcttgacatcatttcggccataccttatcatttttcctccttgaggcaacaccctcaggtcttgcgcagagtcccaagcacttctctccgaggagttatgaaacgtgacaactcttctctatcctccttgtttctcgatcatgttactgagacccctgagcggtgtgtatatgggtttgggaaaccagtggggacttggttgaaagcaagtgccacagcgaaagtccacttttcacccgtatccgaaaaaatactgagtttacctgcatgtggctcgatcagacatgtcatctgtctttttgtctctttatctgttcatgtctgcggactgtagagcctttatcaggtcgttcatcatggccgacggccagtcgggtcgatctaaggcggggggaggaggggtttcttgcaaacaaacaggtgtcggtctcgacagcttataagacacaaagaagtcggagtgatgaggacaatcgtccgcgttgaacactcatcggtggtgttggtgtttacctctgctgcctctgctgctcttgctgacctatcgatgagggacaaactagatctatgacccatgaagtttgggtggtttgtggtctaaggctatcccagtccaaaaggaccatgaatcgacagccgttgattgaggttacccgcaccaagcccaaggcttatacttatagatagatagataagaatatcgatgcttacttaaccaatgaagcttgacgcgtttgcgacgtgttcattctggtcgcgtatcaaacgcgtcatctaatcctgcttctcttccttctaccaatcaccctgttcttcatagttttcatgaactttccacatccagttctctcggatgagcatcttccttttcccctagtcccgctcatcccgtcgtcatccggttccggttctctgatcgccttcaacggtcaacatccgacttcaccggaatctacatcaaccaaccttactagccggtcgctcaaacccgaagcagaagactttgacaagatgctagatatgttggggattgcagatgatacagcagatcggaaaaggtttactcaaaagaaggaggatgtatcagggagtccctcaaaggatgcgacggcaggaaaagttaatggaaacgtagtcaaggaagacaacactagagagggaaggaatagcggagtttcacttagcttggaagtacgtccgttgacaacgaatcatcatagaacatctcgctatcacagtcaatagtagctgaacatgtcttctctcgtcattctaacctcagttagaggatcatttttctcagatgtgtcctcctgccgaggactccaaagtgcagactcgattcgtccgtcatccgtccgtctcatccacatcctcctctcaatacctgaccacttcgtccgaacctgtgcgattaacctcctacaactctacctatccttcttacccagtctcttttggctcttcagccggtccaacatcatatcatcgaccacactcggtagcgagcgatgtaccctcactcgacgaaaacattttttcaagatcatattctagtccgaggtcaataacctctcgaagagagaggcatcagtcaacgtctagtaaattgccctcttatagacctcccaaatcaagctcaactcaaatggctctcgtgttgcaaccagaaatgagggaatcagacgaagctcggccttctttgcctacgtatctacaatccccgatgcaggaagtattcttcaagaacaaagtccccgctagcggcaatccttccgagccgatcgtcaactcaaatcctctcgcgcctcctgatctaccttctttggagcccacgcttccttccactcaactttcctctacttcgtcctcgtcttcgtcttcgccatctctatcttcatacattgaaccacaccaaccgactcgctcaactcacttctcgactttccaagctcatactgaatcttctcaaacgactcataactctgcatattcacctcccaccttgtcttcctcccgccataataatccttcttccaatcgtctgttcaagcccaggtcgatctcgagtatgacactagagggcgaccgtccgtcgggtcgacacgctgctcgaagtggatctactccaaggagcgcgaaggaaatgccacagcaaacctaccaatcatctataagagggccatcacctaagcggagaacttcagtaagatcgctcagatatgaggaacgagaagatgaatacgaggaggaagacaatgaggacgaagatgagcaagccgagagcacagaagagcatcaagagtttttagtgagcatctcctagtcctgatacttattttggattcagaccgacaaagcttacgcgtttattcgactttgcttttttctcctgactcgaatgccacgtccaacagaatcggcctttaggattgctggcactatctcatgcgcttgcagcagcgaacgaagaagtatgttttccgtcttatcttcgcctttgccttctctttatcagtttcagatgtattttgtcaatcaggatttacagtgaagtggttaattttatacgtgtaggtcggcactcttcgttcggtcgttagagacgtcaatgctttagttaccgagcaagctgccgtccttctgaccagtcgctatctacctaatcaccctcaccttcttcattcgaatcccgtggcttctccttctccctcttctggagatgcacatctggttagagagacggggcatagacttagtgcgggtatatcaaaggtcgggaggagagcgagaagggacgaggactggctaagcttatcgaaggaggaaatcgatgagtttagtggtgcggatgctagaagggttctgaaggttcgattcttctgcgttgtccttgctcaacctcttggtctcttctcttccttgtcatctagagagcggtcgactgttgacactcccgtctttgaaatcatttctttactcgttttacaggcaatcacatccccgcaacttgggctagcatcaaccatcgccttcctacgacacatcgagctccgattgaatcctcttcttgaaggcgcgccttctagatcggatgacgacgtgttctcgaatgagagctttcagcgaatgaataatgtgctggacagattgttgttgggtcagcggcaggaaaggagttagacgcgaaggttcgagaagattggtgaacagaacggttgattcatatgtttcgtggccttttttggataaacttctttttgtttttggtatatagtctctgtcggtgtgtcttcttgtatattgcctctgcttcggtttttccgatcatgtactatcgtagttgtatgtgtacgccctgcctttgtattttactttattacacctacttctaatcaatcggtttgtcgattctgagacgaatctaatggattggcgttgatgttttccccaggaaatgagacctaggtagggatggtgggtagaacgaatcaacttattccactcttgacccactcgtcgtctccgaacagtccatcctggttgtcttcctgctctcctaactttactctcctcttcccactttcactcctattccctgccgtcgcccctgcttcatccgattcactctctggacgagatcgttttttacattctgacatgatcgattcatcttcgggtgccatcaatccgaacacgcccgattgggagatcacaaaatctctctctgcgcgtctagctctgggtgagaacacaacggtcgcccttctgatcaatacgcctttttcttcgtacatgataggtccagactcggcctgggtggattctgcctctggagagacatattgatcgatcgaccggatttcttcgggaagcgaactggacgcgcaccgtcggttcgttcgggacagcatgatacgcgtgttgatagaattcgtccagactaaacctagtgaagcctctttcgctaggtgagggctcgatccgttcgaccattttgtttgagacttgtatcccagttgaaacactttgttggtgggcgtgagtgatttcagatttaataaagtttcttcgtcttggtatttagatggtgattcagaaggttggtcgaacgcgtaataagagttggattcgttcgaccggacgtcggtcgtccaacctgttgatgaaggtcttggtccttctgagctaccaaacccccatagtgtcacgaaatcaaacacgtctgagacttgattgacaacaacgacagctagattgtgctgaacggcgagcgatcgaagtttgtctgcagtggtgcttagagaggcagatcgctcggagagactcgagaccgagttggtgaaggacgaccgggtcaacgccgccagagaatctaacacgatgagcttgagagggagtggagaaggtttaacggtgaaccgaggcaacggacgaacggactgggagggtggctgcttagaatcgaatggagtggaggaaagacgcgacgctaaattagggacgagataggaaagtgtgtggtccagtgcttcaatgtcgttgcattgaataaaatggatgttgtcaaatatcgagtcaagagatattccttgagattggaccagttcaggattccgggcaaggatgccttctgccagggagtagagacggcttgtcgggagggatccttcggatgagaggtacgcgactgacccacttgcctgtgggcatttggacgaaagagtcgggaacgaaaactggacagagatcgccaatgatagacaaagctgagtctttccagtcgagctaaaaaagtgcaagccaagatcagttctcacctccggagcaacgttgtgcctgagggagaatgagaaacggtcgagactcacctttgcccagcaatctcggtgatttctccaactctcaccccgccacctaacaactcatccaatgaattgtctccgaattggacaccctgccaccctgttcgagcaccatgcacttttccttctcgagcttttcctagtttgaccggagagccacataccccgcgcgccacggcctggacgagctcgaccacctcatcctctgagagcggtttcaaagttttcgtaagcttctgaagagataccagtaggatctcggccggagcgagcagggacgcgcgtctgagaatagctttctgacgaggtgtcaatgtagaaagctcactaagagccagatcgaacataagccaggaagaaagaagaggtgtcgtgtcgtgttgtgttgatgctggatggatcggacgactactggttggctcccgggagctacggcgttgaccggggcatacagtaattaaccctaacagaactggctggatgagtttttcctacattcaacttagaaagaatcgttaacgactaccatcatccatcccttcatccttctttctcttctcttcgtcctcgccgttgtccctgttcgttttgatactgagtgagaatgagatacgctattcttgtcacaggtccggtagtctttcttctctttgatgtatctgtctgttgcttttggaatgttccatggcctcattcattcttccttccgttctgttaggcccggctggatccggtaaatcaacgttttgcaactcgatcatagcacacgctcaatcacaaggaagaaacatccatctgttcaacctggaccctgcagcagacaaattcgagtacccgcccacagtggatatcaaggatctcatcagtttagaagatgtaatggaggaaatggagtttggacctaatggaggactcgtctactgctttgagtgagttcaatcgccctgtctctctagattcggtcataaatctgtatgttatagctaaactagagagagtaaaccaacagatatctgctggataacttggactggttggaagagcagctgggctcatatgaggacgactacctgatcatcgactgtcctggtacgaggtcttctctcatcagtctagagcaccgcagccctccttcgaagtctacttactggtcgaacattgcctctgatttgattcaggccagatcgaattatacacacatatccctcttctcccccgactcgcatcgttcttacaaacgaggtgcgacttccgagtctgcgcggcttacctacttgaatctcaattcatggaggacaaagcgaaattcttcgcgggtgtgatgagtgcgatgagttgcatggtcagcttggagtgcagtcatctgaatgtgttgagcaagatggacctcgtcaggggaaagaaggccaagagtgaggttggaaggtcagtctctctttctttggttcccttttgctagtctttcgtctatcttgaaccgaaaagactgacgatacagaatctgatattgtgttgggtcgttagatatcttgacccggatccacttttactccaggatgagatcaaccagactacaaaccccaaatttcattcgctgaatgaggccatcgttcaattggtaagcacatccattgtgtattctctttctttccttcctaccaccctttcctttcctccttccattcatctgctattgtgtctcatcatcacgcggattcatcgcgctctatcttcatacagatcgaggatcacaatcttgtatctttccttccgttggatccttcgtccgaatcctccgtcaacacgattctcagccatctagataatgctatgcaatacggttcgttcgatgttcttctctttcatgatctgctccatttcatcagggcgctatcctccgtctgagagaaggttgattctgatcgttttgtttgactgatttctcttgggattcgtctgactcaaggtgaggacgaagaaccaaagatgccaaaggatatggacgaaggggatttcgtagaagaagatgaatgaatgaatgaatgaatgaatgaatggttctactgtaatcactggaagcaaacggaaacatcaacacaggttatcaatctctcgagactcaagttacctccttttccctcttcttgatacagacctgtctataggaaagaattgagtaggttcctcgcctcgtcagcttacacacccatccaatacctctctcagctctctgactcttgcaggcatgaccttccacctctcccaccgccccattcccattccctccttcctcgctttcatacacatcggtccatccacccagctagaacacgatgcatggatttctggaaacattccttcacggagaagttggcagaactctggatgggcaagaattgaagcagccgatatcccagatccagggaggatggtcagaggacgccgaggacaagaagatgctgagtgttttgataaggagacagattgatcgataatgctcttgatataggaaagggatgaaggaaacgtcggttgtaaaccgctgaagagggacagagaaaagacatgagagcgagtttccttacttcaagacaatagcctctctcgggagaaggaaaggctaaatgaggacgaacctggtgagaacacgagtgattttcgggattgtgtctaatacgcagagagctatagacaaaaaaacatcacgtcagctatcttgtgcttgagaaacagcatgagagaagagaagaatataagacggaccggacgtcgcccagaggagaggaccatcagccgaagggtagttgatcatgtcaaatgcccggtgaaatgtcactgagaccaccagagaagacaaccgaccagtcaactcagctgttaatggaagattggttgggagtttggaatgaaacccataccttctaaaggtccggcacatgctgccaatctatcaagcaactcgacgaaacaagtgagtaacaaactttaagaatcaagcctcattaaaaaaagacaccaactctgaagtcaccagctcatcaatcatgccatctggctttaagcaaccgaacacgactcccatgacgcgtagtcgtcgaaacgtcgcgatctctgccttcatcagacggacttctgactcggaatacacaaagtcacctggtcgaggacggatcatgatcattaacgggagcttaggaagctcggactggatcatctggtcgtcgtacaacaggcatcaagagaaaagaagagaactgtgagtacatcatatgaagtacaaagacgatgaaggagattagacgcgtacattgaccagcgcgacggaaggcgttgtacctcctccttgacaaagagaaccacatatctccaaccgatctgctccattgtcgacagctctaccagcatacatgaatggtcgtgtatatgtatcagatgtaggtatcgtccgatcaagattaccaaatatcagtcaaatctattcggcgcttcaacttaagcaacgggcacaaggcgtacgtcttggccgagtcgaacgagtctacgcagacctcgagcaagatcttcttatgcgtcataaggatgagatatcagattgtgtcagctatcaagtagaatacggatgatgccgggtcaatagaagatcagtgaatggtgttccaagatgtcatctggatggaagctggaggaaagatgcaaagcaggaaaacccgatttaatttcgtccatccgttccatctcctatcatccatcatctctcatcccgttgcttcatcccgttgccccttcccgactcccttctacgactctctttatgcctctccaaacgactactcaccatgcccacgctcgtccaggatctgctagacgttcctcttcccatgggcgaccatcctctacgtcttcctacaagagaggcaacatagggtctaatctaggcatgaccagctcgagcggagctcctcaggacgtgaagaccaaacgaaacgatgtttgttctaatattcatccttctttttcttctctttccctttctctatgaccaatgaaaaagttttgtagatggagctgtttgagaaggacgattggttgggctgataatacctctaccctcatattctggcgtttctgttaatttaatcgatgggcgatttgttcaacccatctccatctctaccaacctttcaatttttctaaacttctacttgaccctccttgcatgaatacgttctttctctcttctccgcctcttatgcttgtctttgtgttttcatgatcatctcttacagggaatgccgacctctcacaggatctcatctcatcgatcggacggtcatctgcctcgattaggcgccctgcaacgaactcacagcaaaacaactattattgatgacgagaggccaaacgctgcctcggaaaacttagtagatgctggcggaagaggttatcaggaccaaggaaaagaaaacgtgagttgaccgtgtgatctctgtttaaaagagttgggtacgtgctgatggacctggatgtttaacactctttcctcaatccagtcaaaggatggatcagtagctggggaagaggagggttgggtgtccaatagtgacaatgaacgtgcaactgcgtccgaagaggatgaccctagctccagaccatcccgccatcgaccaagtaatgtctttcgaaaaaatagctcagcctcgacgatccgtagacgttcatcaacttctattcatcaaaccgctgtgtcgtcgtcatccactaacttgcaagatttgaattcgaaggatcagctttcgtcccagccgtcccaggattctcaacatgttcaacatcctccgaatgcccagccgtcgagggacctatctccgagaaagaaacccaacatgttcagaatccattcaagttcttccgatgttactcaaaatgctaaaccctcggcaccgtcatcatccattgcacaggttggatttactaccaagccatctgaagcggaagatcttcctcctcaacagtccttacccaaacaccaaaacggattcagtccatctcctcgtagcagacaatctgcgctccctcctctaacctcagccgcgactgaacctaccctccgccacgctcaacatcctcatgctaggccttctgccaatgcacgcgtccatttattcccttctccgcgtcgaagcccagccactccattgccctctccaccgcttaccgcggattcctttcattctggaacaagcccagaacgtgactcaggtccgacatcgacaacgacccaaaccgttcatcatcaggcgaatctgtcagaccaaacgaacggggcgatcgcatcttcgcctctagtctcgaatctaagagaagattctcatcctagatctcggcttggtctaaaaaaggataaagagattgaacaacctagtccagctcagaacgacgagtcacagctgttcgtctttaatccggttcaagccactccatcggcggattcacattctcgtcagcagtcgcaaggccctcctcacggtcggtcatcatcccatcccttgcgaacgagctcatctcgaagttcaattcgctcgctcgtcaaccgtcctcaactgttacccaaacgactcgtctctctctcatccaacattccagcaattgcgccccctcaattgacgaatgactctgccttggcagattcgcctgccaactgggagacatcctccccggctggctcatacatcagtgggcagcatcaccccgacgctatgggttcccttcgaaggacgagtgtatcgagtgtaaggacggctaccggaagtccatcccgattctttgctccccccggagatccgaaccaacccacctggggctccacagattcgacgacgagaaaccgggaccgaacggccagctcggccagtatacgcagcaacagccacagcatctatgggcctgggggagccgggtcggccggtggagagttttccaatggagcgtccaaggcgagaggagcgatggcagcacttcgatcgagcacgcatcttggaacagaaacaggctccgcttcgtcatcaggaggaggtattggccggcggatggtctcgtcaagctcgactcaaagtctggctgaggtcgcctcgggggtgaggaagagtctgatcgacgggttgagttcattgacgtcgaacggatccgacaggacaccatcccctccttcctcatcaaccattagtcctaatggcggcggtggactgaatccatcttcagtctcctcagcaggtcgagcacaaagtcgatcagccactgcaccgacctattctagatcaaacacctctttcctcccctcttcttccagtggaaactcaaattcacaattctccttgtcatgtctgaccgctcttcgaccggtcgtcagagaacagacaatgtttcaagatagaccaacctcaccccctcctggtgccccaggaggcccccacctgcatccgtctccattcatcgaggcacataagagtctctggctaggatttaaagaagacggaaggttgagtccgatgggtctgagtgggaagagggtattagatcaaaaacggctggctcttagttaagagtagtgcacaggtgttgctcaatagcgccttcctctcttcttttctttcttttccttgctttcgtttcgttccgcacaacagtcggcatgttggaaattcactttattccgttcatcttgtcctccttttttattttatctcctcatgttcttccattctctgggcatcatcgatcaacaggggccccttccttttgtatcattctcatcccttacaacccactcatatttcaaccatcactcacaaacaactggccatcccctctcctttttttcttccttttcttgtacccatttttaattgttcttccatagggatagaagaacggattccgttttagaaatgatagacactacggaagtggaaaaaatagggaatgtgaggtaagttggataccggacaccacaagaaaccctgaggttgatcagacgaagcgcacgataagcacacacacacacacacacataggatgagcaaggagccattgaagaaaaagcgcatgtgatatcaaagagagcaagaaggggaataagaagagaggagggaaggatatatggatcttttcacccgtttcctcctctgcggatgatgaaagattcaaaataccaaagagagaaccacacacggacacatatgttccagcaagaaaagaagaaagtaaaataaaaaaaaaagagagaggagagaaagagcccagaagaagaaaggacgttcaaaaagattctagagcctttggggttttcttgatctaacagatgcctgaaatatcgtcttttggaagatggaatcttggatctcttctcttctttctttagagctcctcctcgataggaacctcgtcatcgtagagctcaccatcctcgtcctcgagcggggcctcttggtactgagtgtactcggcaacgagatcgttcaagttggactctgcctcggtgaactccatctcgtccattccctccccagtgtaccagtgcaagaaagcctttcttctgaacatagcagagaactgatccccgattcgcttgaatagctcctggatacaggtcgagtttccgatgaaggttgctgacatcttgaatcctcgaggtgggatgtcacagtgggcggtttgaacgttgttaggaatccactcgacgaagtatgccgagttcttggtctgcacgttctgcatctgctcctcaacctccttcatcgagacctttcctcggaagtaagcggcgttcgtcaagtactttccgtgtcgagggtcacaggcggccatcatgttcttcgcatcgaacatctgctgggtcagctccggaacggtgatcgcccggtactgctgggttcctcgagcggtcaaaggcgcgaaaccgaccatgaagaagtgaagtcgagggaagggaaccatgttgacggccagctttcggagatcagaattgagctgaccagggaatcgcaaacaggtcgtgattccactcatcacgatcgagatcaagtggttcaagtcaccgtgcgtcggctgcgtcaacttcagcgttcggaagcagatatcgtagagcgcctcgttatcgatgcagaaggtttcatcagagttctctaccaactgatgaacagagagtgtggcgttatagggctcgatgaccgtgtcggagacctgtaattacgaaaattccatacgcgcggaagtaaagagaacggtgagacgtgcagatatatgtgtcattttgagatgaagagggacatactttgggcgagggcaagaccgagaaagtagccatgattcgatctgggtactcctctctaatcttggagatcaagagcgttcccattccagctccagttcctcctccgagcgagtgagtgatctggaaaccctggaggcagtcagttccctcagcctcctttcgaacgacgtcgagcaccgaatcgacaagctcggcaccttgtgtgagaaggaacatgtcaaggtaagtcatagtgaaacgcatctcaaggacgatgagggctggagaacactgtgaaagacctaccctcagtgtctagttgaatccacacggcgtcacgaaaagtgtgaagaagcatattcaaagccacaaacgtcagtccatatcatcgtcgtcctccgttttgaccacaaagacagataaacgaacaatgtcctttagcccagttgtttccagctccgctttgaccaaaaacgaagttatctggtcggaagaggtttccgagaggaccggctcggatagaatccatggttccaggctcgagatcgacgaggacagctcggggaacataccttccacctgattcatttcatgaacggaatgatgaaagatcatcaatgcctgtcttggatggcgcatacagtcatatttaaagactaaccggaagcttcgttgtagtagacgttaatcctctcgagctgaagatcggtatctccctcgtagctgtagaagaggcagatcattgttgggtgttcgagataagtctatctctagaggtcaagtatagaaagtaaggcagaacgaacgttccatcggctccaatgccgtgttctacaagcggaaaacccagagaagacaaagttagaaacagagatgtaaagcacaaagtggacggcttcggaggttgatctctcaaaagaacgcaccatcacaaaggacctcccagaacttagctccgattctgaagtgtgtcaggtaaagtcagtccctgccatcagttctaagaacatgaaaggttaatatacgtactggttaccacactatacgaccccatcaggacaacagaataaaacataacgaaagatggatatcagatgctgaacttgccagggctgaaacaggccacgtgggagaagaggaggcggggttgaacgtacttgaccagtttgaaggtggacaatctctcgcactgtcgagcgaagtttcagaagaggcaagagtcagcatcatattagatcagagagacaaaaacttgatgaacgatcttctcgagaaacgattatgtgtatgggtgacaggcaactccagaacggccgtccgtacaaattccacccaaggcgagacagtcttcacccagcccaccaggcgactttttacactcttggacgatgtaagtcagctcaaaggaaatccctacagagataggtttacaacccaggctgtaccttgacagcacaagatgaaaaaaagatgggaggagaaagcgagggaaacgcggaaacagatgacggctgcagccgccagagacaaggcctgcaccacccaatcgagacaagggagagaagagggaaaagaactagaccaaatggtaagatgagacactgactgatcaagtagaataaaaagaaaagaggagagagttggaaagaaagcgacgactcgttagaggattaggatgagggaaagagaaggcggagggcaacggagggatgttaggaggacgatggatggcaagagaaacaggaacaggaacaggaacaggaacaggaacaggaacaaggctcccaaaaagggacggggctcgagcgcagggagatggaaaagtgtaaccgatgtattttgtaaccactgccaaaatcggtcgcgtcgacacgacagacgcgtcaagatctcgccacgtgatccatgtgatttctacgttaaggtttcatctactcttcccgctctgttgaccgacgtcttcgccttctttctcttcttttctgttcatccatccatccatcaaccttactccagaacgcgttctttccctctctttacattcctttgatatataccccttctttttctaggaccatatctgtttctaaatggcgtctacagatagcgcctacagatcaacaggacggtctcctcgtacattggtctatgctccctctccgttgcaagttaaacggacacctctatcgcccacatccaccaacattcctttatccaatactctgtctccttcctctcctccttccattttctcaactcaaaaatccgttcgaccagtcaagtctactccgtctcttcgtccgccttcggtctctttgacaggccgagctgctttcccactctctccttcctttcctccggccgttcccgcggaccaggacgtcacagacgaaacgatcgcttcgctcgctcctcctcaggttcagttccacaaggagatctttatccatcgacacgagaggacctttccccatctccattctgctgagcctgcgcatactgcggcctacgcgtctcagtctctgctccctctatcgccgccagctgatgtcaatgtagtccctcaccctccttcggatcatatccgaacgaacgaaccactaccgacgactttctcaaacacactctccctagacccctcaacaaaccccacagatagctcgtcatcttcgacttcttgctcgtctgacgagtcccgtctgcctctccgacagccgatgagcgtattgtctagtagtcaaccttgcgcgccctgtcggcctctttctctcatcgcgctccaacctactggtggtctctttcgagcgaagcctaacttgccacctgtcgagagtctctctagcgagtcctattctggttcgatagactcccattattctcagcgaacgactgattcggacaatcgacgtgaatccgacgatatgtcttccgagtgcgcgcttgatttcgcgttcgataaacctcattttgtcgtagttgacggatttgagcagaaacctcgacatgctgcctcgaacggtactcttcgagcggctgatactgtgactcgccctataggaaatcctaagtcgaaagaaaaagaggaggaggaggagcgagtatcctcaatgatggttgttagacctgctctggtagaagcccagcatccacatatcacgagcgcgtcatctgtccaacgtcaagattcttatacgctctccctatctgaatttgctcattcgactccttcgccaacgcacgactctactgaagaacttgcaattgcgttcacttctggtagaacagagaggactttggacgagatggatgaaaacagagaaccattctggcaggccaacatagagtacagttctagaagcaatggaaaagaacaggcaagcaacagggtggatgcgctcggtctcccgttggatggtctgagaaagtgtgtcagtgatggaggcgaattgagagttaggtattcagacgatctgtctctatctcgcaaagtatgtccgcccttctctttcttccaccaacggccagactgctgacgaatttcatgttcttgcgacctttcttggcaaacgaaaaggtttcttctgctcctaccccacgcgcgcctagtacgcccatcgaatttgcttacagagcaactccaccaagtccaccctcaccctctggtatgctcgattcatcccaaggaaacacaggttggcgaggatggcttcgtaggaattcgcgctctgggtcaagagaccgacctgcattcgtcctcgaggacggactaggagcagggcaggaagagtccaactggtctagaccgggaacgagtcattctcatgttgtacgtaaacttcgttatccatctgacttgcgcgttctgtctcagttcgcgtcgtgtattcagtggaataaacatcagagaaactcatcgatacatttctcttcgtaaccacacttgatatttaaagtctcctctaagctcgtcgtcgagtcctcacttttcttcaccacccagcctctcgccttcttacccaggcgacgcgagttcgaccttctccagtgcgatccttacccctcctccttccgcccgaactctcgatcgagcgacgttcgaatcacccgtctcgacctctccgtctttaccctccgaaatgttcctcaacccgtccaccggctctggtacaggcggcgtcacgtacccggctcagacgttgtcctcctatcggccgtgtccgacgacttcacattcggcctttgttcacgtcaaccacgtacaccagatcaatcacgctgaccatattggttctggcgactcggcacgctcaccgacgggcgcgttcaaaccgctgatgctaggaccgccgagaaactcgatttcgattggaaataaagcgaagccggccagattgggagagatcagaaaccatcttcctacaatagccggttcaccttctcggattagaccgctttctctttctacacgaaacagctctggtgtcggcgcgaaaggagttcgaaacacaagcgaagatggtttgagaggaggggagcccagcccactcgcgacagagagagacagcttcaactcccactttaccttccctgtgagctcggatgccatcttgagaagaaacttgatcgaccggcagacgaacccacccatccggccatctcatgaaagaacatactcgaccgcgacgacgagtgcatcttcctccccgacgtcgacgaacgcgcatctccgatcgaggtcgagagcaattggaggatcccgagtggttatcattgatcaaccaagattcgatcgagcgtcgaaccaagccaatagcgttcaggaaggattggatgtgggttcaaccggagtaaagatcagaggagaagacagggagcagatgcaatccaagacgaagatgcagacgcagaaggggaagggattgaaggacctcatttactcatttggcgagaggataggcagatggatggacgaaacgctgcctgctcaggctgtattcttactcgggttcatcctcgggccttgtacgtgcctccttcacctcgtttttctcttcttcttcttcttcttcttcttcttcttcactgtgcaatctgaaaccggggagagactaactttatgcgctctaattgatcaacatatacatagggtgctgggtccttggtggatggggcctttcttctgatggcgcgcttattcttaccaagtttcaaggcggtcggtctgcccaccaggccgacaatccttactatcgatggcgcccgccttcggtctcctcgtccccttcgtcttcgcctctctccttagcgccgtctgtgttcggtgatcgatcccagccatactcgtttccatcagcagtgtctggtgctagaccaggtaacagacgacgcgtctggatcctccctagtcttcgatcagactcgcctaacaagtgggtgtggaggaaccgggtggctgcaatcttgagtgggctagtcgttattcccggattgatactggcagtgttgtttgcgattctttaagcggatgggtcgtgtagtcctctcgagattatcgttctgtttgccttcgtttctgtttctcttatcgatcgtgttctgttggacgattatccgttccatcctctctatctactttgtctctttatactcttatcctatcccaatacctctacaatctttctaatatactttctccctatccctctccattcgagactatcttctatcgggaggcttccttgctttctcttctctctcttatccatcttaactttgttcggatgttctccatttcattcccaatcctctacccggattatgtataactaaccgcccttctgcacgataatccctcttctatacaacctcccctgcatatcttccatatccggtgttgcccggaagtactatacccccttcatctatcatgtattcacaaggttctccgcccgttctgaacaaagcttttcttcgtccaacgcaaaggttgttccaggtatgtgctaaacgcccgggaatgttttccaggttagtacacgtacgcgagggcgtcaaactcgcggttgatttgttccccgggaaggaaaaaagaatgaatcttgaaaaggccggaactacggagcgcactaaagtcggaggttgattatggtgccgacgaccatcaaccaacatctcaaccagtgttcactctcgcctcgcgtactctcttgctctcgaggctcggattcggccttggcgtcgttcatgatctctctaacgacctcgacggtgtgacaaggatgaagtgcccacactgcttcgcccgtcgagggatgttcatcagaagcgagaagagggaactcggccgcgccgttgaaagcgacaggagtgctgagagaggtcgcttccggttctagcggagtggacgatgaaggcagaaagatgaggccgtgatgaacaagctcctgcagggtcagcggtcggcctgggttcccaccgggtgatgagacgaatcgttatgaaaagaagtgtctgtcagtctactatgtcgaagaaacagctctacagggacagaggttccttcgtcttcaggacaggaggacgcatggggtagtggctctatctaccttgagaataagcttgaaggaggaatcgaggggtttggtaggtcggtgagtaaaccacgtgatgtaccacgtttactgatacgcgactcaaatctggcgatgtgatcgcgacggattcatccggagtctcgtccatatcagggaacgactgctgtggatcatctaccgacggactgtcagttggaagttgaacagagcttagacatattgttgatcgaactagatagcctgatgaagggttgatctaaatgaaggcagacgcctgatgagctggctggctgactggggtattatccaaagagaaaatccggagcacaatgaggaaggaaaaacagtcagcgcacagaatgagtcgtcctccattgccattgagataaagcagatccgatcagatgtgagtctgaaagtaagttgtgagttgagctcgatgatggcaaggccaacaggttggctgcagcatgtgcgaaatcagcatgggtcgcgtaaggtgtgtcaagcatggggtttgaatgagaagaggagacggatatgccggtctaaagccggaatgtattagaagtctatggagaacgtattagacgacgcgttaggagagagaatagaaaggaagactagagaatatgtgatagaacgactagggaacagagaggcaacgtagtcagaggaaggggttgatagagactacagcgaacagagctacagaataagacggactattacaagaaaaggaactattgcagaaaaagaaacgatagtaatacaaaaaagaaaagcactattaaaataacaaatgtattccaattcagacatgaactagggaaatatcaccaaaaaataataataataataaaaataataaaaaataaaaaataaaataaaaaagccgcgtcacgtgtcagcatccaacccgccatctgacttttcatctgacctttcgtctctacagcccgcccaagacacaccacacagtacgtcctcaggcaaaagagcagagtgaaggattcctgtctcaccccaacgcaaggttagtgtccgaaaatgctagtggagatgaagaggacatcaagtgttgaccctttgcactctttctccttctaaccagcaccatggccgtcggaaaggttagccccagcatcgtccctacagagcaaaagcttttcctcctccctgcctatttttctgtcctcgtgcccttgtgttcccttcgtttgggttttaaaaaaatcatccagccgcatatatgcgttctttcgtcaaaaacttcacccgaacggtctcacacctcatcccttccacatccaaccaatccaccgatatccaccgttaccctgcatgttgtcgacattggggtgttagagacgttaagggacgttgagttgtaatgttagaagggtgtgcaagaacaaagcgtaaagcatgggtcaagcttggtggaaaatttaggggaaagagtgccgagccgacaacttcgacacaacaaaagggcactgcgacaaaaatttctaggcaggaggaggaaaagatatcagcaacaccctccggttcgtgtccatcccaggttgctgactttctcttcctgttcttctttctccttcacctaatagaacaagcgtctctctaagggcaagaagggaattaagaagaaggtcgtcgatcctttcacccgaaagggtaagcaacttctcaatcaactctcatgccacatcctgctccatcagtttactgatcagtctcctccttccgtcctctccatcagactggtacgatgtcaaggctccttccttctttgaggtcaagaacgtcggcaagaccctcgttaaccgatcccagggtttgaagaacgccgatgactccctcaaaggacgaatcatggagttctcccttgctgatctcaacaaggacgaggagcagtctttccgaaagatcaagctccgagttcaggaggtccagggcaagagctgcctcaccaacttccacggtgtacgttacggcctctttgtctgtcgaacccttcttccaagtcttatctgttctctggttctttgtagatggacatcaccgccgatcgactccgatcccttgtcaagaagtggcagtccctcatcgaggcccaggttgacgtcaagaccactgacggatacctcgtccgactcttcgccatcggtttcaccaagaagcgacccggacaggtcaagaagaccacctacgctcagaccgcccagatccgagagatccgaggaaagatgatggagatcatgacccgagaggcctccgccggagaccttaaggagctcgtccagaagttcgttcccgagtctatgggtcgagagatcgagaaggccgcccgaggaatctaccctctcgccaacgttatggtccgaaagtgcaagagtacgtgtctgcttgaatctcattgtaatcatcacctcgcttaccccttctctcgtactttttttttcctcactccagtccttaaggccccccgatacgatccttccaagctcttcgagttgcacggcgagtctgctgacgagaccggtgccaaggtcggaggtgctaaggagttcaaggagcctgagatcctcaacagcgtttaaatctttatataatcgcttttctgaaaacctcaaacgctccctacgaggactttttctttcttcttcctgagtggaacttgaatactgtcaacttaagccatacatcgttcgcctacacccggaaagaaacttgagctacagactacatcctgccactcgcctgtcaccttttgacttgatctgcttccatcactaacgaactttctactattctaatgataactcatttcccgagttatctcactgatctcgttgggctccaaggttcatatgggctttatcgttctcgtttgattgtttactcatagaactgacagaaatagatccgtaatatcaaaacggaaccctatctgccttcttccttgctaactcgtgcaatgttgatctgaacgatcaccctcgatcatccatacgtcttccaagaacttggacacgagtcgttctaggtcttgctgtccagaattaggatccgaatcggcgtggtggatggccctgttcgatcgagtagtgatgtagtgaagtcgtctacagaattggccaaggtctagccagatcgatcctcctttctcttcctcatcttcatccccatccccattcccatccccatctccatctccttctccttctccttcttcttcttcttcactattctcctccctctccacgttcttctccacctcatccactctctcttctcctttgtggtcttctcgttgtttttctattcgaggggacgcgttgataccataggaacaatgacgaatagaccggattgtctgtccgacccgacgagacctcgtccgtatgtcttggtcgtgatcaagtctactttgtcggcgttggcgtcgtcgatggatcgagagagacgaaagagggaacggatcgtttgttgacctgatagcgaataaaagtagatcaagcacgtcacggaatagatcaatctcgagtatccggctttgaatccatcgccgagacgatctatcagacgagagagatagaaaatcaggggaggaaggaaagagagaagagagcgaggagagaagagatctaatgagcggggcaagtaaggatgaatctaggtgaacgagagcgtagaggagtttaagaagagggaacgtctcctttccaccgttgtcgtcgtcggcgtcgtcaacgtcaccatcactcttattacgtccaatcttttcaatgccatcgaccaccttggtaccgccatcagacatgttcccttcgtgcctatgcatgtttccagccatccgatcgctcaaagctctcgcgacttcagagaagacctcccgtccgatgaatcggcagactgtggtgacttcgcgtaaagtcagccggggtaggacctcgcgcaaggttgtttggagaatcagataaacacaggatatgatctcccttggatttgtctctgcgaaatcaagcttggacagggacgggggaagtataaggacaagtcggagaagaacgtgaagcgttcggatgagttttagcgtaaggctcttcagagactgaaccgatgaggtggacgaaggagggtcttgtacaggtcgaaggtataacgtttgattgatcgtcataagcaatccaatgatagatccagcgcacacaagatctatcgtttggtttcatgaaaactgtcagccaacgagctacacgaaaatagagcttcctgatgtctgatagccgagacgggactctgtctcgaaagtcaacgagcagaagaaaatgccgaccgacctggtcccgagtgcacagagagagcttcctgaagaaagatgtcaagctcaaggatgcgtctatcacttaatgggaacggtctatcattccagagaccgagaagcgatggaatcgaaggttgtgtgcgtatctgtgtcaaagaagaccgaggcgaaggagggactccgagtcgattggctttgaagcgagatcgcatttcttccacaaactcttttgtttttgttgtcgatttgggttgaaaagaattaagaatgcttgtttagtctataggcaacacagctgaacacgttaaaaaggcaaaacaagaattaaagatcggcctagacagaccatctatgctcttctctcctcggtgtttgaccacatacagagcctgaacggagaggaggcaattcttatgagcccacgaatggactagtgccgatcatgatggatgaaaacttacaagagccagtcggatctgatctttgtagtcaagataagccatgtctgatgaagcgttggagggaaaggaagtgacgagtgaatgaaggacagaaggtgagcgcatatagtctcatttctgtcagtccggattctagatgctgtcagtagcttttcttcgagaagatgatcagtatcggaagctacctcgtctcgagactagatcagaatcatcgtcaggattacttgtacgaccggtggagccaagaattgtacatcattttgaaacgacaagatcagtctaggttaaaactggggggagaacaagacaaggaattggatcaaattgcgtgttgaaaggcgaaatgagggtgtcaaaagatacaagctccgtagaaaaaggatgatcgtgtagaagattgtacagagacaagataaagattccagaggatgatgtaaccaagagagagcctaaagggatcaaagaaaggaactgccggcaagaagagaggtagagaggaaagaaaggactggtgttgagcttctgttttctagtttccgagcctcatttcgtctgcttctctttcatagcttagggatccttagcgtcttggaaaccatcaacgctccccacaccaagaacaccaacgcgacggggtgcaactcgaacgccgagtctttcaaccagacgccaagaggcagaccagcctggccggtgtaccatcccttcttgacccagtatgccatagtactgacgagcgctagtgacgaggggatagggagaccctcaaagtacttgatctttcctgtcgtatcggcaggaatgagggcgcaggtggcgttgaaccgggcgagccgagcgagaccgcaggacacaaagaacgagaggaggagtgtgtcgacaaaggagtttgcacctagggtgaatagaagcagagcaggagagacaccgaacgagacctaagagaagatgggtgcatccgaacaggaaatacagatcaggatcaggtcgggtaagtgtgttggcggttggaatacaactcagcatcacacttcctgtcaacatgagaatatctgagactcaccagatcggctagactgtccatctcctgaccgagcatactggcacttcccatccaccttgccacctttccgtcgaacacatcgaaaccgaacccgaggaccgggtacaggaggcccatccacagagagctcttgttttccagcggggcagacaggtacttggcgcaagagaagatacacgataggccacagacaccgttcatgatcgtaattaaatcagccaatcggaagtttctgttgttatgttgattgaacaggcaaatgccaatcaagcagcagaagaaacgatggtatcgaaaaaggttgagcgagccacgtcagatgatgaggaaagaaaagaataaatgtgttcgatccagattcgagagaaagagaaaatacaagggaaacaaacgaaaagtcagcgtaagagcagaatacaagtggtttcagagaagtcttgcactggacatcaaacggcataagactaggatgaagaacgaaccggacgagcgaaaagtggccatcgtcctcattgtattgtttgagctggttccgcttggcttcctccatcttaatactagcagacttctgtccggccgaagtacgttgactcataatagttctatctagcaatgctcgcttattgttactatcagtgcaattggtgctgtcgtccttgtcgtcaggtcgagatggctgtgaggaaagggaaaagaggaggagcaaagttgagacttttctcatttggagccgtatgaatggggagtcaatgacgcttgtattacataagcaacatgtatggttagggttagtgctcttcaagatcagatcctatatgtgtacatgaacagagagcttgtgtattctctccttaagtagagttatgagccgagaagagcgggtgttgatgtgggaagggaagagaatgagaaaacaaactggacaggatgtggaggccggatagatgtcctttcgataacatctcaagttgttcgtaacagacaagccatgaagacatggtcagcaatatgacgacgagtgatacatgcttaatcatacatatcatccatggttcacagatagaatcaatactactactactactactattcttgaccgatacaagacaaactaaagagagagaattcgagagtacatgaattgctcaagtctgtagattgtaagcccaaaaagaaagaaaggaaaaaaaagaatacagaccgacgtgtagcttcgtttcgtgaggaaagcaagaaagaaaaagagagagagagagagagagagaagaggacagcggcgagatacaaacaggaaagaagcacaaaagtagaggaaaagcaaaaagcaagcgcaaggacatcggaaaggtcgaatttgattgattgatctgcaaaagagttcgaggctcagaggtaatttggtgccacatagttcaaagctacatacccgttttacgaaacttcgaatcacggaagagacttagcaatctatcaagacaggagagcaagcacacatagaagaaaaaagaagaacggaatgcacttacagactgaggagtcttcgtgaaaggagtgaacagagtgagcagagaccgcagagctgtgtcgcgaatgggttggtctcgccgtcgaaggcaacaagcttgatcggtaaggtgttccctgttgttgctgttgtttaggatcctcagtgttgactgacgtcgaagtctcaacatcggtccgccagacgtctagatgagtaccccgttcctcggctgacacatcgtgatcgaatccatcctcgggctcgggctctggctctgactgaccccacgtccccgcctcttctttccgtcctcctcgtcgggttaaaggtgcccggtctcggtaatctgctgcggtcggcgtcagttgggtctgtccctgcgctcgggcatagaactcgtgcatctgcatacattgtgcgaacagttggctgtagtacgggttcatcaatagctgatagtgggtcaactgagcgatgagtgaggctgggacggctgctggatgagtgttcgggtagacatagtatgccggatgggaaggcgaatatggtcctgtcgacgattgaaacgaaggttgagatgggatctggggcgatcgggaggagtacgtcccggtgctcgtgtcggacgtcgtgatggtgaccggagtctccaagactgatgctcctgttgatggattcgatcgagaggagatcgatggggtggaataaataccactcggtggagacgtctgagggcccaagttggattgagcagtagagggaggagggtgggatgtgctcgaataagaaaaccctgatgggagctgtgtttgaattggagtcagaccggttgagaagctaaacatcggcaactcgaatgggaggagcgaagcgttcggactggtgggcgagtaaaccgaagagaacgcgagtggaaacggcgaaggatggatcggggaaggacttgggtgaggcagcgtcacatttgtcgaaggatgtgtggagttaaagtcaggaagcgagcccacttggagtagtccagtgtgtatatttatgagtcaattgggagagtaaggaagctttagcgtatttgcacttttcttgcaatagatgaacaggacgtacgttggcctgagacccgatcgaaaggatacggagccgagtgaccggatgtattcattctaggcaatcttggccgggaaaactgtatcggttgatacggcgcctctttttctggaaaaaataaacatgtgtggtcaggtggagaatcagtgggtgattagcgtcacagtgctccaaatccgttgacaaattcaagaaagaagaaaggagaatgtgaccgaactgtagggcttttgtttggtggggcttttcttcgcgcctcgctcgttcagctctacatcctccatgctgatccccaagtcttgtcgggatcgttttgggcccaaggagcggcgggagagcgggcttttcgtgttatcgctacttgaatcagctgaggattgaggggagtattctgcttaagagatcagaccaatggggataaagaaggtgaaggaggacgaagaggaagaggagaatcagacgcgtaatagagagcgaggcgaaagagatgtgaaattctatcgaatggagagatcaaagaaagaacgcgagcaagctaaccttgaagggggtagtccaagcaatcctttgcccagatgacagccgattctaggcttctcgggaccggattaccttctgcaaccaaggcatcgagtttttcttgatcgagtgcaatatgctttaggatagtcctcctttggaagtctgatgagatatttggttgtcaacataagaatccgacggaaaaatcaagaaaacggacgtgacgcgcaagttaagagggacgagcatgggaaggaaacagaaggacaagtgagtaggtgagtgttggttcatgagtttgagggcaaagtcattcaccttttcctttgcactcaagggtaaagcagtagcaacggaatcgcttagacatgatcgattgaccgacccgagagaaaggcaaaggtgtattggtatcaaaagggtaggtgagatgatgatgatgacgacgacgatgatctcgtgtgcgtatgcgtgtgtacgcgtgagtatgaagagacagatagaaggagacagaactggctatatggaactaagaatgcttgagaaaggaaaaaaaaaggacttggagagaagcaaggcaaggatggtgttgcatctaatatctaatttcacccactctgtgcatgagaagtaagtaagcaagccagcaaaggtgcaagcaaggatgcaagcttagacgccaggagcccgaagaggaaacgagcaggatgaaagagagaaaaggacaagtaaaaatcaaagtatctccagtcttctgtgggaaagccagagattgcgcttttgaagatacacaggtatcttcgggtatcaatttttcttcgcttcaatcgtatgggcgtacaagactgccagccaaccgaagcgatcttattcggaatttttaccttcggtgtaatctcaagtggatacaaacgaccgagctaatgcacggtcgcatgacgggaatagtcgagatcattaattttgaatggatgcacatcgtcggttaaacagttccatgtggcgttgctggtttccttcagagcgtgtgagaagaatcgatcggcatcacccatcaaagtgaccaaccgacacagggagactgtcactgtatcttttagtcggcgatagagagatatgcgttgaattttatccggaaggaatgaatacattcaactcctctatatggtatctacggaaatcgtatacaggtgggcagtcaccgaagaatgtttaacttggtcacccgaccaaacggcatggctactggattcgttcagtcgccattctaccaagtgatctttatctattcattctaatactcgtcttgctcatgttttctcaaggaaagtatggccgacaatatgagaatgatcaggaggaataagtagaaaagaagggaaagttgacgaagcgagatgctgtaaacattgaatggatgtataaatgaatgaacgatgactaagcatatgatcacgcgtcgacacagagcattgtgcgacgcgacgcgacgcgatgcttccctcagtcatcttggaaacgaacgaaccaagccttccgcgttcgtccatcaacctccagaagcataaaaagttcaaccatcgatgtctccttctctttcgaatgacgatcatatacggccggactctcactattccgccctgcccaatctaaataatgctttcagcttgaagggagtttctagaagttatgaccatcaggtccggccttccctttgctataagccagccgcgtctcatgtacttacctttccatctttgatcaaccttcattcgtctcagtacgccagcctttacttttccaggcttgttcatctccgaccaccagtaaaagctcgagccgagaagaaatggaaaggcgcccaaggtctgtttcactagcttatcgctcgttcctcttcattcgttagcttctccgtccttaaatctgacgatcgcttccaccatcgattaaactcaggaaacccgaagccgatggagagagtgctcgacgttcaacaaggagagctctgttggatcaccggtaccatttatatggacatgcccctcaagcccaatgtgctggacgacatcagcaaagacgtacgtttcgatcctccacgtgcatatacacatccttttggccttatatccctaggtctgatatcacagattctgatgtgttgggaagcccttatagaaatggattaccgcgcctccaccaagagagacgttcttctcgtccgaagatgagatccttttggaggacgagtctggccgggtgaagttggtaggagaaagattgaaacatgtcaacttggttacaggtccgtttcttacgctcttagccatttacaaccaatatctgccgacactatcttcccatttaacctttgcgaaaaaaaggtgtagtgttagctgctctaggatatgaggccgctgccggcgagtttgaggtagtagacctatgctttgctgggttaccaccccgattcgattattcagctaaaccgaaggaagcacaaaagacgaaggtcaaagggaagccagtcttagccgaggctgatccaaatccagagatcgaacaagatggatcctgggtagctctcgtatcaggattagatatcaccggaggagagagtgtggcggatctcagatgggcgcttcttgtcgagtggctgatgggtgaggccggcagcgacctggaccgggagtcaggaggaaaagtctctcaattgatattggctggaaactctttagcgacaccctctacagtagatgatccagacaaagccagggtatatggctacgatccaacgacatattctactttacctatccaaaccttagacaacttgctctactctctagcccctctcatgcccatcacactacttccaggaccgaacgatccatcgggcacgatccttccacaacagcctttgcccaggctcatgttcaaacgaacttctcctcacgattcatttagaacaacgacaaacccgagttggcttcaagtaggtggcaagcggttcctcggaggtgcaggacagacagtggatgatgtcttcaagtatctgccggagaatgacggtagtcggattggactcgtgagggatatgctccactggagatgtatggctccaacagctccagacacgctctgtaagtgacagagttcctttctcatgcttcatcaacaactctacggttgagaaaaaaaatcgagaactatgaaacagaggctgacatgttctttcccatatttatcttactggtccaaagggtgccatccctttgacaaaggagaccctttcttattggagcacgcgcccgatgtattttttattggcaaccagccctcatttcaaacatgcaccgtatcaggttcgtctgatttcattatgttcgacttctattcttcattaaataagataactcatttgacatcgcgcgcaccattcttcatctttatcacttgaaaatgattcagacgcagacgatagcctgacccggatagtcctcatacccaaattttccgagacaggtacagtcgtacttgtgcacacatcttctcttgaggttaagaccatggagtttggagtctttgcgtgggatggcgcaggaaatgaagcgacgggttgatagaatgtctttatatctattctccttgtgacaaaaaatcacgtgatccacttgttccctggtcagcatcttaccccgcatcgtacggtagatatatacctgcaaacactcgagtttctctcaaccaacagtctgtatcatctgtatcatcttcattatcgtccttgaaccaccacgctcagctctcggtcccatcagatggccgaatctatctctacctggaaagaaagaaggaccaggttgttagcagctcttgaccaacctatagaccagcaggatgaagatctcatcggcaagcttatagatgtgacgttaactgaaagtcgaaccggcgaaacaggcgacgctgaggaaggtgagctctacaactacatctaattgatgcacccatattcttaagttgtttctcactcgcacatatgatcccatgtaaaattgaaatagaagttcgctcgaaagttaaggagcttggaatcagaacagacgactttgtgcctgtatcgcatattgctcaaggtcaattcggaacagttagtcctcctttcagcctgcatatcatacccggctgtcctgatgcttgcatgtgttgaagatattcgctaagttgctctaacgattgaaatttataggtagaccttgtcagatgcaagtttgatgatgagctgtattgtatgaagacgatgagcaaggtaacacttcgcagaagccgtcaggtatgccctttcctttcgttcccatcctgtcgacaaactgtaactcaacttgatcctttggtttttttaaacttgaacatgattccaaaacacagcacacctctccaatacctgaacggatactacatactctcgctcttaccacaaactcgattttctctcctcaaatcctgtgtgccttccaatccccactttcgctccatttaatcatggattttatcccatacggaaccctctgggacgtgctaatctctacaccctccagtagactcccagaatcagatgtcaggtactggtcagttggtatggtttgcgcggtagaatggctatccgacaacggttgggcacacagagatctcaagcctcacaactttcttatccgtcccggtgagaacaaccgaatgccgagagccgtcctgacggactttggaacggccgcacaggctctacctgaaggaagaaataaaaacagaaaggtcttacctataacggcgtgcttatggcctgtcggcacaccggattatattgccccagagatcttggaggctcacgaggatgcgctcgtcagggcggaagaggatgaagagagagcagaagacagcgaggagaaatcagaggaaggcggcaaatcaagatcagcagagacagagggctatggcattcaagtggattggtggtcgttgggtgtcattatcaggtcggttcctcttcccaaggatagtctcgaccatatgatctactgactctggtagacattcgcgtccatgcgcgaaatcagtgaacttctttttggcgagcctcctttctttgcagaaagtatagcggatacctactggaagattgtcaatttcgaggttcgtctgtcattgccttgctgtggtcttcttatgtcataaagacgaaatggctcactgaaatcctatcgaactaaaaacaactgactcgaatcaaaatgtaacaggacagtctaaagtttcccccggaagttgacatgtcgagtgaattcgaagatttgatacgacggtaaagctgactcgctctgtgtcttgccttatgtgtcataactcatgagcttttccttcttttgagaaatcacagcctgttgaagcattctacagaaagactaggccgaaacggtacatctgaggtgaaattccatccttggttcagagatgtcatctggccatcgacctcgtgtacaccgccttcaggtaagctaggttcatcatgcatgctgatgaaaaagttcactcagactcatttctgggtggggtttctcttgtacaggcataccaccaccagaactattccttcccccaccccctccggttcctcaatattctcaacatccatttgatctatccttgtcaaatctttatgagggacaaggtgatggagaggacgacaataatcctttcgcattttcagacctgttcatctcttcgcctggcctgtccgtcttacattctagagaatcgcccttacggtcgaatcaagatcctaatcggatgaagctgacaggcatctcatggctcggaggtagtcctcagtcattcgctcctcccgatcgggtcagtagcctaagcgaggcgttcgacaggtccttaatcttccatgatatagccgaggagaaagtcagatcatccgagttggcagatgaatggacaggcttcacttggggacctacgcaggatgcgttcgaagtgaaaagactcaatcggttgcccttagaattcatgactccctttgatcagcccgtgctcaattcgttccctggagaagacgatttcttggcattctctttcgatggaaaggccttggagtccccgttcacacctgcatctatcaaacgccatcgggatcaaacaccgcaccggccgctcctgccaccagactccaaacgcccgccgaatccaactatgtcatccaggaaaaatgtttaccaaacaccagcccgttcttcagcctcattctctgcatcattcccgatgtctgcgccttacagtcatggaaataggatacccagcacggctagtagacggtccagacccgtcacagatgttaaggcgctacagcagatggtagattgcattgggttgagcgccaggaagcgcgtattagagagcgggaagaaaccacggttattagtcctcagacgatggaagaggtcttcaagtcatggcgaggatagccaagaggaggagaaggatcccagagaggagcgtcagataggaagttcgagagctacaggttggacgccaagtccttctcgagctatgcatttcagcgcagacgctggctctccgagtaataaaccttcgtcttggcggctaagaggagaacttagcaaagatgttgatttggacgatgatgatggggtagagattaacggagggggtagcaaagggttttcaaagagaattgaagaactcgagagcaggcggaaattacttgttggagagctcgataaagtcaaggatggcttagtgggcgttaggcagacggttgacaaatggtgaatatgcactttgaatatctgcgttctgatctcttgtatatcattctggttgaaatgtcattataatcgtaggggctgggttttgagagaagggacagaacaaaagaacacgccggggtatagacgtgatacagggggaaatgacagaaggtagggacaatgaaccatcatcaccatcatgttctaaagtggcagcgataccacgaaaagaaatgaaaactgtttaggtgtcgaatgaaatagaatccaactctaaggctttgtctcagccgccttgatctgttcctcaagcgaatctccttccttcttaaccgattgataggcctaagaacagaccaaatgtcaaacaagaacgatattgtgtgagtgtcgaacggatacaaatagaaatacaagagttacgttccacaatccgaaccagaatgacaagaatgaactcacagcacccatcaattccaatccaacggctcgcagtcgaagcttctccctagagacctccggttgagataggatacggtcacacgtctcacctgcaaagtaaaggaagagcgtttaaaagaaggaaataatcgccagatgatagtaaccatcaaaccaatgaaaagaattcagattcattcaagagaaacttaaattacggcaagctgagagcaaatccccttcgttatatgacgagtcagaagttgaagaaaacttacggataacagattcgacttccatctttgcagacttccataaggttttgagaccctcggcagcggcctcttcttccagcgccttcatctgttccggtgtaagacccaacttctcggcagcctgaagcttttcaaacacattcttgaggtgaagacctgttcaaccgtagtcatcaacatcagtatgatatcacaaactgcttcatcttacagagctttcgctcttaagaggtggtgcagaacaggccaaagacgaataaatacgttaaaaagagaacctaccagcgcgaactaaagaaatgctgtctgaaattgtatccatcccagacttggctccatgaaaccatccgatcacacctccaaacgatcctgtcgaagcgttgtattgtctataaattgcccaagaatgtgaatggaatctaagtagatgtttgtcgtatgttaacgaaagatacagagggacgtaccggcctcgggcactgtacgtgctaccgacggcttgaagtagctcatgcccgtacgactctagtaccagttcctctgcctcgagggaacatatggtctagcgtcatttttccaattacggtagtcatcagtaaaataaaaaaacctttcagagctgacggagaaatgcttaactgaccttgaagctttcgccaacttccttctctgcccttcccatatcttccggccggcctgccccactaccttggacaccttccacaaagatcgccaacttcttctccagattcacgacaagtttatcgactcgctcctttcgctccttgtctgccaacgcatccttctcctttttcaacttatctaatctggccttctcctcgggcggaataaccattttgccggatttagaatcatacaccatccgaggggttgatggatcgtcattttcttcaccagtttcggcgtcggccgcttgaagagcttctttcattgatcgacctgtatcatggtttagaatcattcagtcgatttagtacggtgtagacgaacgctgtcagagaacctctacacaaacgacgggaagaaagctaagaaaaacagatgaggaaaaagaacaaacctattgagatttgaccgatgatatcattgaacttttctccaccgaataatgtcccaaacaattcctccgggtccacctgatgtcgcagcatcattcacaatcaaataccccagaagaaaggtatcggtaggtcagtcagtccatacgctcctcttcaatatcgtttacagatgagattgaagaaaattcggagtaaagacgtacgaaaccttcagcgggctcatttcctttacttccaaactcattatacttctttctaagcgccgggtcggaaagcacctgctctcaccatatattcatccggtatgatcaacatctggaggtcgcaaagctagtctgaattttcaaggcatactttggaaaactatgacatacctgataggcaatagcgacctctttgaacttttcctcagcatccgggtcatctctgttctctgttgtcacgagacatgagcggaggcgtttagctttcaatactactgcggctttctttattctccttgagtgaaagagcacgtactatcagggtgaagtttgatagctagtctacgataagccttcttgatcctgaggagacaaaaaatcatcagttgcagatagaattgtcaatatatctcgcttcccgcataaccccaccctcttccaacctcttatcctcgtcggtcgacagattcctcccgtctgacagagagttggctgaacttactcatccgcatcagccgtgactccaacccccaggatatcatagtaccgactctccaatgggcgctcgtttgaacctatcttcctacccttcttctccttacccacctgaccggtgcctgccgatgatgagcccgcgcctgattgcgagccggacgaggtgtcatacgggttgaacgtcggcggatcaaatatccggccacaaggcttgttagagcatcgaatccggaaaggcttagactgagaaacaggactgcgagtgagcaaatcatcaattggcagagaaaccaggcaaagataagaatttaatggaataggaaagtgtcagctgagcaccataagtatacgcgttctttagattcatacgctgagttcgagtctcttaacatgagactcacgtcgaaaagtccaacagagatttacagctacaataaaccccacgaggaggaaaggcatttgatgaagaaaggaaacgataagtacatcatgctcggatcggctgtaagaaagactagactgagaagaatgagcataaggttttgacaagagagctcgaaactgactgtgggcattggacagtgatggtgccttcgggcctaagtctactctcaacgatggtagacattgatctctcctttgtttgcttggatactttgggacagacgaatcgaagagggatgattgtggctggatgagggagcggatgaattggctagagagtaaccggggcaaacaagaatcgacggagaatgaaaacgtcatttctctgtttctgcctttgactgagtattaaaattcctttcgcttcctcaacaacctctagattcatattgttcttggtctcacacgtgttgaatagagcatacatatggacaggatgtgcatgtacagagtagcaacagtacagcataccgattgcacgaatacaacaagaaacaaagtaactctcggccgtctaaagcatcgctcgaatatcttcttctcggttgagtagcctgccttccatacctccatgtaccatgacgacctgtccagtaacatgcccagaggcagaagaagacgccaaaaagaggatctgatttgcgatgtccgatggaagcgcaaactttcggagtggcaccctgatggaagaagagatagaaggacgtggccactcggatcaacagattccatgagacacaccacgcgttagagaagaaaagaaaaaaacccacgtagctatagagttgtacacaatggtagggttggcaagtgcagaagctacagctggtgtgcgaacccttgattccgggtgaacacatttcaatgtagaagttatgcgttatttagtacagactgctatgaagctcacagaaacgacaagaccttaccatccgggcgcgacgacgttgactctggctaaaggggcaatcttgacaatctcattcttgagagagagcgtgaagccgttcatgagagctgatttagtggacgcgtagtctggacgcgcacaagagagtctgttgattcagaacgagtatacaagaatacacagttgccaattgggacataaaagagagaccgtacccgcatggccagcttctccgatcaaaccagcagtagacctaatgttgagagaagaacaagacagtcattaccaaccagatacaaagcaaggtggagaagcctctaacacagaacttacccaacgaagaccactgcgatcttgtgcctgttcttctcctcaacatactttagttgtttcaagaacgcttttaccattatgaatgcacctgatgtccagccacgcagacatatttgggtgggataccaaagaagcttgtatgagttaatcgaggtcaaatagaatagagctacagaggatacccacccgtcagattgatgccaatcgtcttgttccattcagacagcggcatagaagctatcgggtagtcggtgagtccgacatacgcatggttgactgtctcatccaaccgagaggaacacctgtgagcactgaggattagtttcagagaagaagagaagagagaagaggatgccataccaacaaggacctcaactgccttgcccagcctttccttagcatcgacgaagagcttatctacctgactctcgtcccgaacatcagctttgagtgcggcaagacggtcgtgtttgatctctttgagcgagtctgggttggagttgtagtgtgcggtgacgagcgcgccgttatcaagaaacgcctgggtggtgacgataccgattcctccggacgctccggtgacgagcgcatgaacagaatcgagagcaaggtcgaaaggcatgtctgtataagattgtatgagcgagtgaagtaacgagtacgatctatgtggaaacagagtcgaacagatcttatatacctgatggacgaggaggagcaaaggattgactcgattaactcagtcacttccgctttcaccttctccatctcatcggactcgatctctttcgtcaccatcaccatcaccatcaccatcactatcgttcgtcagttctgactcattttgttctaggccattcagtctgcccggcatctacctatgacaagccaattcacatacgaggctccttgtaagcatttcttccaagtttgggcttgcttctcggtatcggattctctcttccttctggctgaacgttctcctcctgatggacatacaaaaccagggccgatatatgcgcttgcgttcaccaacagccggcagcatctcccccatcggctggccctgggaagctgtgtgaccggtcagaactatctccgtgttgtggctcgtacagaacaggtcggtctccagcattctgtcgctttctgtcgctttctgaccaggacagtgttgatgtccctttctcggctgatgatttcgaccatcctcatcgttctacctctcgctctgtgaattctacagaatacctcatcaaatagactatcagcagtggccgaggcacctctcacatatcctgcaacctgtatcgcatgggagccgtttccctcccatcggtcttcgtctgccgccaattcatacagggagctcatcgcaactaccggcgatgctttgcatatatgggaatatatcgcgcctcctccgggaggctataatcaaggcgggctgaaagaagtcgggtcattagctcatgttcgtcttctcgctttctcgtttatcacttatgctactccatactccgagactgtcactcattctgtacgcaaaccaaacctggactcgaacagtccaaatcagcgtcttcatcagggacaaacgcgtcgacaggtgtatacaacagtccggctccgctcacctcactttcatggaatgcgttcaatccgagtagaatcgtaacctccagtatagatactacatgcaccgtctgggtaagctgtctcaaccgctctgtgttccttcacgtcaaacatgcccatagcgaagcctgacggaacaatcatctcttaccctattttgttcaggatattcaaacaagcacggctgtgacgcagctgattgctcatgatcgtgaagtggtaggtacttcaatctcttacatgcacctggtattcggctgtgttgatttgctgagtgctcttcctcactttgcttcctttcatgtgatagtttgacgtagcttggttgccgggtgggacagaagtgtttgtctccgccgggtctgatggatccattcgagcgttcgaccttcggtctctcgaacattccaccattcttttcgagtctacacgagcaccttcatcttactcttctccctcaccttcctcgtcattcaacccgtccaaggcgttgatgcggatcgctttcgatccgtcaaattctcattacctggctacgttcaaacaggatagcggagatattcaggtcttggatatgcgaagcccaggtactccggtcgtcgaaatgagaaacggacgggatgggggcaaggtcggatgtatatcttggggcgagaagggcgtccgaggcaagggtggactttgttcaggaggtgagcgtgctctaccacttctgtgctacattcatagagaactcatcaaactcctctccctctctttctttctgcatgtgccaggcgatgatgctctgcttcgattatgggactcttcgatgcctagtcttccacctcctaactatgcgcaccagtcgtcgattctgccttcgaatccatcaactccgtcatcttctctgcccatatcccgttctacgtcggcttcgtccgaaaagccaccatcggtcccatcaaggaccgagcctagagccgtctttgaggcgccgaccgaaatcgacaacatagcctgtggattgggaggtgactgggttgcctgtgcagggggcggaacaagctatgggggccggggctgggtacggtctgtaaaaatatagagcgattcatatacatgcctgtgaaccttttaatttcatttccttccaatttacttgactgtatccgccaatgcttctttctcttcggaggtaacaatcagttgataggccgtttggcaagaacagtatctgagatgaagagagtcatcatcccatgcgctgtgtttcctttccggttggaaacgcgtccagaagctctgaaactttcaagatcgttaaactcctcaccaccatcatcatcatcatcattcagcttgatcatccgttcgatgaaacgttttcttttcttttcctttctttccttcgtactcccttcagctctcgctacccctctcggacatgaatcgcagactcctttcgtagaaccatcaacgatcgagaagtcttaccggccggttgtcatctggcatgggatgggcgactcggccttcgccgatggtatggtaagcaaagctaagcacttcactttcaagattgcttgctgctcacaaagttgtttggatatcatcgtctgacggttggttcttggaacggcggtattgtatacatatgcgggatcttgtctttgatagataggagtaaaagaggatatagagaaactataccctgggatttatgttcaccttgtagccgtcgaaccagacggatcgagcgatcggagagcagggttcgtgagtcccctctttctctacaagtccgatcatgcggtggtagtttacatggatatgggttgatgctgatctttcgatttaacggatgggatatgggaatagtatgggaatgtgaatgatcagatcgataaagtcgcggctcaacttcaagaggttgaggaactcgggcaaggggttagttcaactatatacacctgatatgttgtctcgtttctttgggatattcacaaaggatcaaaaaagttattgaaacagctttgattgtgtatgttgggatcgcaatgggcaacagttcgatgccatcgggttctctcaaggaggccaatttctaaggtccgtcttgtctctgtgctcgaggttctttcagaaccaaacgttctcaatgtgtttccgtgtttgtacgagcagagcttacgtggaatggcacaacgatcctccggtatctaacttgataactgtacgtggtcatgtatacttttggctaggtcggtgaacgtctgaacgagactgaccagttggtaatctcatatttagtttggtgctcaacatatgggaattgcggacctaccggcctgccgaccttcggacgtgagtgctgacatgtgcttgaaccgaacacacgctcatcagtcgatcgtgcgagatgctcacttcgaggtttgtccgacatacgaccaaactagttcttatgtcggggggctcgatctgccgctcgtgctagggtctatacgccctgggctcagaggaacctggttcaggctcagtattaccgcgatcatgatcgattggatctttacctctctaccaacacgtttgtctttctctttccgtttggctttatgtttttcggcaaacttctcaagtatgtgtaaacagtctctaatctcttgcatcggacggacagtttcctggctgagatcaacaatgagagagaatacaaaaacgagacattcgcgtctaacctgggctcgctctccaacctggtcctccttcgattcaccgaggagaccacggtctatccagcgatctcttcctggtttggttcccttcatcctctggactctagtctggactcggccgatgtagcaccagatgaagagagagaaatcccgttatacgatcagccgctttaccaggcggactggctcggtcttcgttcattggacgagaaggatgcgctcaaattggagtggtgcgagggccagcatatggagatccaaggttgttggcacagagtgttggaccaatggatcggaagcgatgtctgagcgacgagactgttcttgtgtcgatcgagtatcatctatccgactgttgatttgtcgaacgtctgccggatcttccgagagagtctttttttatttctttattttaatctttcttcgtaatgttggacatgttttctattccttaaccgcagtgtaacccacacgctgcgggcaaaccagtttctcttgtctcggtctcagttgggtgaactgatccagaacgaggagaacagaatagcccggctaaggaaagaaggatagagaacacgaaagaaacaaatgacgacgtgtgaggagcgaccgcaaagggaaggcggagggaactgctaagatcatccagtgttggttcaaaattctacccggctgattcggccagtttcttccccatcctctgttgtgtcgagccttctgttctctttccttgttgggtgttgttcactgtcttcatctgcgttctttccggttctgatagttccctgttccggcatagtttcttaatatcgttgtttctttgtttcttgtccggaatagagagtcacgaatttcttgcctcgtttttcaatctacttaaaccctatcgccgctttttcctctctctctccttctctcctttctttcatccattgcacacacaaatatcatcttcctcccttctcttccctcccttcttccctaccattcctaaccaaaccttttgatcacccccttccccttccccttccctttcccaatacatcttcaaaagaggcttgcctttgaatctacgctctttacaacaatcacttttgcaaaccgctatctttgaattcagcctctgccttaaaagagaaaaagaaacacccctattaactcacacaacacaccgaaccatgtttgcttctacttctaccaccaccgtcctctccgctcttctgctggcctcgtcctccgcgatggccatgccttcccttggtcaccacgccaattccgctttgactacgctctcccatcttcccattgttggtggatacattgcacccaacggcttgattgagacctccgttgaggctgcctccaagagggacctcgatagaaggtactatggtgactctagaggattcactcgacgtgagttccgactattttttctttcaatatcattttctctcctgttgttgttgttgttgttgttgttgttgttgttgtcttctgtttgccaagaagccaagatcgcacgtgagggaagacgcgtgagcggtgaccgcgccaagagacgtgtcaagatttttgttgaccctgttttctactattcactttcattctaccagccgatcctcttggtccggaaaagcgagcgctcgctactggctggtcttcattgggctgtgtgaccgagggaaagaatgtgagaacgttgagcggatacgcatactacgctgggtctgtcactccagaaacttgcatggcaaactgtctgcagaaggggtacaccatcgccggtgtcgaatggggagatgagtgggttcttttctttctccttttttcccggatcggtagcgatgagattacccgtttagaacttttgtctgatcaattactgatcttcacaccttttccatcaaacaaggtgttattgtggaaactccttcgctggcggaggaggggctgcatcgaccgcttgcaacgtggcctgtgtcggttcgttcgcttttcttttcgtttctcgttccctcgagcaatcatgagaaaaacaatcagtagctgatcttctgatacgtctgttcctcgacctcttcaggtgattcgtcgtccacttgcggaggaaactatacattgaacgcttaccagtacaattcagccagtgccagtgcctctgccggttgctctgtcgcggctgcgaccagtgtgacctcgtcaaagagtgcttccgcttccgcttccacatccgcatctgcctcgtcgtccgctttccaaacctctatccgatcgtcctccgccgttgcttcttccacctccaccgcctccgccgcttctgccaccagcacgagtagctcgtcgacgacgaccgaatgggaagccctcggatgctttgttgataacccatcgttacgaagcggaaagaacgtcctgctcggttccaagttgacctcgacgaccatgacgatctctacgtgccagacccgatgtgccggacagggctacaactttgccggtctggagaattctgacgagtgctggtgtggagatctgaccactgctgatgtcgcgggtttgacgtcgaacacagtttggtgcaacatgccttgcactggaaagagctcggagagctgtggtggtggttggtccctccagctatacgagcaggtcgatgtcagcaccagttgttaaatatcgtaacaacgccaatagaagaccgaaaggacacgcgcccctctccctcttctcgtatcctaccctatcgtcttttcttatttatttagtgttctgtgaacgtctggtatatttttctctcctttttctctcttcttccttctctctccaccttggtgatcgccttggttggtcggactggttccctccccttatctctgtatatatctcgaagtacgctagttcgtacatatctctagctttgatcgtatctatctcgatctagccatatcattatttccccatctctctttcctctcggatttctctcacaagctggtcttgataagagttgtttcgaggggacaagatatgagcaaggaaaagggggctccctccgtttcttaatcgtattattattattcctcggtgaagatcttcgtctgtacggatttgatatctatcatgtgctttgctttgcgttttcacttgttctgtattgcgtaaaagacgagacggacgacaacgacaaaaaggggaggaagagagaaaaagaaccgtcttgtatatacctcggactagccggtttacacacacacaccctagtcaatcagtctgcgccttacgaagacgacttgattccctgaatcgctttggtcaactctgggacatgatcgtagaggtcacccacgagtccaacatcggccacttggaagatcggtgcttccttgtccttgttgatggcgacgatgagcttgctctccttcattccggccaagtgctggattgcacccgaaattccgacagcgacgtatagttctggggcgacgacctttccggtctgaccaacctgaaggttgttgtcagcatatccggcatcgacggccgctcgggaggctccaatggctataacaagatgaaatcaatggtcaaccccttgaaggatgaaacttgctagacatgaagaggaagggcagaaggaacgaaccggcaccaagagcgtcagcgagaggctccatgagtccaccgaactgctccttgttcttcaaagctcgtccgccagaaacaaccttggaggccgagccaagatccggtcgagccgacacggtttcacttgtcgacacaaacttgactggggctagtgacgaaagaacaaaagagacgccgtcgacaagtattcagcatcgagcgatcagaatagatttgagcaagacgacgacaggaaaacgcacaggaagcaggaacggcctcaacggtctcagcttcggccgcgccaccctcgagagcggccttctcgaatgcggtcggtcggatagtaagaatcttgacggcctcggttgatttgatctgggcgatgatgtttccagcgtctaagaaggagaaacatagaaggatcaccaaccgagagagacaggaaacgttaggttcctagaccgtgaagatagaagaaattaaaagaagacttgcatatcggccgagtgaattgctctccgccggcttcgatcttgacaacatcagagatcatcgtggtgtccaacctaacatcgaacgtgaccaacatgattagcgcgcgaaggccaagaacgagaaaatgagggaaagagtacgaaaaactcacaaagcagatacccgggggaacaagtccttgccgactgccgagtgagcacctacaaggtgggagaatcccttggtgggaacgaccgaggccaagagaggtgccaacgcttgattgagggaggataaatgagaacgatagaaagttgagacgagaaagaaagaggtcagaagcgacattgtttccggtgcgagcacgataggaactcacgctcagagaggtagtgctcgtagtcgggtgatgttgacgaaaagaccttggacaggccagggatgctaagggaaggaggagagttgaatagatcagacgtgctgcaacggggtttccagaagaaggtgcacgacctacctcttgaccttatcaacaatagcctggacgtccccttccttgccggtgacgagggccgagacctatgagatagaggtacacattcgtacaaaaaagacaccaatcagagggattagaggcgaggtctttgttccgatgcttgcaaagtaacaagcaaagacagaaggatagaagcctagtgatttctgaactcagagtagagagcgaccgtaggaaagaaagagagagagaaaaagaggggaaggatgataaagagaaaagcaaagaacgcacgtcgtcgccgatagccttcgcagccgtgatggccgagagagacgagggaacaatctctcctcgtttgtgctcgacaaaaacgagagaagaaagcgaccgggcctgaagcaaggaagacgatctagagataagcgaggcaagagtagtagctgaccgagcacttgatcgaagggcgagcatggctatcgacgttgtaggatggtgtgggatggacggagaaagaaggaaggaaggttagatgtcggtgttgcatggcgtgaatcaggcacgaggaaaaagagacgattcattaggaaaagtctctattcgttttgccagatcgtaataggagatgtctattgaggcgatagtccgcccgagtattagagaaaatcgacagacatactagagaaaatgtgtagtcgagggagttgcatgtggcggtaggcaccaggaaccagagggcgtaacaacgtgtgtaaggcggtgcttgcataaggcaatgcaaacaccttcccccttccatcacttctcgagtcgtcgatagtcgcttacttcgactgttcagacgctgatcacttgaacttgaacatcaatccgttcaccaccctgacatgtcactctcgatccttgtcccgatcgttctgatacttccgatggcctatgtggcctactcgatcgtatttcctgctgtgagtcctggttatgacggtctggactccgtgccgaattcccacaacgaaggatacacttggattcctctggaggcccagcgagcgctcctgttgaggacgtacaccccaaaggaacttgctccattcgatggcactcagagcgatggtcggattcttttggcgatagacaggaaagtctttgacgtcaccgccggtcggacattctacggacccgatggaccgtacgggaactttgcaggtagagacgccagcagaggtatggcaaagcagagctttgagttgggtacgtttgtttgactcttagtgtattataggatgtgtatataagattaggtactagtggatgagtgaatactagagtaccaaggcatgctcatctcgttcatcctattaactctctaaacagagatgctgacaccgattgatcagccgatcgataagctacaagacctcacgccttctgaaatgtcagtcagctagccagtttgttattctttcttcggttttcagctcacaatcatatctatatccaatttgcttttagtgaaaatatgaacggttcgtatcggtcttacggtccggattgaactttatcagaccagtcaatctcacttctatctgtctctttctcttaattcctctcaaaacaccctctctaggctggatcgaacatttcacaaacaagtatatcatctgtgggtcattgatagagaacaccgattcatgaactacttttagctctcctttcgatcagcaaggtatttgttttctcgtcagatagtatctttcaagaaggaaaaaaagacagagcatacatagatcatactggtacaacctcatcaaacccacataaaaacatgtagaggaaaaatggaaagctcatgcctagggaaggcaagagggcatagacggtctatatatacagaggaaggttgaagaagataaagctctcgcgcgcgcgtgttgacaaccatactctcaagctgttcgggagctgatgggcatccccatgaatgacgcacccgtatcggccattgtaaattgaggattcagtccaacctacacacacacaaaggaaaattgcgcacaaaccaagaggaaggaagcctctccgtggtcagtcgggttaaatcaggagcaattggcttgaatttatcaacataaatagtgcaaatgtccttactaaatgagcggtctctgacttttcagctacctcatccatagagtaaccgtgtcccttcttgtccgctggcatagcatcgtacacacttctggcatactccggagcgacagcgtatagctggatcagatagttcctctgtacaatcgaatctgcgttctaatattgagagtacagatcggaaaggtaaagacagaaatgaaagacgcaggtcagtagagaaggaagacgaccaaccctttggacacgtcactcatgaatacactcaccttgagcaatctagccgtgtttgaatgcaagtttgctcgctgttgatcgttcatcacccgtcggtaaagtactctgacctggttatattctgatggatgaccttgctgtcgatagtaactctttctcgatactacgttcgaaccgacctgcatcggaatctccgcgtaggcttggccgccaaagccaggtgttgaatttgcgcttggctcggtggagtgatacgagttggggaagtagtgtggttttccagagccgtttccatcagttcgcatggtgccattgaagttatcaggcgaatggaacttgctcatgaacgggcctgcccgaatgtgtacatattgcgggtatacgatcagctttagctcttgaagtgcacacgaggaaataatatgggagagaatggactgacagttgacgggaatctgatggatgtttgcgcttcccaatcgatgatactgagcatctcggtagctttggtgatgatgaaaagcagctccagtaggtataaatccctgatctgagaatgagtgctattcggcagatggatgctttgttactcacaagaacattctccattggagaagtgtatctgggctggcttcgattcctggaacgagtgatccaggggagaatgcagcttgctcaacatccctatccgattgagggaaacagattttattttattttccttgttagaaagccaagtaggagtttgagatacatgacagattcgaagtcctcaccgatggtagtcttcggggttccggtttaatatgagctcgccgacttcggtcatcgagtattctcctcttggcctgtaaacaacggttgtatcagtccgttctagacaaaatcactctgcctcttgcgcgaagatgcgttgcagaaggaacaaagggttggaaaggacacttaccagaccttggtaacatcgaatggatcgaatgcacaagcagcagcctctttgggtttcatcacctggacgaacagtgtccacctagcatcacctccactttcgatatggtcgaatagatctcgtttcgcgaagtctgggtcctctccacattgaatcagcgcttcttcatgggtaaactgtttgacgccttgttgactcttccagtggtactgatgagaaaaatagatatgtcagagaacgggtgattcagcacacacatgcatatatttcaagcgtcaggagatagctctgagaaatgaaccaccaaaaacagaccgaccttgacaaagacagactctccggcgttattcgtccatcggaaggtatgacagccaaacccagacatatacctccaaccgaccggggtaccataatcgctgaacaacatcagaccagcatgctgtgactctggtacgttcgccagaaaatcaaaccaggcattgtaatctaaca

SEQ ID NO: 1564 - DNA, 42411 bp, Xanthophyllomyces dendrorhous
gtacaattacatgcaaaatcatcaaacatgaggagatgttggggaaaacgtcagggacagttagtatgtgtaacgtttgtggtagcaaagactagagcgcaaagacatatgtgagcattatttcactcacgggtttcgctgttgagacctgatattgtcagggcctgacagaaatgaacaagaatagccgcgcacatggttgagacttaagaaccccttcccgttacccatttagggctgtacaaaccttgcatgggatcccggacaaagaacactggccaagaaagcccgacgagatcgtagtttccgtctataatccggcgagaatcagaaaccgtcagtgatgaagagaacgataggtaaatgatgttgacaaagatcgttcgatttgccttcagtgtaaaattttgtagcaaaccctcgaggattacgagcgctatctggatactctctctacaggtgaggcgggcgcacaagaggaagatcgagaagatagaaaagagaaataaggaaaacgatgtgagcagtgccggatcggtaagagagaagacaagagtacaccacgtacaccgtatgtaacctataccaatgaacccagaaccagaagtcagaatttcagcgcaggaaaagaaagaatttgaaaggagaaaaaggagagaaactcccttaagaaacagagacacacggtcgagaacctggtataacaaggagttgactttcccatctggaaaagctttgctttcgtcaggtgagaaacatctttcgttgtggtgaacgttccaaaagctgaagatccagctgggtgaacgattcgttcctatgacatcccagatagaacaaggattcaagtcaattttactctttctatagcgcgctgtctttgctcgtcccagacagagagagacgaacagcaatcttcatacgatcgaaagcctgttgtttctccaacaaaaggggatctccctggtacggtattcctccaatgttgagcgcgattctttgtccgttccgttttatcgtacgtgaagacagaaaagaatcagaggagatttacttgtcggatcaatcaatcattccgagagcctaatacctccagatggcgaaacctgatgaagacaaaccctgaatgaggaataacttgtccaaagttactcgtgtagaatggagagttatccttcgcgtcctccttctcaaccattcctgccatggccgatcccataccatcgagagaagactgtgatcaacatactcgtctaaaaaaaacagaccaaaacacagaagacagagaaggattgggaaaggacaaagacagagggggttactaaccagcgattcgagaagcagtcatcgccggcccatcgttcaaacctgagaacgtctgagatcgttgagtaggcctcggatcggcgcctgggatgtttgaaaggattgatttagcaaaatccgtcatattcgttcagatccgatgagtgtatatatgtggaggaaacctggttgagagaaaattgatgaatggaggattggagttgaggagagggagagaagatggatctatacgatgggatagactgtctgtcgagagctttataagtcacaatcgatgagtagccttgtgtcctctgtttgagatcgcgtacatatcgagtcgatgaccttattcgatctccaggacacgcgcaatcatgggaggtatgcaagagatctcgttcgagtggctaccgagagcaggattgaacattcgacgggcgaagagggtgaagaaatgatgaccataaaggacaggcaagcaggggaagagagagaacggaagcaagggtgatgtcaggagacagtctcatcccgatgttttgtacactccttctgcatcacacgccggcaagaatagatctcgaggcctggcggcgatcgaacattgaaagaaaagacagggatgtgccgactcatgcgttttcgacaataagagaaaactcttgcagtttcacacctcaggacggcccgcggagattaggacattttgaagggaaaacatcatgttaaaagtaggaaaccccaaaaaaacaaaacgaataggatgataaatacgaatggcaatggtagaagggacaaatagatgcgggtgttagatgtacaagttatttattacaacaaatgatgagtatagatgagaaagccctgatcgggaagagaagagaacgcctttttgtttgtcttgatctagataacgtacgtgaactcatcgttctggaaatcggtgatgtccaacgcagcgttgctgccgaccttggtagcctgggcagtctcctcttcagtctgggcgtcgacgatgggcgctccgtacttgatgtccatcgatcggtcgtgaatctttgccggctttccattcttaattcgagtcttctcctttcgcttgttcattcccatgaatacgaaggcgaggagtccggtgacaacggcctgggcggcaaagatacccataacagagccaagacccttgtggtaggctggtgcttggttggcagtgaacaagagaggaccgacgatgtttccggcggaggcacccatgttgtagtaagccaacatgaccgatcgcttagtctgaccaccggtgttggcagtaacccaggagacgaggatcgggttgatggcaaagagggcggggaagaggtagtatccaaacaacagagggccggtactgttcggtttggaacgtgggatagcgtataacaaagtgctaccgacaatacagacgacggtcaaggaagcgatcataatggacttgatcttgaacttggtggcaaccaaacaggcgaaggcgatgaagataagctggagaacaccgaaggggatgttgagcaggatggtcggtctagccttgaagccaaagccgttgatgatgagcgggccgaatacgttagaaacactggcgcccaagttgttgaacaaggcgagggaaacgtagagccaggtgacgggcgaccaggaggcctcgatagcgtgtttccagttgaagtgggtagactctgaaccggcctggttatccttgactcgctgaacagcccagactcgctcttcttcggtgaggaatcttgcagaagcaggagaattatcaagcctccagtagaggataggaccagtgatgacggtgatgactccagtaataaggaaaagaatctggtagacgtagagacttccaccgtgagcgaacgaaacggcccaggtgaggaaggaaccgatgatagaagctcctccgttcattccgtaccaagctatattgaatcaaggaatagtgttggtaatgattgggaggcgcagaaaagaattcatatgaagaacgtaccagcaactcggataggctgttcacttcgtcggtaccaagtagaggtgatcatggcaaagagcggcaagcaactggcctcaaagagacctgtaaagaaaaaagaccgagagtgattgtcagacaaaagtgcagccgaaagaatcgcgaagttttaaatgactcaccaaggaggaatcggcaggcaagcaaagctcggtagttggttgatgcagccaaaccacacctggaaagagggagaaacatcagttttagatacagtcaatcgagctgatttatacgagacgagttcgtacattgcaattccccaggcagtaacgatgaagggcatgagatatcggacaggaacccggacgatgacaaaggcggaaaagggttgccaaccaagttgggcctgtgtgacaacagcgacaatttggtgatcagttggcgttgtgacatggaagaatgtgagctgtgaggaagatgattgaggatgaacgaacccagtaaccagctgaaccgatgacactatactggtttcccaccaacttagcctcagtcttcattccaaagacggctatggaaggtaaagggaaaaaaacagttcattagcgtcgtcaccaagaggaaagtgagcgtccgataaacgcacctccatatccgatcacagacttgtcgagaatctgcagaaagtagacccagataaggagagggaggataacctgtttatttggtagagggtaaagcgactgcgcgtcagccacaaaccgctctcatggatggctttctgggagaaccgagacaacgaccagccgacgacatgattgggagaacgactgaccttatcaatctttcgtctaaccagacttgactgaatgattcatcagaaacagagagtggatgtcggtagttagtatcggagagggatctatggagcgcctggacagacggatgagcctacctgttcgttcgtcatagggatcgatccggcagagaatccggggacgtgtctatagaagagaagagaaaatgttagatataatgacgatgaagagaagtcaagtcgacaagagaggaatacgtactcgaggtggctctgggttccactcaactcgaccttctcaatcgagctggtcttttgaagcgaatcgctcatcgtgaaaaagagaaagctgcgtcgactgtgtgggtggggatggttggatgtggatgctaggtgctaggtgtgttggtgtggttgtgtagaacgagagctgaaaggtggattgatagtagggtgagagaaaaaaaaaacagaatgagagaacgaactgagcggccttatatgttgatcggaagagagaactctgtatgggatggattaatagacagattcattcaacgcacgacgagaacatcggaaaaaaagaaacacacgcccgctctatcgctctgagaacgcgcgaaggtctctcagctcgcatgcaatgaggcaagatctagccaaacaacaccggtcggctatcgatggttagtgtttctctctctcttcaatcagccaagacgcgtgtggaaataagcagtggagaagaactaattcggcgtgttaggagacgacgatgagaatgcatgtctccggacgtttgttagcatggccattggatggcggacgagatctcacaccagttgaagcatccgacggtatcatcaaagtctctcccaccagtcttcgcctcgatccccgggtcaattggagaaggtcggaccgagttcaggagaaaaatccaacgttaaccgagaaaaacggtgtaaagtggattgtaacccaagaaaattcgttcggctcaccggatcgattcgccgaagatcctaagttctggacttttgttctctctccgcgtgcctatgtgctttctatatgtgcctgatggtatgtatctgtccctctctctatcgggcatagcaggatcatgtgtgagcgattttaatcgccatggttctttcgatcattgaaacatgaatcaagactgatagcatacacaaagcgaaacttggcagcacaggccagaagacagcacactggttgcgtctgtcctcggccggtatccagggagtaagccggtattccggcccatgtatccggatgtgagtctgtcgagtctacatccgttttataccgtaccataccgatggtccgtcgtccgtcgtctcctctaaggtacaaggcctgcatcaattcgcgtctttacacggtgatcggcaagctgaactggggatcagctagggcgaaaaatacaatgaacgagacaaacgcaggtaggctatgacgacacctagacagataaaccccgagaaatcttgaactggggatcagaactctgttattcttctttatctgtccttctctgcctttaccattgaagtttgctactcttcttcctcgtctctgaatgctcttctgtgtacggtacatgattaagctttgtctgtctgcaggagaggtcgaggaagcaaacttgagatggtctatcgataaccgagaaggacatgaacaacaaacactcactccccttcccactatacatcacccacaactgaatgacacaaaaaagataaagattcagaggtatagacattgatattgataagaattcgttcatgaactgcgtatcatgtcaaccgagtggagaccgaggtcttgatcgaaaggcctttccacgttcggaaatagtcggaccctagcttagatgttcacagctgacataacacaacatgatatatatatatatggtgttggcccatctttcttaagtctgtctgaatgattgcttgcgggctgaatgctgtgtagattcgaatcatatcgacttaaagaaagaatcatcggcattgtgtatagtaaagtaaacaagatagggacagagaacaggaccttgaagctagcagcagccttcaatctcgcggcacctcttactggttcttcttgtcggcagttacagtctgaattcccttcacgttatccatcctcggcggcacgctcacactcgtcaatgccatgatcccgaaacccagaatagggatcaatattccgaacgacacacccagcatcgtcaggatcgaagtcgatgtgatatcatatcgggctaacaacgctgtcttttctccggttgagtggttaccgtttcctttgaagggcgcaacaagattcgagtaatcctcagacgggacctcgagggtagattcctgtcgacgttcagcctggacagcagccatctctccaacagcaggatgaccggtcagcacgaccaagtgcgagtctggatacgcctccaagaaagacttgaccattggagccagcagagcatctaagacagtgagtgacggcgatagtgatgatgtcaaacgaaatggcttatcagtatcccatccaggcacatccattctccataaaaggatgaaccctgaaacataccctcccaggcgagcatagtctcccgactttcaccctcgatctcctcccgcttggccatcacttgaaccaatctcatcgatctatccatctcgagtggcttcaagtcggtgatagattctccggccttcaacgtgtctactcgggctccacacgatctcgagagcgactgaatcgaagcttctaagcggtcaactgatccagaagctacgtaagggatcgagagcgaggatgtctttaggaacggagagagaagaggagtcgatcgcaagtctgatgcatggagctgatgtcgcggaagagagaagagaaagagttgagacagagtggattcttagcattgacaactatcaataaggagaacccaagagaaagtgatttggaagaagcctacagattcttgactgatgacgagtactcccttcaatccacagagttcatcgccagagaggagttcatcaaacacggaagatgccgaaacgataggacctttagcttcgactgcttgttcgagagattgaagtcccgatagactgcaccagaaaacagcccgtccagagtggaaaacacgtgtcaggtggttgattcagtatgtttagaatgaacgatatgaagagtagaagagctgaataaagtggaaagaagaaaagagaaagaaaagggatcttacgttgaatcactcgaccaagcgaccaatggtgacgtcccaacaaacgccaacacagctggtgagagagtcagagtagaaataagagaaagagcaagaataggagatcgcatctttcgatagaacggtgttctttgaagcaaagtagacaaacgaaagtcaaggatggaagcaaagatgtagtatgtatggcgagggcaaatcgatgtaaccccacaaaagcagtcgatagcaatggtcacgcagtgttcgtaaccctaattcgccaccgtatcatggtttcaatcctaatttgatgtctgtcgctcgttagaatctatcgtttatcgacagatttttgcccttcagatgattagatataactgaggtcgaagaagagatgactagatttccaatggaaattgctgctctttctcatttcttttaccaaagagatagagaaaaaataatatataagatacacatacataacgaagttcgtacctagaaggagagtctaagcgaatacacaactacacatatataactggcttgctcgtttcgacaagctccagaatagaatagacgtcagaacgacaggccgaaaagaccgacccaagacagaagaggaagaggaagaggaagaggaagaggaagaaggagacaaaaatgaagaagagggtggttgaaggaaagaggaaaagaagcaggcatgtagaggaacgaatagaatccgaaggctcgatcttttcgattcaccgaagacagaaatcgagaaggcagggagagaaaactcggaaggaagcaaagacagcaaatacagggttcaaattcttgtaagaacgaaaaggcatcgaagaaagggaatatatggatacttttaatgaagagaccgaaagagtggacggcatatgatgattgctcgttaataaataaataaatagaaaacgaatataaagaacgaacgaagaatgaataaataattataagagaatcattttgggtgatatgtcttgggttttcctttggacaaaacaggtaaccatgcagagaagagaggacgtgttggacaaggaaatgaagcctgtagttcagcttgacttccaccttaactttccacgtgagcaagcttgtttttaactagagatatcatacaacaatctttattgtcagctctcgagctatgcttgccatgtactatacgtcagacttacagtctctgttcttcttcatgctaatttctaatcgggcccgtagatctttgatgatgtcgtctcgttctgctagtcgactctcgagcgtggtaatgtattcttttcttcgctctctaaatcgacgggcaccaattttatttctgtggtgccgacagaaggcatcgaaggatgaaaagttagaacaatagaaagaagccaaagaagaggattgcctgaatgactaaagcttacctgagctgttttcgggcctttgcgttgagcttttcatactcctccttaccaacgccccagtaatcatcctttccactcaagtcaggcgtggtggctctgcccccattctgttgacccatgcaaccaaaacccatgtcgatgtcgccgagatcgttgaaccgactaggtctgtctggaccatatgaatcaaagtcgctcggtaggacaggcagaaagtcgtcctcatcttcggagagttctcggatcgatcgagtgtcggacgagtttgaaggaaccactgaggaggatgacagtttggatatgctgtctatcctctcctgtcgaggggacatggtgtttgatggcttagaagctcgagaaagcagattagtgggttctctggccgcgttggcaagcgaggactttcttgaactgggccgagatgaagaacaggaacttttgagagcgtgtcgtgtactgtcgtccggcgggagctcggtagcgaaggaggaaacggctgaagggttgggtgcgttatgtgacgcggtgaacggcatggggtccgaattgtttctgtttgcggcatattcgttaggccgaggttgagttctcagtggcagacgagagagatataacccaaacatgttctttgttcgctgctgttcctgctgctgggctggctgatacgatgggtgggccggcttgttggaaggaacagagagcgaggaccaaggtctttccaaggtattggttcccggacgatgggcgctctgaaagggtgagcttgcatattgatcgacttttgagccaggcgcgggagggacgacccaatcacatggttctggcttgaacgctcgtatcgattgggcatgatccgggtatgaggagagtgaagaatgagtggagtcttgatagaaggttggaaagtagctagcggtctctggttggggtaaaggcgtgctgtgtggcgatcgagagacaagagatcctgaggatggatcactgtccgggccgctcgagtttgttgagcaatcggtgttgtgagctgtgcttggcagacgggatggaggaatgccagcgtacgagccatattcattctttcgagatataaagaggagaagcaacgaaaagggtgcgggttgatcagacagataatcatccgtttgagaggagataggttttacgtacattgatcaggttgtgcaaagcttcggtcgtgggtgtaagcacagggcctgttccagagaactgaagatagcgagagagagctaaggtcaaagaagaatgaaagggttggtttcagactggataagaaaattgatgaatttgcagttcgcatgagagtgaataagagcgacttacaccatgtggatctattaactttccccagacgtccagggtggctccaggaaacgggtaagcgtcgactgtgcccagtcatggtcatcaagacagatatatggaatgtcagcaaatgcgcttgcgtgtatagagagagtggaccatgaagatatctagacttacaatctcgagaactgattgtgaatcaaaagatataataaaaatgtggaccgccaacaattcgagataagtgttttggtcaagtcttgaacaccaatacaacagtaagacgtacggtgttccccaaaacatgtctgtcgttgtggcggttgcgtttggcgcttctaacaggatccgctagttttccgggtggtgcctttttaaagggaatttggatcaagtaactgagaccgcagcgaatgtattatctgcacaggcaagcgaaggtgcctaagaaaaagattgctaaggccgaggtgacagagaagagagacgaaagcagaggtggaagcgagcaggtaagaaggaagagcacgacctgagtgaaacaatcttcggagagagagtgtgcgtgtgtatctgagtaggtagatggataagtggatatgagtatgtgagtgagtatgtgtaggtgagtgtacgccaaggcttgaatggagaaagatgtacggatgtttggacgtgtgcgagaagaatccaagtagaacagagaaggatgtgagcaattccaagaggaaagaggtaaaagtaaagaggtaaaagtaaagaggagaagggaaacgctggaaaaagaagaaggggagtgtttattaagaacaggaacagcaataggagtagggacaggaacaggaacaggaacaggagttagcgatcggcaaagaggagactgatgatcagcaagccgagatctatcaggatcaagacggccgtcgagtgatgatctctcatccccctccataccgggctgagggaggagaggcagattacacataagattggaaaatcaattaaacccaagactgtatacggggatggccatcagaagcggccgggcggacagtcccgggacggctcgatcggctcgcgcctggctgctggctgccgtcgtctgtcatcgagaatggcggaaaaagaaggaaagtggaggtcttgccgatgaagggtcggccggtgaagatcgcacaaacgccggtttgaaaagcgcagcaaattgccctcctcgcgagatgccacccggaaggtgagttccgtccaggatcccgatatcctggaggaaacttaggatgagtaaaagaacgacacaaatcgacagaaaagaatatgtacgaatgttttgtcatcctgtagatttcgggtgtgggtgagtgtgattgtgtttatgtgttcttcctcagtcgttactatgagaaagttatgtggtctatctgtctgttggctcgatctgtctactccttccgtcgatgttctcattctgttcgtcttgatcaatcgtccgtctaagcatcgaacttgcttggggacaagtaatcaccagttagacgacagtcatccagaatgaataacgtgggttttttatgtatcgtgtctgaagagttttaatatgttgttcttatcactttcttgtttgttcaacaagtaaacaatgcctatcatctgtcgagcattggactttttaaagatatcctagtccatccctcgtctctcgatggggcatacatatatatatttatcttttctgagccatttttgattccgacgagaccatatgcgtgtggtgtcgtcaacgggctcacgtatggagttagcttttagccctcgcttgttttctcggtacaactaatacgtcgtcgcctgattgctctatccgattttctagttctagttcatacttgtgagacatcttggcacaagaaaatcgaacagataattcagagtcttgttcattcggtctacattctcttacgaggaggagacgaagaaacggtacatgacaaagtcttgaaacgtaaaagaccggtctaattgtgtcgatatgaccgccgaggtggatgattctgttttgtcagcatcgttccggctttctccacttcagtcgagtcagcaactcggccaattttttttttcaattgctcgatggtattggaaagcgtaaatagatatcacacacggtccgtctcgtttgtaaacaagaaaaggaatcttcatgaatttatagtccactaatccgtttccttggtcttcgcttccctctcctccctctaagcggcttttggtttccttttgcccttgccgacagctccaccactctctgaaatgatcccgaaatttcccttggcgaactcatccttcatccaaatctcgcattcctcaaccgaactcgtcggatgatcaaatccccaagacacaaccttgtccaatatcgtttttatcatcggtccacccggcaggccaagagaagactggatggcgttcccgtccatcatcggcttggactcgattgccgcgggaagttccaatcggacaacgtcatccgtgaatctgttgaacctttcgaccacttctttagcttcctctggaggtcatatgtgtattgggtaaataagtgagtccgtttgtgttttcagagagggtcgcaacaaccagagtagaagccttttagcatctagttcgttgatgtgagacattttcacacacacatgtatcagaaagataggatcatgacactcacgtcggaaggcgtttgtctctatttggtatagcggtacgagctccatcagcatactccagaacacagagacatcccatgtggtgctcttagacgggtcatgcacataaggcatccgaaggacgttccctttattttgattttaaaaaggataattttcatgttgagtgaaagaacaaaaaaacagggttgtatccacagactgaccgatagtcgacctgcgtctcgggtcagaagcgtcccctgtagagatagcatggattggacgctcggactgatataacttagatacaaactgtgcttctgctccacttagctgtttgtatatatcaagattgtcagatttcgaaaagccaccttcagtttgagattcccttgttaaaacatccctacgcaccttgatagcctccttgatcaacatctctggcgcgctttgctcagtcttcttcaccttgactcgaacatttttccaaggcgctgcgcaagctgccaaaaacaacttttttctgatgtcatcctggttgatatgagcaaacagagccttggccgggactggaagctcctctccagattctaaccgggccggttggggcaaaggtgatgacgacagaaagtgagagaggacatagccggcaaccaatgcggtcgaccgaggtccgggcgaagcagtctgggttgaggcgagaacaggtgggagtacaaagattgagtcgtacagatcaagagaatcgatcagactaaatgcgtagagcgcattcttgtctgcagtatcacaattcaggattctcatcagctcggtcgaagcatttttccagagttatggaacacaataaaagaggtagaagaaacgcgagattgaaacgaacgtccaaacatcttctcaatctctatcccgacacgttctctactgatccgttctctgagtcctttcttgagcgcatcatccttgcatgcctctcgaatgtcatccgtgagctcaaagttataccgactggcaaacctcacgcatctgatcaacctcaacggatcgtcctcaaaggtcttgtgcgcctcgattggagttcggatcaaaccatgctcaagatcggtcaaaccctataagagatgagtgttaaaaaagaggaagagaaaggaagaaaacgctccgtctgggtcaaacacgctcgctcagatgtaaaggctctgcatagacgaaccatctgcgtgtgatcttcgacagctcgagtgtgcacgttgtaaaacagagagttgatggtgatgtctcggcggagcgcatcatctagaggtgtcccaaatttctgacggcgtcgttcgccaacaaaagcgcgaacatcttatgagcgttcatgaagagagggccatcaggttcaagaagagtgctggcctgcctgcctacctaccatttcactagggatcctgctgccatccgtgtattcttcgtttctcaaattcacgaagtccagatcgagacccatgataacctgcttggcagtctcgagatgtttgctctgttccggattagactcgatctttgcgacggacgtccggggaatctctggatgatgattcgagagaaatgaagaaaaggcaatagcgaatgggtgaccggtatggttggagagtgcgagatcgatgtcatcacatggtagagagaggagctgagtgaattaaccagatatacacatcaatcactgccaacgaaccgtcagatacctttcataagtgggttgaaagaaacgaaccttgtcccggacccagcctcctgcaattctgcattctacttgaggacctgacggttctgtctttgcgataaactctctaaactcttccaacagaccacacagcttgtcttccgccggtgtgagctcaatctttctgttttgattgatcatctttcggttcgctttatcaaaaggtagaatgaacgtggagggcacggaggaggtgaacgtcttgatatgcggtctgatgatgtacggtgatggcctggttctgatataagggagtgtgttggctggcagtctcatccaaccgaaatgtgtcgagctggaaccagacagaagaaggtaaacaagagacgaagagtcaagctctgttgtagagaaggaagagtctctgagtgacgattgatgatgctgatgatgataggatttgaagaatttatggacagaaatccacaagaaaagactataaatctttgtagttcattctcctagtccatacaacgattttctatagcctccatcaggattctcaccttcactcggaactcctcgagaaaaccacaagcagacgacaattcccagatgtctttcttgaggacagggaatctaaacaaaatcatcaatcttgatcagttccctgttttcaccctcgctataggaatcactcttttggctgggttgcacatcatgttctcaattttgaaaccaaagtggaatgcaaagggcaaggtcagcctactcctcttattcctcatctccgttctatcaccagctcctcgctcacagcttattgtctcctgacatgcaaatacgttctctgatatgccatgttcatttgttgtgatgaaatgtagcattgtatcgtgaccggcaagtctcatcttgataacaacccgctgttgcattaacactcagatttcctgatctaatctctgtaacgttcccaacaggtggttcctctgggctgggattcgagctagcggctcttctcttgcaaaggggggcggatgtcaccataattgccagaaaccagcaacgcctagatgaagcgattgagaagctcaaggttggatcacctcctcagattgtgtcttccaggggttgtatcaacagataatacataggaaagagctgaaagaatgattgttttgactgtttgaatcaaccctagcctgtctcgtcatcctctcaatcacatctccacgccatctcgggcgacttgtcttcttctactggtgcccgggaagctttggagcaagccataaaatatcatccagaaaataaggcagatgccgtattcatgtgcgccggtgtatgtcgcttttctgtctggcgtttcacagccgtgtccaaaccaaactgaactcttgtgattcatccctcgcataggcttcctacccaggcttcttcctctctcaaccggattctgactttacttcaacgatcgaccagtcttactataccgcgctctggacatccagagctgctgctcaactaatcgcccgtcagatcctgtcaccctccacttccaaagctggaccgccttcatcaccacccaagcttgtctttgtagcttctaccctgtccttcttgtcctttgctggctattcatcctattcacccgcaaaatatgcgcttcgtggtctctcggacgcgcttcgaaatgagcttcagctcgtcggaattgacgttcactgcttcttccccgctgggatcattactcccggatttgagaaagaaaacaccacaaagccgcaactctgcaggattatagaaggaagcgacgagccgctcatgccagccaaggttgcttctcatctctataaaggtttgtctctcggctgtagctgctcttgtctctcacttattattgtcctcgctgtttgtagcctggaagtttctttgggttatgtacatccactttcttcatcgcagaatagagctgactgacatattgttcattcgggaacgatgaattggatttaggtctcgaaaagggacagtttcatatatcgtacgatatcgcgactgagattttccgatcatctgccggtggattagctccatctaatggagttgtccttgataccttgctatcgttcatcggtcgtgtacgttccttcttctttctttcgatcgtttgaagcaaagccgatctgactcttggtatgtgtttgtgtatatgcgtttgttatcgtggtaagatcggaatcccaatctggagaatatgggctgacaaacaggtcagagattatcgggcagagtatcttcaaaagctacaagccgatggattcttcaactagacatgctcggaccgtttattcgttcggtttcttcatattcatctgatcgaattattcttttttctcttcgtgttcaatctctaactctgaaatgcttcatggaaccagataccacttttgcttatgacagttcaggcgaatgaatgagatgactatctgactgtctcaaacgatttgagatcaatgaaaatctcctatgttgaccatccaaaatactgttacaacagatgttacatcgcaaacgaagcagcccgcggagagcgatggttaaaggcagagaagagaatcaggaagaagataagagtgaagagaaggattaaaaaaagaaaaaggttctattcccttcgccgagctttttccaccccaagacctcttatgtccgcgtaaggtttatatagctcgtcgttgtggattcgtactctgccgcaaagatccttcgttgctctctaatcatccacctacgatttgttcaggcaggtttgaaggccaagtttaaaaaagacagagagatgatgagctatatccttcctctctttgagcgaagagacggtagaccacaagaagatgactaacttcataaaatcttgaatttgatctcggagaatgttgacggactcggcatccatgttgctccccgcgagataacttggcaaatttacttcaacaatattcgacacgataaaagagaagtgagacaacgaacgaaaaaaaaactcataaagtggatgctagacgcatagaaagagattagaaaagtgagaccgaccgaaaagtctcagcaaatgctccgcgccataaatcttactcggctcgaactcttcgccagtagtgacctgacctttggaaatcgcataatggtctcttcgctgggatagatattgctgtctttcgaaccggtacagcaggtttgctccaagtgacttgtcaaaatatagctgaaggccagacaagacttcagtcagaattgctattgatcgactgattggacatcggttcccattcaagagtcgtatgaaagccgtttcatgttgaggtgctagcaaatgtcagtacactttgaaacacaagcaggtcaacaagaaggaaagacgaacggaatatcaaccttcctggaggctgtggcggcttcgagtgcagcaagcgcgtaattcctgtattcttggatcagctcggctacattgggcgtttttggcaacggaacaatctggcgagaagcacactcagacaaattcagtactctctttcattcttgcaaaagatagaaagaaggaacgattcgagatagggagaggatgcttggaacggacctgattgttcttcgtgacattttcccaatcatccaccagctgaaccttcagcggttcaggtatcggaattttgatgtccagtcgtttcgcaggttctccctcctaaaagatacagtctcgaatgaatcaacagagaagaaagactgtgattgggaaacaaagacagagaagactgaccacgtctccatctctggctctttttcgtcctactccagcagctccctctgacttccttcctcccttctgaggccctgttgttgagcctcctaaactcgctctgcctgtgggtgctgctgtaacgactggtggtggaggagctgccgtcgctttagctttgtcgattaattctttctgcttagcgagcccagcttggtcaaacttaatgagcctcgaagaaggcacattctcgtcccaactattgaaggatacgtgatgagcaagtgaaagatccatttgaggaggccaaggtcgaaaacatgcaagttagttgaactataaaatctcggatagaggtaaaaccttgaatgaagacgaacctctgtttccaacccttgtaatgcacgagatacagagggccgtgatcatctgcttgcttagccgaaggcttagtcttctcggtcaccttgaggatctgatagatcaagtattcgaatatgagtgcgatgttgggttttagatagatcacaaagagaaggacaaagatagacgcgcgagagaagataaagttgcggtgagctcttgactgaaagaggcgaaagtaaagaaggaacatactttagcctcatagagaagaggaccatgaaagcagaggacttgttctccctgtgagaacgtggtcgacatgaagccaaagaggaagaatagaagataactggtttgatgggtcgctcaaacgagggaagtatatggttgtttgaggtcgacaaaggaattggacgcgttcaaagtcttctcaatctacaccttggcctttgccgcttgtccatcatcaaccgtcaccatcatcatcgtcgccgaacgcttctgtactctaatcttgcctgcttatctttctgttcgctgatatctgtactacgagttgacaccaatgcctccaaaggtgcttgctccgttggcgccggcaaacctgcggtctgggctgaacaattactccaagcaaccagagacttcatccacatccccctcgactaacaagtctactattccggccaatactacgacctcaattacgaccacggcagctgcatttcaacctgtcaaaaattctatcgttgtttctgctagacaggtaagatgatcgtgcatttatgtaatgaggtcattgctcgtgactgacatctatcttcatgtcttcagaggggaaatcccatcatcccacatatccggaacgtccagtgggagtacggggatgtcgtcccagattatgttgtcggtctccagactggtctactatacctctcgttagcttttctattttgattttaacccttcgctttctgacttagtagatctgcatacaaccacagagataagctcaaattcaaaaactgttttcttctaggttgagatatcatcgacttcacccagagtatcttcaccagcgaatagaaaagttaggaaacatgtacgcgttaagaattctactgatcatgtgtgatgtagtgagtttcctctctgtaacttccgtcgtctgtccaaacgctaactaatacatcgagtggggcttgtttgctgtgtgtcaatctggcgcggtcgtaatctagaatgatcatcaggatcctatcagagagatcaccaagatttgcataatcaataacttaactgttgtgattgcctggacgtatgtctatcttcactctctcccttaagcctcgttatgactcaggcctgctcaactgaatcctcaatcatccaatctgcttcggtcaaatcttgaccagtccggaggaagcaggacagtatatcgcaacttataagctgtacgagaccaagccaccgacaatccttcaggagagaacgtccaaggattatgcctctcatctaaacaaggcgctcactgccgtcagaggtgtcaatcggacggatgtcttgacattgagcagtagctttggggtttgttcttctccttctcgtaaacctgaactgtctgacggaatgcacaagtgaatgactaacaagagacctctgtatccattcttgtcctcatcgatcatccgacatctatcatgtttgtctactactctgagaacaggctttctcaaaaatggtccatgccagtcgcgaagaaatttcgctgtgccctgggttaggagacgtgaaagttcgccgattggtcgaggcctttaccgctccactcagaggatcgtccataaacaagcgaaagggagtcgatcagccggtagatctccaaggaacacgtcagaaacgtagagagaccgatagtggcgagtctaatctgaaagataacggggaatcaaccaaggtaggacaaaatgaagttgaagaggagactgaaagggatccttcgcctgattggccgtctgaagatggacaagacccagagttggaagatgcagaatcaacacgttcaacgtcctggtccgcctcgcctccattgagtaataaaccggaggactctgcgttgacttctcgggcagaatccccagattggccggacgatgaggaggtagaaatactgaaggacgtgctagctaaagggcccttatagagctagtcgagttcaggtctcttgcctttcttgattggaaggtcttactgtagcaaatcttgtaccagtccgttcattttcttcgtatcttccttcttcttcttctccttttatcaaaagactctgattcatactaacatgtgatgatggttttggtttcacttgaagtacagccatataacgatgtatcacccagataattatcgcttggttatgagcttcaacccgtataagatgttgaaagaattgcccttagaatcagaagtgaacaagaaaaatcccataatatgtagtagataaccttcctctcttccttcttcagctgtttcatctcgcgatcgagggccttccttctgtgccaagatctgactagaagaaatcaccgttgtgcgtactttacgcctttttaaagttgttgagcttggaggtcgtgttcttaggaagctccctgtttcgtccaaagaaaatgatgaggatgatcagcaccaggttaacaggggttgcttgatcacgatggcctagaaacaaccgcttacttgacccaaggcaagaagtctcgaccctgcatatacggtcggaggacttcaggaattcgaagaccctatgtatatcaagtcaaaagaaacaagagaaaagaagtttgtcaaaactaaagagacctgctggaagtcaagcgagtggggcgtacatcgggagtctggtagttctcaaccacacagcctgtttgagaagaagcaaacgaggagaagtgagtctcaactcttggtggacatacgaagagagggaaacgtacagagagctcgctcagtagcacagagagttccgttgagcatgtggacgtagttcttcttggtctctcccttgaccttgacaccacaccgaacttctaatgatcgagactctgtagatcacgaaacaggttggcggagccaatcgttggttagtctcaccggtacgtgttgatacacaagtttgatgaaggaaggatggtgaacacacggtaatcggctaagaacaagaagaaagggatgctttaggtcagactactatagcggagattcatgaaaacacatgactgaattaacgtactgcagtttgagatagactggagctccttgtaagctccctggaatgggaaccaagcctcgacatcgtacttaatcgccgcagcgttgttcaacgcaccggagacaataccgaccactcggtacggcaagccgagagactggtagaactcttccgagttggcaaccatgtgctcaaacatctccatcgacttttcgggctcggtgatacagaactagatgataggagtcattgattggatagttgtcaggagggccaagcagaatgaattgggcggtcggaaactagaggaactgacctgctcgatcttctcaaactggtggactcggaagattccccagacatctcgaccgtgggaaccggcctcctttcggaagcaggtagagtagccagcgaacctggtagagagcaaaaggagtttcaaagatttcagtaagggaacatctaactgcgccgtgctaaactctccctttaaccgggcgctcatcagagcgcaggatagaggagtcagagaagggaccgaacgtacttgagaggaagatcggttttggggttctcgaaccactcgtccatatacatacccgacagaggctgctcggaggtggcaatgaggtacttgtcctcttctccgtccataacctaagacaagccgcagaaacagagcgttaattcaagttcaatatacatcactacattcgataatgcatatcaatggtcgaagcacaccttgtaaagctcctcatcgaactgatcgctagatatccagagataagcaaacggaccatgatatcagctttggtcctaacagacagaccaaagatcgagcaagatgtcatatattccttgacagcgattggttccacttacagctgggcagtcttggacatgacgtctcgcttcataatgtaaggagtctggacctttttgtattccttctttcgaaggaaatcaagtccgtagttgattaaagcctggttgaggtcgactccatctccagtaaggaagaaccctcggtgaccagagatcttggcacctgggaggaaacgaaacgtttaagtttgtcttggtgagtggtatggaaacgggtcaacgctcattttagattataggttcttacctcgctcgagatcgaaagcatcaattcggtggaggacctcgtggtgagcgatgatgtcggttcggtgaacgggctgagcatcagggccgtcagggtgccactgtcggatgagggagttatcatcctacattacccgagtttccaagcgagataaatgtagaaggtgatatccatagagacgcagacacgagatatcagccaagcgagttacctgatagttccccctccttagatatgtttctacatatgttcaggcaagaatcgggagtctaatatgatcaaacctacctcagtcaaactgatagggcatccctcggcaacaatgttaccaatcgttccacaaagctttcgcatggttttctcagcctcaatagcagtctgcttgagctcggcgagctctttatcctgggaggtcttctgtgcgactaaatcatcagcgggttccttgttctagaagaagagaagaaaagggggaagagtttagaaaagaaagtaggtcagtacgaaaaggattgtgaaagggaagcacacttgagcccatcgaagggcggaacgagagaaatgaacgaactctcttcttcaatgagatttccttctggagagcattgatctccttggccttctgagcggcttgaaagttgactgatagaaatgaagcaacaaatatacagcgagcaagaagaagagcagggttcagaaagggaatgaaacaagataatatcataagcacaacctagcaagtgatctgatatgactctctttcgccttctgataggagaaaagaacgaaagagagaactaacgcttagtccagttggtatatctctcgagaacatcgtccacaagctcaaccgaggctcctctctttcgctgagactctcgaacgagctccgggtcaccgcccttgtctttctggactgtttttttcatagtaagaaagtgaagccccgagaatcagccaacaagtcccgacagtaacgtcaacaagacaaccactcacgaagaatgatatcaatcatttaggaaaaagtgggaaaaggaataaagaaaccaaaggagaaaaagtgtgtggttgctgagaagaagaaagtgagaaagatgtaaagaggattccatatgagcgtcttgcctgataaagtcacgtgacgtccagattctcagccctcgaacacctcaagcgttttctacgcaaagaacttcaaaaaatggaccatgatatgatgagaatagtgaaagcctgtcgtaaagtcgtattgagaagaggataatcgaagagaagaaggagataaactcggaaagagggtgagaggataaagtatatgttatccagaagggattctgttatctgaagctcgattggaacactaatgatcaaaaacttctagaagagtgacacatcggaggaagaccagaggatgggagaagaaaatactgcgacgagtcaaagaaaaggagggtcaaaaagcgggtatggccgaaagaaaaggtgagagcgaaaacagatgatgaatgatgcggaccaaaaacaggcagtgagtggaggacgagtgaatgaaaatggattataaactaccagaagaaggtggaggaagaaaaagagaagaaagatgcgagaggtgggggagctcaaggatagtgaagcccaaaaaagagagagagagaataaaggcgcatgttaaaactacaagagggtgcaagggtatgggcaatgacgagcggtcgagtggatgctggagatgaacggggaaggaggaatgcaatccaagaatagacaaggcgtggcgtaaaagaagaagttaagaagacaccgaagaggtgaccgaggtatgtcgtagcttgaattgacgtacgatgtaaaagaacgagggagggagggctgtgtgtaagatggacgcagttgacgactataaaatgaatatttagacaaaggaaatgacgaggtagcgacatcaagctcgaccggaaagaggatcaagtaaggtcgcttccagctcgatctgttgtgaatcaaggtctgccatacacacttcccagtcctcttgtgttctatttgtagcagaaaagagtgaagatgcgaacgagaatacttgttattgaacaagatcccaaaagaaaagagaagaaaagaagtatgtaagagggactaacttcaacagaacaaggtcttcatccaagtctcggtacttcatctgaagtcgtttgctgttatattcaggccgcccccgagcgactggaatcaaatttgtcacataaggcaaggaaagaagtcaacaaaccatgtacccaacaacaagagcaacagagaagagcagtgaggtgatttttttcgactaactctttttgaacactctcgtttttaagctctctatctcactatctacgggtacgttaatcatgagcacatcatcctcgaaatgaatccgcatcatcgttgtcggaccagtaagattcttcaaagatgtcatctgagtgtttgaatcctcgctacccatcctcaccggaatgtttcgcctgggcccgctgcttccaaaaggtgtcgccggggacgattgactttcgtctgagatcgaagtcgacgtactctctccgctcgctcgcttgtcgacttctcttcctgagttggccagagatgacttggacgagttcgtcggtcctatgactaattgttcaaccagcgcctcggtagatgagattgaggactcttggggtgtcattgtggtcgggggcgacgacgacggcatagggggatgagccaagtccttctgttgttgacgttgctgttgctgctgggcctgatacgccatggggctcgaagctgatcgatttcgataaggaaccaccggcctggacgggttcggcgccatcgactgaggatggtttcgatgttcgactaaacctgccgagttgggctgacgagaaagggcctgtacgccgtttcgaacaacagttggtccattgttgaaagttgatggtgggccggcgggtagatcttcggcatgatgacgacgggtgttggacaaagacatctgagtccgagagcttttggacagaccaccgcctgttccaccagtaggaattacattattccatgaaggatccggttgaatcgatgatgtgctcgaaggcatcgaaacgtttctaggaaaagaaggcattgcagggacgggctgttggtgcatttgcatttgtgattgcaactgctgctggagttgcatctgttgctgttccgtcctccagtcatggaccaagttacctcggaactcttctgttcgcgctcggcctcggcccgatagtgtctgtgtaacatcggatgaattgtccctagaggatgtggtcggccgacgagagcttccaatctgggattgagcttccgaccctctgcgcggtctgggcacgccggaaatgacggactccccatctgtttcccaacctccagcggagtgatcagtctcgtcatgatcgttgtggaccgaacggggggagaatgcatcggttgtgaaggatggagtggaccgatgatgcggctggaaggatgacccagcagattgctgactgtggtgggaatgatgattagcccggttggcggcggcctgcctaatcaaccggcgttcctgttgaatcagtcgtttgacctgactatcccacttccgaagcgattcgtcgttcttcatgtgaagtacaaacgaagcactcgtgtccggagcttcttgactacgccaatatacttggagacctagtccaccatccttcctggtgacaatctctgtgtgtgtcaagttgttacagtagattcgacctttaacgaaatactgcgaacgctcagcattcttgttaaatccattcgagccggtcttggatctcaacagtttctgaccctgtgaagatgaagtagagattgagtggaataaatatgagtacttgaagtccagggtacgaagagcaaatggatgaacaaacctttttgagcactttgtctcctccctatagatgatcacacatataaagaggaacatctgagggatcagtatcgatcgaacgaaccaaacactatcaaaagaagactcacatccttgcaacacagcaacatcttctcaaacaaaaacacatgatagtctctatcggatccgccttttgtagcgatgagatgttcgtcaatgacaagatctccaaacaagagcggatcgtgatctttccaatccgaaactcgtttcataagttcaatttttgtctcctcgttttctttggctcttcgggtttcgttcactttctcggtaatccgcttgacagcctcgacaccaagtagaagggactgatggtgaatattgtccgagggcgaagacgctttcaccaaggactgatcaagacaaagagagagcgcatgtgtagttttcaaaaagaagaataaggagaggaagtgagatcatgaaacatgtcagctgtccaagtctcaagagatgtggatcaattatgtacaaagagagaatgaaaaggaagaaggccaacgcaccgaaagcaacaaagggtacttcgtgatacgctggatcggtttaatcaagaacgcttgaacttccctcgttggttcgagaataagatccgaccgagacgacagctgtggcatgtgcgtctggaccatctcgagggcctccgtgtaatttgcgcagaacgggccgtaacattcgaattcgcgttcctattttgcaacgaagagagagtggttcagaggaaatacctccagtgaggtgatcagtatgagtcaaggtttaaatgttctgacgcgcgtatgaaaaacaatgagaatgagaattggattgggaaagcacgaacatgtttgatgaaaggtttaccccagtcgcccatgcgccagtttgaaccgtctgccttttcggcctctgtttcgagagaaatctgaaactttcgctgaaagtcgagcaagacgtgcaggttagagaatatatggtgtgccgtgtcgagcgagatcatatcgtttgccaggagagattcggaatattgctatttcgtcgatttcgtagtgcgttttgttagctggggtaccatgatggaaagaggagcataaatagagcaaaagaaaaaagacagaacgaacgtgcaagacttccagctcttggacgtattttctctctgtctcgaccagttctttgaccaagttttcagcttcgcctatgctcaacggactgcttcccaactgactggccgatcccatccctcccatcagggctgctcctcccggggtgatcgctccaggaatggcatggatgccagtgaagaatccattagaggcactcccaggcgtattgggatacagcggtttgggtcccagagagtcaaacgcgttgtagcctgtggaagcacctggagtcgggatgggggtctgactggacgactggtagccgaacggattggatgacccgacgtcgtttacaggggaaaacgattcgtcggtgggcgattgagtagcgggtagtttgtcgagcaacagtgtggcggtgtgaaggatctttgtttttgaaaggataagagatgtcagcaagttatgtgaaggatatgacgatctggagagaagagagaaagatatgcaaaacaggaggagaacgactaactttgacgaatgaatttgtatttggtttgtacagatcggtgatactccataattcatcgtttggccaacctccgacatccttaagctgcatcaagaacgagagggtcttgtaaagaggcttctggcaaagtaatttcttctttgggtcgcctaaacgagagaagaaaatgatacacaagatgatcaagatgggaaataaggaagacgaaggtcagtcgaataaatcggccaagtagagaaccacataaactcacccatttggacaaccatccaattcaatgctttttcaccagcggccatgtcccacttgatatcttcgccctcgatgtttacccaatgtgagctaccgtcagccctcatctttttcagactatctgcccaaacgccggtctggccgactctgttgactagaaagacaaaggaagagcctgtccggagagaccaccagacatgttcgactacagttgggttgatctcgccttctgaaaacccaaggtcgggcgagggattgtagtcaaggtagggactgaagcctctgagggtgagcaagcgatgtttgatgtgcctggcgatttgaaagatagaagtgttgccgttctgaatgttggccgagagctgtgccgtcttgagggccagagtgtttggttggttcggaggcagagaaatctggatatggccggggtgagaggatgaggagccagtgggagagagggcggttggttgtatggaaagctgagccgagcttcggctggcgatgctctgcccgtaaggggatgatttcggatcctcgattgtggtagatgacgaggatgcggtcgaaccaggtgtccagggatgatatatgaggttggacgaggacgaggccattggtaagacagagagagaaagggtgtaggaacagaaaagggtggtaccgaaggaaacgggggaaaggctggagaatgaacaagggaaggaactaagggctgatgaggagagagtataaggaagctgatctaatggaaggatgtcgagaaatgctgtttgtccaggtaaaaaaattcacgagacatgcagtcgggactgggaggtgttcagagacagggatagaatgagcgagggacaccgaggcaagagagacgagaggggcgatggatggggttgctgaaggtcgtgtgaaaagaggaggcgcgcgtgtgtttgggacgttcgcacctgtagaacggacgtgtcgttcttctttcctttctgttcttttctttttctctacgatcaaatggcctggacgaagaagaaaggtctgagccagaagtatgaccgatcgatatgatgaccgggtgagatatctggagaaacaactcgatgtgaggatagactcggcaaagacaagaacgaaacgcaacgaggctggatgatgggtgtgtgaagaaacaaaagcggctgatgagaacaccgggaaagatgattagagaacgaagacgagacgaccgacgtcgttccttgatcacaaattctggtcaagaagggcagacttccagcgtcgagcacttgcaacaccaaccgaggagcggacgagacgagtgagagagggtcaaaagaatgggcgagcgagaaggtgaaggtggcagaggaggagtgaatacgatacaaacaggaacacaagaacaagggcgccagatcaattacgtaagctagaataaccatgagccctgtgccctgtgccctgagccctgaggcccgtgcgctgtgcgttgaaaacgacccagacagtcacaccatcattcgatgggacgactaggagcatggtgagaaagtacgatgagacggaacatggagaaagacggcatcgtgggatgcatatacacatcgcaagagtctgtgtgtgcacttcaacatgaatcctatttacatgatcctcggtcgacagttagagatataaatagttcgagtttgtcggacaactaggggttctctctttcccatcatctccatctttgccttccaccatccgatacatcatcaataatactctccatcactatgtcgtctttccaaatccccaaaacaatgagagccgtcctggtaggcttcttcttcttcttctttttctattcctctatctgcttcccgtcctgggtcgttcttactcttgttttctacatcatactgatcctatcattgaccgtacagatccgcaagaccggaggtcctgaagccattgagactcaggatgattacccagtgcccactttggccgaggatcaagttctcatcaagattagttacgcaggcgtcaacttgtgggtatctctcaatcatgaagtgacatcctcgttttcgtctttctcttccttgatcacacacccggcccggcccagctgactcatctgatgttctgcatatgcacatatatatgacctccagcattgacacctacaaacggtctgggctataccaatcaaagtacccgctcatcctcggagaggaaggcgcagggacaatcgtcgacattcatccctcagtgaacagttcagacatcaagctcggtagacgggttgcgttcatttcgaccggatcttacgccgaatatatcgcaatctcacacaagaaattagctgtatgttgccactcgcggattgcgtcctatgtttttaatttatccgtttttccttactaatcttctgacccttaaccaatcaacagtaccttccagaccatgtatctttcaaggatgccgccggagtcctgctccagggattaaccggtcagtagatccctatcggatgctcccccggcctaatcatttgccctcctcatttctgatccctccataccctccttcaattctataaagctttgaccatgcttcaagaatcctatgctgttaaatctggcgattggatcctggtccatgccgctgctggtggagttggtctcaatttgtgccaggtctgtccaatcaatttggttttcatcaatgttcgacccgctttctcttctttttaaactcattttgatcgtcgttcttttcgtttctttcccatctcgatcttagattgcatcttatctgggagtgaatgtcatcggaacgacgtcgacattggacaaagccgagctcgctagaaagaatggcgcagagactgtggtcgtcaatggcagcgcagaagatctcaaagccgaagttgataaaaataccgacggaaaaggtgttcatggtgagtatctccaatgagttatcgagtaatcttttccatcaagctctttacgtgcgcaaacggacactgacaattctatacatttcagctgtttttgacggtgtcggaaaagcgacttgggaaggaaatttccccttgttatctcggaaaggaacgatcgtctcttgcaagtccctcactctctcttcacataaaatgttgatcccaagaacgccactaatgttatctttcttgtgtctcctctctccttccttgcttcttcctatcagtcggaaacgcatccggtccccctcctgaaatctcgcctttgattttgggtaaaggaaattggaaacttactcgtccggtgtaagcttggtccagatttgatctaggcataactagacaaacgtaaaacaatcacgaatctgatatccgacaggagttttcttttcttttcttttgctttgcggatctctctgcatacaggttgaacaatgcgatccatactcctgaagagtttgaatactacacttcagagctcttcaagttggtagaccaaaaagtcgtcaatgtacgtcccgttcaatcctatatgataacacacgcatacagctaaaccaaggaatcttctggcctcttggttgattgacagctccttgttaacggcacatatcccctctctgctgaaggacttcggcaagctcatgcggatcttacaggaaggaagaccgtcggaaaactcgttattcaggtcgccgacgaatgagtttcgtctcgtcttgtgtagtttcgttcccgcttggtgatagtaatgagatacggtttgttctagttggttgtatgtataacctgtttcgatgtacaatgtgcaaggttccccaatatgagtaagaggctctctgtaggaacctgaagaaaaaagctaagtatacaaaagagggaaactcatgacataaaacccagaaggtttgtaagcaagtaatgcaaaagataggggagagaagagatcgataagtgagatgcaagaatatcagtctttctttaagataaggagaagggcaggaacgattcgtttgaagagaaaagatgatcaataggagaagtgaagtaggttgatcgatcagtcgatcgaggagaaatgcatgacaagtttttgacgagggaatgattgattgcggaagattgtagaaacaggatggcaagatgtggtttgtgatgaaaaatacccaaaaagaagaaggaaagaccaagaagaccgagaaaagagaggtccgggagagtgaaaagaacagatcgtaaaacaagcaacaaacccctaaagaatatcagaagaaacccatagagatggcatggttgaaaggaaacaaaggcagacaaaatcaaaaacatagaagcccagaaaggtggagatagaggcaagaaagacaattggacatagtctatctcagaaagaaaagtaagtagagcttagatccgcatgtaaagcttatggtacagcacaacaagagattttgtctttgaattcatatcttctgtaaacaattgtgaactgattcaagaaaacagcatcagatagaccgtgcatcagaataccgaacaacataccccacaagacaactgggagcaataaaaagaggacagacgtacgccgtgctatcagtcactgtgtgcttgttgaccggatcgattacagacctgacgacctcgccgttcttatcgagcagagtggcttctggagttggcggtgaactatctgtccatgtcatgtctctgtattcaatttgaaagaaaaggcagcaagagaaaaaatcaagatgagtatataagagacgagattcgaaagctataaaatcgttaatcaaacgccgatgtctataaaaagacgaaccggaaggccatgggccatcgagggaaatctcgatgctttgtcttttgttcaagaagaacatatacagcatggtgtcgttgatcttttttgattcttgagaatgttcgtttgactcgaggttccgatccttccagaatctgaacaaactggccatctttgctgtaagggagagatacttttcagaaatcaagtcgatgcgacagaaaggaaagtgaaggtaactaactacatcagcagcccgctgatagcatcaattgcattgtttctccggcaaacctctatgatgtctgccatatcagctttcgacaaggctggcgatactgacgacgagcaaaacacaagctggaagatatccgactcatcaacttctcccaagggttcatgttcatctatttctccattggggtcgaatgaagaaaaatctaattccagggcgtcttcgctgtcgtttgagttgccgtcgaacgtcgagaaaaatgttacagtagaatctgtcgaggctgttgagagtgttctaactagatgtggcacatctaggctaagagaagaagagccgtccatagtcgaggaaagaggcgagagggctgatgggggatggttaggatgagataactaatcttccttcgaattgtacaaattcattgttacaagcacatcttgaaaatcccatgttatcacttctttgataaacattcattccccttccctcgttcagcaggcttccagcaaacgaacaacggacatatgttgaaagtacagcagtcactgaaagaaaatataaccaaaagaaaaccacatagaaatgaagaaaacagaattcaagacagtacaggcacatagagaacaaacacaacaagggaacataatttatattgataggatgggggacgcaacaggacattatcagaagggcataaatctaggtcaagtgtagaggaagacattgcgatagacagactagaaaaacatttagagctttataatggttgcgtggaccacgtcaatctttcatttctagagctgacctcagtaaactgaagatcccacgcgttcgattccaaccgaaagtcatttgtctgattacttcttacgtggccatacaaggatccttgaggtgaaccccctccgtttgagtagccagctgcgtaaacaaacgccggatcaatcagccgtacgctcggaggtgttatccgcaaacaacctacagatccggacgagattaaattaggcattgcaacagatatattctgagagctctcttggaaagagcacgttgtagacgggaaagtccctagagcattcgccaagctcgacacaaatcctgattggtgagaagtgatatcaccttccgatggggtttggaacggaatattcctaagctgattgaatccacaagcggccgcaaattgagaaggactcgattgataaccgtcagcgtacgcgccagacggagtggtgacgaatgagaaggtttcataatcgtagcccgctgggaccggaagatctacgtatcctaactgatcttgactcggttgcgataagtatttataagcattttgaaggatagaaccgggcgaaggcacaagtcgaccagagtacaacttgaaactatcgcgtgtcgtatccgacacagacgcacaaagggtttcgtcctcggtcagattgtgaaaaggagaaggggcagtcggagatgacctgcgtttgtaaccatgtctgcgctctcctggatagaaagacttgtacacgaatgactctagtgaggtgcactcgctcgagatcgattcatccgagtttgaagaatgagttccgaacggatatgacgagtccgtatcttctgtcgattcagattgctcatagaccgcctgattgggcaatggaaaatgatttggctcggacggcaagagaaatcccgttatcgaaggaagtggtgcgccgttagccgaaaacagcggaaagtaggacgacttggcgtggcgtgacggaggattctgagaaagaccgaatatgggatcagagagcgaaggaagaacttcgtccgacttgccgtatacgttgccaacggaagagcgcgatcgtcttgttgaacctcggcttgaggagagcgaaccagaaggcgtcgaatcagagttggtcatggatgatggagcggatgggcttggacttggcgtctcgaccgtcgagaacgagtctcgtttgtcagaattcttggcgacaaggtggggtgacgttctacaagaaccgtcgtacgctttccgagacccaccagcccgttttggtgttttcgatgtacattttgagaccccccgagtgagggtcttgcgatgggtcttgaagggaggctcttcgccgatccggacacccttctcaaactgatcagattcgttggctgggacataaacacatttccggttggcccggatacaattggcacaaatctataagacatgatctgagtatgaatacaacactggccatggtcgcaaaaaacctataaagcaatcatgaaggcttacatcagacccacagcaccttatcttccgatatcggcagtatgcgcacgcgattccgatctatgacaaaatgggaggaacttatgtcagaaagcagacatgatgagtttgacctgatgtaaggcttgacctactcgtcgacgggtggaaaccttggaaggcatgcttatggatgcagaagtacaaggtggcgccttgaaaataagttctaagtagggtggtctattgttatttaagaccgaccattgtaagaacaagtgccttccgcatgtattgtgaaggtgaaagacatactgacatgaaacttgtctcgatgttgttaggttgaatcggatatgaattgattaatgctactcaaggttcgaggtgagctatgcaaattgatacagaagtggatatatacagagggacagatacagggtggacagggaatgggttgatacaatactttgaatatacgaaggaaggccagtaagaatgatggtgggggtcaggatggattaacaacgaaaaaaacaatggctagagaaggacaagcgacgagaaagtaaacacgaacaagggcaagggaaacctccatggatgtgaatctcaggaacgatgacgaccaccgatgatgttaaggatagttatacaggtagcccttgtatttgatcagcggagtcatgagagaatagacatcgtgatactcaaaagaaggggagagaactcgggcaagtcactcctttgatgtcgaggaaacccttcaattctatcattctaaatctattgatgataacagtcgaaccaagcggtcaagggaagaaagaatcaacagtaagctgaaagatcttcagagtagacaaccacccttgttccatacgcgcgattgtatttgcatcgtatagtgcgcgtcgagcactttcaggaacgcgtcttacaaggaacacttatcaagaaccttctctcacttttcatgctcacgaccagcaaacactcaccaggagcaatctttccatccgaatagtttatatgaccctgtcttccatatgagtattcaggaagagcatcattattctgagctcctggctcagagaatattcctttgaaaggaatcgaggaaagaatcttgaacggcataaacccagatatattgacatctggagaaactcccttgatcggcaaataaagatgggtggtgtactacgtcgttccatctagatgtcagcaaccaaatgtgtaactaagactgtgtgagatggtacatacagaacaagtcaattttccctcaattccactatcaaaactaggtataagaggattgtccccagttttcatctcgcctactaccacgatctctgctttcattcttctctcgatcattttgttgggttctacatgatctgtttcttctgttggacagtaccagattcgagcctcattcttgatatcaaggatatcttcatgaatggtctggcggacggcctgtctcatacccttggccgtggtagtgatgacgcggaccagactcagtttaagactggaaggtgatggtcgatatgactgagaaggagattgagtccgatcagtgatcggcggagacaacgtcgtgatagataagtagtatgggattttctctttgacgactgcggctagtggctccggagttgtaagctttcataggaggaaaaaaagttaaaaagacttaaacaccgaatctttggcaagtacatggactctgtatcggaaatagagacgaacagcgacttgcacgaagcggatttttccaaagatcgttgagcgaaagtccttctcgattcgcgtagtgtgccacccctcgctttcagatggacaaggaggaggaagtataggtaaggtctgttggtcactttccattggagggtagatgggaggaggcattggttcataaggagcccagcaaggaggactgagatacagcaagcaaaacatgagaaagaaaagtaaaattcggatcagttcgctcttccgtagagcatttctcaggtcaaatcaaggtcgcgctcagatcgaatgatgaccaacgcataggtgaatggtatagagacgcgctcatttatggcgaacgacgagggtcgacggccaattacatcaatcgtatctacaccatatgaccatcgaaagaagaaccacaggctcagatatcatcgctgcaagtatgtggaaagtacgcgagatgtagcttacacacagaagaaccgacgtcagttcccgtcggtttccctctacctgttggaccagcttctgagcgagttccagcttcaaatgacggtggaaggcttggcaacaacggaaagtgaaacacgaatggaatctccatccccttggatgcgcttggcaagaaatcagacgatggttggtataaattgatctcatcgcaatagatcacgctcgtctcgcttgccaattctaaagatgagtcaatcaaagccagatattggtttcgaatctgaagaactataatggctggagtagacctgatgaaaggaaagggtagatcccatgggctcaccatttccacccaaagggaaagctgaaactgaagtgttgaagtttcgatatgtcgaatacttatcaatcataacaaaatcgggaatagcaaggtcttaaaattactgtcatcccgtatcgatgatatgcccggtaaaacaaagcaaggcttacctgagtacaccgaagctgaactacgatctggctgatattcctcttgcttaaatctgtaggatcaaacagaactagacctgagagatcgtccccagccgtatagacctgatcagaatcgaattggacggagagcaggtggtgattttgcagtttggatttaagacgcgacaacatcgatcaaacctggctagtgaacggtttcactcggtttcgtacagagacagaattgttgttcacggatagcttttacctttggatgatctggaagtggttaggatgtaggagtctttgctcgtcggacatattcaaatcgtcatgcatggcatgtctgggcttaatatatctttcggaccgatccttttccttatgtatctcatcttcgggcccagagttgatcaagagcagacgttcaaaacggatggacatttgatagcaagaaagtagaaagtttatgcaaatgatatgatgcaagatgggcaacatcggttgaaacagacactgtacgaaaaatgtcctttctgccggttgtttgctcgtcatcttttgtacaagtgatccccctcgatcgctccttgagcaaccttcaaagataagagagaggaggcagacgtcgtcaagccaaagtagaaagggttggaagtgtcgagaaaatgccactcggaggcttgctaatggggaaaaatgtaagcattgaggggggttgtcaaggggaccggaaggatgtatgggaaacttgacgtcatacagctacagtgtggatgaagatgcaagagaaacagaaacagaaacagaaagaaagcagtcatgcaaacctcaagtatgatcttgcacaattagagcggcttaagacaacgacagcagaagtgtcgatgccctctgggccacatccgcgaatgtcagcgatctcgtactcgactctcgcgctgctcggaccactactcggaccttctcggctgacacaatcggcccaaatcgatcaagtaggaaagctgcgatctcgtcgtctagaagaaaagcccccagaggtacgagagaaaaggcatcggtcgaagaaagaaagaagaacagtggagaatgagaaaagcagactcaagctgcctaatggatgaagcctaattttttccatagggagactcgtccgactaggagacggcggaggaatagatatgattatagaactcgagaggacggacctgttggctcaatatccttccaatgcgtaaactggcaggttacgtccgaacagcttccaccttgtagttcccactgacaaagcgctcgagatgggtcaagatgtcttttcgaaagacaggatgttcgtagagcagggacaattgactctgactgattctgcgtaggctgagagcgcgttggcatcaagagaggaaagaaagctaaaggcgacgtatacgtctgtatatagaacagtaaagaaagatcaagggacgaattctttacatcagtaatggagaaaagagcagaagcttactacagaagggtaatcaggatttacgcgcgatgtcggtatctcggttatatgctttgaagtagttgatcgaatctagaatttgagtgtgtaagcacagggaaccaaatattttagaggagacgtccatcaacaccgaaagcatcttccaatcgtttacgctcaaccgagagagactgatctgggtcagacgcctaccttctcgttgttatcgttgttcactggtcctacatgatgtattcaaaggaaaaagaaatgaccatttcaaaaagaaatcagtcagttcgttcacctgtatcacgctcagtgcgcttcgatctagcgtcaccaatcaaaaagaatcattcgaaccacctggacctgcatcagagaaatccggaggtgagaatgtttgagcaacaggagaggtagtcttgaaaaaaattggatatacagcgagaagtgtagaaaggacatgctcacttatatctgacgtggacgttattgctgaaacaccgcgatttcaactttgctattcagatactgactcaagttaaaagaaaaatgtgcactgaccaactaaatccttgtctttctcctgcccgaattgctctgtggtctcgtcactatcgacatccattccacctttcaccttctccaaaagatctttcctctgctccaaagcttcttcgagtcttcctaccgctcctgtcattatttcgtccacctcgcccgccatattgctttctgccgtctcagaggattggtatgatctaagcatctcctgggcttgatctacaattgctactgttggtagagggacaggtgaagccctcgttgatgaggttccttcagacgtttcggtcgaaccagatctgatactgctgtcaatggatggaacgggtgccgctggctcaggttccaaagacgatttggcaagggaagaggaagacacactcggagccggtttagtcttctgtttcttctccataacggcgatcagctcgaccatgcgtctaatctcagactctttggcttctagcttagacttcgcttccatatctgcctcggctgtagacgcgccatttaacccaggtggtgaaggtgcggcagttgtggtcatcgagcctttcttgcttgtagttagtcgagctccgggaagaacaaaaggtgtcgtccctccgtcctcttcatcactagcctcacaatcggaaatatcgattacaaatctccaagcctgttcaggaacaagcggtttagatttgctgaacgggattccttcgacagatgtatgattcgagttggatgaatatccgaacgttgtgggtgctttatggtcaaaatcaagagcggagggccgcttatgagctgatgcagatcgtcgaggaaggataactagctgttttggaccgagcaaactacgggtggaagcgaggcgaggcgaagagggggcggaagaagatagagggggcgccgatgctaaagtagagacgggggttgggggcggcgcaagcggagtcgaaaggggaatagatctagaggcataagcttcctctgcggttacgaccgcgtcttctctaacttcaccttcttcgatttcctcctcatcatcactactcaacacaacaacatcgatctcctttgaactaggttcagagagaagctttcctgtcttggccgtcttcttcattgcactcataaccatcctttcactcttctctttctcttcagacccagctaccatagccttggcggtttccttagctgcctttattgccctaaacctttccgctagctccttttcccttcgagccacctcttccttcttctctcggagtctttctgataaagttgactctgttcgtttgtcttcttccatccgcttcttttctaagagcagagctatgcg

SEQ ID NO: 1565 - DNA, 18472 bp, Xanthophyllomyces dendrorhous
gagatggttgttcggcgaagggagttgcagttgtggttcggaagatttaggaatcaaagtaagatttcgagaaacaggggacttgattggcagcggtggaggagggctgataggaggaggaggagggggggtgtcttgtgttttaagaggttttgcaatcacgcttgagtcgaaggttctaggcagaagtgctgcaccagcagcggaaggagggagactatgcgcagcatccaaggcaagagttggagatactacagcaaacttaggaggggagataggcgcatttgaattcgtcctcccctctgcatctgcatccgaggttttccttttctttttctttttggaggacttctctaaggagacatccgacttctcagaaacaggcaccacggcttccttagtaagaccaatctggttctcgacagctaccacaggggatacttcgtcggatataggtacagaagtagagggagcagcgttggtcatgactgtgtccagagtctggtcttgcatcgagattcgatcgaagagatccatacgagatttgaaagagtctgaaagtgtgattccatattagtggttgaaaatggcaacggctatggtcaaatattgaaaccacaagtatgttaagaaaacaaatctgaacagttgctgaccagttttctcagctgtatcgttcacttgactgagtttctcttgatttagattagtttttcttttctcagcagtaagaatcccagctggcggaaggtttgtgggtagtctaattttgagatccctgcagtacactagaagggccttgcgagagaatccttgggtcacaaagtactctggctccaccccccatgatagaagttcgatgagtaacgttcgagactctgcatattcttcctcagaaacttttcaatagaaagaggtaagaattagcgagcaaaaagagtgagaagaatcagctacgttcttagatagatttgagcaccgctcaccgcctggaggaaagatacgtactctgaagttcatctgctcctgccttgacgggatcaacctttctaggctcctcaatcatcctaggttggatcttgatcggaactttcgatcctttagccgtcttggtcttctttttcttaggaccaaccggcttattggtggcctccagtaaggcgggactaggtggtggaaaccttggttcgagcgccagcgtcgggggaggtgggagagggaatggtggtaacggtggaagtatgagaggattgtttgagcctaaagaaggggcattatgagggtaaattgttggtggaagtatcccaggtggacggatattaggagtatacagcgtaggggaggctggcttaggagacgcgagtggttcttcgtcctcagagatctctccatcctcacgatcagctccctcgtctccaaccttggacgaagcttggccggataccgagagcttagatcctgccctcaatactggttcgatcttggcagcaggcgtcgtaccttgttcaggggaagaagtcaaggacgaaccactagtaaggttcgcgacggtgttggaaacaacgggcggacgtgaagaggcttctacttcgtctaccttacgtttctttgtctgcaaagcaagcgacctgagagcggacacatccacaggtgtagacatgatgagcgttgtcagtcaagtacttcaaacccaggtgagagacgaggacaagcaacgggaggatgatggtatggggaatgagggcaacaatcgaattggtagggcgaactggggcaggagaaaaggaaggatgacttaattgaaccaagtatttgaattgtgaatttcatctataagtccaaggaaactccgtgtgagatttcagttgagatcgtcaacaatcaactcatcaaaatccatcagctcagtacagatcgctatggatcctcaggcaggtagctcaatctttgacgacgaggacgagagatctgtgagagtttgtttcgtttttttgcgcttggtcctcaagcgtttttgatattctgactgtcagactgcccaccaaaactgctatagcctttcagctcacctcaaactccagacccgtttccaaggatcgttcgcgaagctcctttgcctacggacggagaacccgttggattgtccactcgttcgtttatgaagcgatgagatgagctctacatagacgaaataaactgatcgtatcttaatcgtttctttgcagaggaaatcctggattggcaagctcagcagcgtcaagcccgtctgcagggtgaataccaaagaagcgcccggctcttgaatgatattgttcgtcttctttagatttataaagtaatcgagttatgataataacttttttctcaatctatctcacaggtttacgataaccttcagacgaatttaccccttgcctccctccgagttctcaatactcggcaaactaggtcaacctttctctcttctctactcaccccgcttcttacggcccgtcagccagcctcagaagatccaacattaggttccctactggaacttactcaagaagttaagcaagcactcgttccattcgggcttttcaaacgaatcgatgttcggttggagcaggctcagagtttgcttgctagggagggcgcagtcgatgttgtggtcgacgtggaagaagccggcagggtcactttgaagagtgggacagagtttggtcaggctgaaggaagcgctgtgagtcctgggctacattcatctgctcatgcatttcatccttgccggtctagagttcttccagtctgagctagaaactgtttcgattgtccaacagtatataacaggagacgtccgtaatgtctttggaggtgcagagactctctcagtgtcttcctctgtggggacgaaaactcgatcagcgtttgaagtgagcttctatgcctttttctctctctatatttgtcacagactcatcgaacgggatcctttctgactaccatctacacaggctagcttgaaaactccgctttttgcgtctcctcttcaaagtcttgtactctcggtcttttcattagaccgagacaacacttcctacgcttctcattgggagggtcttcagggtggtaaactaacttgggaggtaagcgtcttcttcgatcatcaagtgactgcaaccaatactgatcagttgtatcaaatgatcatcatttttcggcggcatcgtttagaaaaggaactttttcggtggtcattccatcacttatgaggccacccagcgcacactccaaaaccttttgcccaacgcttcactctcgttcgttatatcgccgtctatttactctttcctgccacaaggcttctcatactctctttcactcgttcaatcagtgttcgagaggctgctcggccagggccttctctcaaatcctccttgatgtatgcatacgcatctgacaccagagataaaaccttcctcggcacgaccggacgcctcttcaaggcctctcaggtgagatatctatagacacctcttctcagtccaaaatcttgaattgacctctgaccatgagaaccctaattcttttttccatactcgtttgataggaaatcgccgggttaggaggttctgcgtttttcctcaaatcgacgaccgagactacgttctcgcgggcaataggaaccgaagggctatttgcttccttttctgctcgggcaggagcggtcctaccgatgtttaaagatcgaccggtccatcttgccgatcgattgttggctggcggtccgaccggtgtgagaggtttcaagatgaatggaatgggtcctagggatggtggttcgttcattccacttttctttgactgatcccacattcgagaaaacttattcaatgtctcttacttccgcatggcactggactggatctctgtagaggactcactaggaggagacttgatgtactctattggggtttctctattcagtccattgcctatcaagccggaatggccattcaagcttcacgcgttcgccaacgccggaaagttgacttctctcggcggtttgtccctttcttttcctatctgcttcctttctcaaacccggaggccaatttacggatcaagcaccaacatattcttggtcaaacgagatgctcattctttcctctttctgttccttgatcagctacaccaaaagaatcgatcagtccactattcgctaccgctccatcggtctctgcaggcgtcgggttggtgtatgacttctcacccgtccggatcgaagcaaacttcacattacccttagtaggaagtcgaaaagaaggtcttagtaaaggatttagtttgggcatgggtatggatttcttataaaaagattgggcagctctgatgcatccttgattgtgacgtagaggaaatcagggatatgagaaggagtatcgggcaggaggaggagaaaaagaagaaggatatacaaatagcgatggtgaacgttgatgagattcaagagaacttttcgtgcgggagagaagaataggagtttgcacgtatcaacttctcgaagagagcaagcagagaaaagaaagaaagaaggagagacaaagagagagagagaagattgttcaagattgagaagagtgaggtaacactgggctagagatgtgaattacgattatagatttagaagaacatccagtatgacacaagtaggaggtgtctatttcgaagcggccgataaatcactgagcttgtctccaaactattatacgccaaacaggttctgaagatgctatctagatgtcaggcccggatcaggtcatattcgacgagaaggaaattgaacatctgaccaaagcgagatgagggtgcatgatgtgctgtacttacagttcgcttcgtgacatctgtcgttatatcaccagcagtggatggagaaccaagcgagccgtaccgattcgaacctgttcctgtggtaagtgcaggttccttcgtgagataatgagcagtgatggctccggcgatgacgaagagcatcacgaataccatcaaccagagaatcttgcccattcgggaatcttttgcctttttcgcttgtagccagccggcatccgattcgacagccgatgcgttgtgtgctatgatctggaaggaattcatagagtgaggatgtctgagaaaaggtgtctgatgtagaaggaccgcgtttttatcaaacaaacaaaaaaccttttaagcgagagtggactcaccgagaacctattccagaacacagactttctctctctcccggtatctcctcctccgatcatccctctagatacgccttcttctttttcatgtgcggtcgatccgactggggacctggtcggaccccaggcaagcgcaggactaggagctggggtagaaaatggggacacgaacggatttgtcgggctctcggtcggtaaggatggagaaggtgtctgtcgtccagaatcatcggctcccgcgtttgggtgataggccctttccggtgaagagattggagctagaggggtattcgcagaaagatatggactcctttttatgaaaaacgaacaagggggacaacttgcgtcaacgatcaaagtcaaggggatacattggtactttcgtgatctgctactcaccggccaggttgctgctgctgttgctgctgccatgactgtttttgttgctgttgctgctgttgttgttgttgtgcaaatgtcacacgatgatctccgccggtcgttgagagataagtagataacatttaagggaaaagagagtgattaagaataagtctttcggattgtgttgtgagatgtgagtgtgaagaaaagggatctcagcgaggaagagacaagagagaggtagtgagaggttgattgatataagtcaagaaggacccggtatcgagcgtgtcagtaagtttcttccaactgatgaggtccagacgaagtcaagaaggaccaagggccagggtgagtagattggttagcgcaaagagtgaataacgttaagagagaggaaccggactatccatcaggttctgtcctgaaaagagaaggtggttcctttgttgcgaatgtcaacagcaaagtttctgcaggcatgcaacaactagttagttgattagtctcaaacggtttctcaatacattcgtccattcgtgatcccaaacagaccaaaccgagattgagttggtatagatcggatgggacaagactgaactgaaccggattgtaaacatcatcggccgattagggccagggcattcaaggggaatgaaacgtggttacatgccggtcatgcaacatgtcgtaacaaggacaagattggggtcagaaaaccaacgttcgatatttttcggatgagtctgatttcaatttattgctggataaggccgagtatgaatttccattcctcttgcttattctcttattcgatcacccgaaaattaaacgaaacaaacgataaaaaggcccaagagattgagacaaagaactgggtcgagcccgttggctttagtttctttggcgtaggtcttgcgtcgatttccttcccgacggcctttttcttgtgtgtgtgttgtcttttgtacaatatatccctctatactctctcgcttctttcaagcttcatctaagcgcccgccgccgaggcttttctagactgggctctctgtcttggtccttcttccttttctctctactttctggttcatcatttttccatgcatcctcccataagttccgatcaaaggaagagaagaagacagacaaacaaatagatagataggaactaggatagaacggaagcatacgagaagggagagagcaaattgagaggaaaaggccttacacgcacgcaagcacacgcacacgcacacgcacagacagtcttgccgcctccgccttccagaaatggaccgaccaatccttcggctttgaagcggacatgaaacgtaagagagaagagacgcttggtattacagacccgagagagtgtaacatccaagcaatcgaatgtgctatctgttctattgtttcctctcctttgtagctcaccttttccctcacatccacgttgggcggcatatatagatgcgcactcgaacggtttctagctctgtccggatccagcgcttctttgagagtcttttgcagaggtagatgatgcatgaagacgaaaatcgagagaagtaagacgaaacatcgtgaggtcattgtgcttacaacttacactcccacggccggccgcatgacttcaggcgtgagctatcagccagagggggttgacacagagtccatggagagagagagacatacatatccagagaaaggccaattcgggtaatcgagagagagaagccgagcgattgaattggtcaactctagccgaatcgccgcggcacgaccgggagggaagataatcattgcgcagttccaaaaaaagcgacggaaaggaggtgaaattggaagcatcaaaaataaagttgattggggccccacttctggaaatttctccagcggccgacggcgtagacagacaaagttcagcgttacaggtggccgaccgcgagagcgacgacgcacgagagcgcgcaaaagaaaagagattaaaagaaaagaaaaaagaaaaaaaggcacactttccctatccggttcctggaaacccaaatacccacactctctatctcggcctctgccttgccgcccgtcaactctgacaaactcccagtggacacggcaaggaaaatctgtgtgaaaaaaagatacaaagatccccagtccttttagttggatctttcgtttcttttccttctctcgctttcattctttcttgacatccctccatccattctagtcctcgatccagtcttcgttttcatccctacttgtactccctttctcgacaaggcgtgtcgtaaagaagcgtcaaccccagtagctcttccctctcgctgacagtgtccccgttcgatctatcgatcgacagctccgttctctgcgacagacgggttcattctcatttccctaatcttaacatattcaaaagtcgttcaaagcgcatacatatcttccaccatggacgagaaaaaacatacacctgatgtcgttcctggtatgtaccctctgttgtttcttgtcggtcaaaaccgtcgactttaagcttggaaccagtttcttggcgttctttgttctcccttttctgtccctcttcttggtgccgttgagcgacatcccttttttgcgcaactcctagatccttattcgtccccttcttggctttttttcttctgttttgtttttccttcgctcccgtagacgacgctccgatcgaggagaagaagaagcgagagtacaaggatatggagcacaagagtgatggtgataagcacgctcttgtcgatctaaacactgttcgtcctcccgttttttcctccgttttcccttttcttcccattagtattagattttgccaactgaacagatctcactcatacgctttccattccatttagattcaattcaccgccgatgacctttacgacaaggataaggtcgatatcgagcacgtcgtgatggaggaggtcttccagctccttcagtgcgtaatccttatcgcttccgattatacagttttgatctgaggctttcgcttcatcatctgactccgttatcttaacttgcaacacagatgtgacgaaaacggtcttacctctgccgaggctgctcgacgaatcgagatctttggtcccaacaagctggccgagactaaagagaagtacgtttatcttctatttataaaagtccggaatccatacatcctgttatgcatacacgtatgcctaaacgacagtcgttgacctggtccacttctccccatatcacagtgccttcctccagttcctctctttcatgtggaaccccttgtcttgggtcatggaaggagccgcccttgtcgccatcgccctgtccaacggaggaggacgacctccggattggcaggatttcgtcggtattgttctgttgctcatcgtaagtttcatcttttcatcaaggccatctttaacgaagaaaccgagacactcacgttgtctcttacacagatcaactcgaccatcggtttcgtcgaggagaggaatgccggtaacgctgttaaagctctcatggattctctcgcccccaaggccaaggctaagcgagacggctcgtgggccgagattgaggttagtctctccgttactttatcagtggccacgatcacaaggctgatctatcgatactcgatcttccacagtcttccgagttggttcctggagatcttgtttcgttcaagcatggagatgtttgcccctctgattgccgattggtcgacgctgtggatgtttccatggatcaggccgccttgaccggagagtctcttcctgtcggaaagaacctcggtgatgagtgcttctctggatctacctgtaagcagggagaggccgagggtatcgtcatctccactggacccaacaccttcttcggtcgagctgccactcttgtcggagctgagaacgattccaccggtcacttgcaagccgtccttgccaagatcggactcttctgcatggtttccatcggtatctttgtcctcctcgagatccttatcctgtacgccgatttccgatactcttaccgagatggtctcgacaacatccttgtgctcttgatcggaggtatccccattgctatgcccaccgtgttgtccgttactatggccgttggagctcagcagcttgccaagcacaaggctatcgtcacccgaatcaccgctatcgaagagttggccggagttactatcctctgctcggacaagaccggaacgcttaccaccaacaagctcacgatcgatatgaacgaagtcaagacctacggacctttcaacgctgaggaggtcatgatgcttgccgcttacgcttctcgagtcgagaacatggacgccatcgatggatgtgtcgtcggatgcaacggaggacctgaggcttcccgaaagggtatggagcttttggactttattcctttcaaccctgttgacaagcgaactgccgctacttacgtcgagaccgccactggaaacatccgacgagctaccaagggaatgaccggtatcatcattgacatttgctcccgaaacaagacatccgagatggaggatcagctcgagaaggacgtcgaggagtttgcccgacgaggtctccgagctcttgccgtcgcccacgaggatgttctggacaactcccgagagaagggtgctcccggaaacggattcgagcttattggactccttgctatcttcgatccccctcgagacgacaccaagcagaccatcgatgacgctcaggctcttggtgttaaggtgaagatggttaccggtgatcagctcgctatcgctaaggagaccggtcgacgacttggtcttggagatcacatgtaccccgccaagattctcaaagatggaccccctgctggtggcaagtactccagtctcgatgagatgatcatggatgctgatggtttcgccggcgtgttccccgagcacaagttcgacattgttaagcgaatccaaggtctcggacacctttgcgccatgactggagacggagccaacgacgcacccgctctttctcgagctaacgtcggaatcgctgttgagggagctaccgatgccgcccgaggagctgctgatatcgtcttgaccgagcctggactctccaccatcgttcacgccatccgaggatcccgaattattttccagcgaatgcgaaactacgccatctatgcctgtgctgttacgatccgaattgttgttggattcgccgtgcttgccttcgcctggaagtttaacttccctcctttcatggttcttattattgccatcttgaacgacggaacgatcatgaccctttccctcgaccgagtgttaccttccatgactcccgatcactgggatttggccgagattttctcatacgccgttgcctacggactctaccttactctttccaccgttgttctcttcatcgtcatgcacgataccaactttttcgaaaacaggttcggtgttgaggccatcaaggaggtcaacgataagaggggtcacatggttatctacttgcaggttgccatcatctcccaggctttgatcttcgtcactcgatctcacggatggtccttcatggagcgaccctcggttgcccttatgctcgccttctgcctcgcccagctcatctcttccatcatcgccgccttcggagattggggtttcaccaacgttcagtcgatctctggtggttgggttggaattgtctgggtctggaacattgtttggtacttccccatggatttggtcaagtttgccatgaagtacactgttatcgcttggttgcgaaagcgatctgctgccaaggccgaggctgttgcccaccaggacactggagctcccatgcagcgaaccgtctctcgacacgagtctttgtactccaaccgaacttcgttccttaacaagactgctcgacgagtcggacttggaaactccaaggtttcgatgtccaaggctgagcagcagcgattcggagcggcccaggcttcccagactggagctaccctcgctcgacacccttccagagtataaatatcggtttgaggccatctttctttgtgcttcccgtttttttgctattgctcgcttctcttttttcctatcctagcatttctgttttacttctacccgcctgtcatccttgctttgcgcctagcttcgaattttctctctttcccttctctttgttcttcctcttctactagtatccgttcattgtatgagtctcaatcggtgttttctcctctatcccccccgtccccccttatactggtcatagacgtcaaactgcattgtcttgaccctcgcgtttgtttcaagatcgtgctgtttatacttgctatcatcatgtttgtagttaaaacaaaaaatcagaaatcaaaaagaaagaaaacaattgaaagacatcgaaaaacggtagaaagagaacggcggcagccggaatgttcggcccggtgttccgagggaatgccgaatgcataaatgaagactagttaataggttgaactaaacccgttcttggaacgaacttttatcccatcatgccttctttgctcagtcctgtgtttgccagaaacttagccaggtctattctccgtcgtcgtgctgcccaacgatcgttctttacggcagcactcgaacctctgacgttcggtcggcaagccttgattgtcagtgaacgttacattctttgctttttatgtcttgatctttacaagggatcagtggaggttgatgttgtaaaccattctttcattttctgcatctccatgttgtttctgtaccagacggtcggggtcacctcgatagtcatcgggacgacgctctactttaacccaaactctcctatacatcttgaatcatccacgaatgtgacctccgatggaggatccaagcgaatgagaaggtcggatcttatcccgatggaggaggtagaaaaacacaataccgaagatgatctttggatcgtccttaatggtgaagtttgggacctcaccgagttcgcagcagaaggtcatccgggaggaaacactccgttggccagagccgcggggagagatgcgtctaatgttcgtacatgccattcgttcggttctcattcggatgaccgccctcacttgttgtagagctgcagaggagctaacgatatccatgtgggtctttccttattggcttcttttggtgtgctctttggtgtgatcgaccggatgggtgggttgcccaggtgttcaatccgcttcatccgccagggacaattgagaccgcgttgtcgaacgcatcgttgccggagaccgccttggtgggaagaattaatccggcgaccgttaaaaagatcgaaaggcctgagcaaggagaggtcattccggtcaaggctgataaagccgaggagaagatcgatctagggatggtcattggtttaccagacttcacggtatgatctttattgttcgctcacccttctattgtggtagagtcttactaaaatgaaaggaactatttatctatatgtcttgcaggctgcagccaagcagattcttcctgctaaagcgttcgcctactattccgctggaggtacggatgagtacacattaggacttaaccggtcttcgtataaccagatcctcttccaaccgagaattctagttgatgtaaaggaggtggatacgtcgacaaagttcatgggacatgacgttagcctgccgatgtttatttgtccttgcggaatggccaagctcagctcgcctgagggagaagccgttcgttcttcacagtcttttattttccttgtttaagagctcgcccgagttcgtgttctgtatcaataactcttcgatttctggggttgcctcgtttcgtaaatcgatcaggcgttcgctagtaagttatctctgagggttaccattcatttcagacgaagagattgactatatcatcgctttgatcttctctagctgctgccggcaaatgcaacatcgctcagtttgtttcgaccaacgcttcggctcctcttgcagagatgtgggtcatctttcgttctctttcctctctatcacctcgtgtctcgctgaactagttcgacttctgtccgttttagtatcgctggggctgtctcgaaggagcaaccattcttcatgcaactctacgttgaccggtaagtacacatgtccccttatcaactgtcggcttctcgtatgtttgcgttctgagctgtatatatcgcgctttcgtctgcctatagaaatcgacagaagaccgaagcattgatgcaaaagatcgaggctagcgggcagatcaagggatactttgtgactgtcgatgctgctgctcctggtaaacgagaagctgacgagcgagttagtcgtttccctttctcatcttcagctctatctttgtcttttttccggagcttgatgagtttgcttcgtcttatcatttcttcttttctttactatccagtctcgagcagaagttgaggctcagtctgggatgtccggcggtcgaattcaatcagacaacaaaggtggagggatcggtcgatctgttggaggattcatcgacccatcgttaaattgggaggatataaaatggctcaggtctagaacaagcttgcctattggaatcaaaggagtccagacggtggaggatgccaaaaaggttcaatttgttctattctccttgtcccgtcatattcatctatcgccttcttccataagacttgtggctgatgataatcttctggggttgttgtttatgatgcgccacaaaggcatacgacgtaggtctagatgcaatttacctgtcgaaccatggaggtagagcgctggacggcgccccccctccgatctatactctaatggagcttaacaacttttacccagagataatcaaggacaagaaatgcgagattgtacgtcaaccatttctttcttccctctctatattttgccagagcaaagagaacatccaaacagcattctaaaacaattgtccgacttaatagtacatcgacggagggatccggagaggaaccgatgtcattaaagcactctgtctaggtgccaacggagttggagttggtcgaccattcatgtactcattggtgtatggccaaccaggtgtcatccatgctatcgaaagtcagtctcttcctctctttacttcctcttcccatctgttctccgacaaagaggatgattgactgaagcaagaaccggatgcgttgtctttccttctttcaagtcatgcgagacgagatcgagacaacgttgcgcctcttgggtgtaaccaagttgtctcaattgggacctcacttggtaagcctttcctcttacactaacaccttgttgataactttaatcgcgctttaaatatacttcgagctaacggcgcactttttcttccttactttactgataccacgcctggcatagcttaacactcgagcgttggatcctctgatcgcccaaaaaccttctttcggtccagatgaacaaaagcgctaattcatcatctacccgcctgtcttttaatatcctcttctttctttctgtacatgatatccatatgatctctctgttctttctatattgctcttgtcgatgacggtatgttgtaccctatgaatgtgtctatctttctcgagcgatcaaacggatcaagacaaccgaagggtggttcgcatgtatatgatccttcttgataaaatatgagatatgatcgattatttggacagaaaacggcaacgatcaacagtgactatcaagaacaaacgaaacgggaagaccggcagatcaagttgaatggagagagaaaagaaaaagatgtttgtacaagaagtgagaaatctacatgctctttacagtttagctttcattcctcaactttctgaagaaggaggcagagataagaaaggacctctctaaggtcttgaattttcaactctaccaaggtgctagtgaccaaaccctctgactccttttgggacttcatgcgcggccgacccgtttggctttgcagatttagttctcacacctttggtgtaaaacagataaccgcaaggccacgtatgctgtctccgtcctgactcccatttccattcggtcgggtcgatcaggtcagtcgaatcggacgcctggttgatgagatgttgcatctaattgagaaaaatagaaggattggactagtcatcagtatagaaaagaattggaagctggggaacaagagggaaactcacatgatcaggcgttcgaaccctcatagcggacacgtacccatctagaggaggggaggagagaaagaataggatttgggatcgatgagacaagatctttgtgagaaagcatattgaaagaactaacccatgactaggaagaagggaatgataggaacaatgtaggtgaagaagagttgagctgatggtaaagggcattggaatgatgcgcgcgaatattaattcaacccgaatctcgtacagaggagaagagagagccggagatttacctagtgtaggcttcgtgaacggagtaagaatccatgtcaaaggagcaatcagcgtgatgaacacgaaggatgcaaagtctactttctgcagttcgaatatgctgtgtgtgatggtaaatatcagagcatgacagaaatcagacaacgagctacttctttgatctcttcagagaaaaccctaccagacagcatctcccgcaatcatcgcatcctttatgacttgtaatgcgagttcttcattgaaatggtggaaagcaagacagaaggttcggatatgtgttcctagatcggaaaccaacgacgcaggtggctgggttgcatcaactggatttggatgatagctgatctgatcagaagtgaaggaaggaagaggcgatggaggaaataagtcggtacaaagaaaaggaaccggacgaagagattgagcttcacggtgagcgctgaagggaatacaagactgttaactttctgctctcaaccagtaggcagtccattaagagatacatggcgagagatggagagagggagatactaacttcaaggcagcctcgattttcttcatcggaccaccgcctcccgaacagaagtcaaccactcggaccttctgacctccaagctcttgcacaacctctcctagaacttcggctgcacactcactcggtgctcttgtctgaatcggccagaaattcgtaatccagagcatcgtcaagatcttttggaccccctctctgatgggaactggtgtgtaaggctgttcatggaactcgatgagcctgggtagttgctttgggtatgagtctcttgtcgtcagatccggtcgtcgaagatgggcgagctctacattaattcctggtccaaaggcgatccctaggatatctttccttcctccgcgttttcgcccttcttcgaaaacataaccgatcgaggccgaggacatatttcctctgtctttgtagacggcccagctagctcgagagtggtcctctgggctgattccaccaagagattgctcgacggaggagatgatgagtgatccacctgggtggatgaatgcgtccatgttgagagaggacagcgcaagggtctttgattccgaaggagctatgaacgcagttactaggggctcaaccaaggtgctagtcaccactggaaccttgggagtgatgaccgcctgtcgtgtttgaagagatttgctcgttaggtctgagccgagagagaggaaacagtcatagaagagaatggagcacatactcgccatccagtctcacaaacgtcgaaagcaagctctcgactcgtctctgggattacttctactgccgtctttatgatctcgaacgaaggtttttctacggcaaatcaaaccagatccagatgcttaacgatcagcaagatcaactgatgaattgtgaagacaagagaaagaagagccatgttatctctttggacaaaccaaatggatgtaggtctcgtccgccaaccaccaaaccacttgctccgtcagcaaagagtaggacggggatattgagcttcgagaagagaccatagaagaagagcgtatattgatttagtgactatcgcgagaggatgtgatcacaaatggaaacacacctggcctgattcatccatggactggatctcagtcctcatcattgaactcgtgatctagatacatcgatcgcgtatgatataaaaaagtagataagagaagaaggagataagcgagccagatatgctgagctatctatagaccagatcgaacatacctcacaagctacacagagcactctggcttctgggtcagcgttgcatatgtcggctgccagccgaaggatcgataagcctccggcgcaacctactccggtgatcattgtctttctgagatgagaagaaagttctagtgcctcggcgacgaaatgatcgaacccagggtatgatgacgcggtgcatgtagctggtagattggaagaaaatagatggtcatgatgacattcgacaagagggttgcggtaaagagtgagggagagaaagagagagatcaagggtcgcgcacgtactgctcagcatgtgagtgatacccttcttgtctcctccccagtcatccagggcattcttggccgcttcgatagcgatctgaacgcccttgtcgagaaagacgtcgacaatctcgcctatactgggaggagcatccttgttcagatggttcgagtccgggctctggacactctttcgatgaagaatctctgttcggtggttgatcatgatcgtcttttcaagcctgccggattcgagtacggaaagagagcgtgaatcagaaagtcatgttcatacacacacacacaca
